United States Patent Application Publication US 2011/0183924 A1 - sequence listing, part 142

SEQ ID NO: 373939 - DNA, 5755 bp, Homo sapiens
ccctttcctggctctggttacggccttgcgagttgaacaaacttgctgcaggcggattggcggctgggagctctcgggctggggcgttgtatttattaatttatattccgcggcgccccgcgcgggcggctcctttgtgtccagccgccgccaccggagctcccggggcctccgcggggagcgcgtcccccgcatccgcccgacccccggggctggcacgtgctgcgcccggtccgctgagggggcggaggccccgatctccccgaccccccttctctgcttagaggaggaggagcagcggcagcggcagcaggaggcgacagctgccagccgaggaggcgcggcggagaggggactgcggtcagctgcgtccacttggggctgtgcggcggtcccgcgcccggcgatgttcccgggcactccctgagtagcggcagcttatcccccgcccgctagcccgccctggtccccggctcgctcgctggctggcgcggccccggccccgctctgcgtcggccccgccgcggtggaggcgcgcgagggggacgcggccggggatgagcggattgcgggtgaactcgccgcccgggggccccgcgaagccgtgagccgctgcttttctccgagtcgccgccctgcccttggatttgagatcatgtccatccacatcgtggcgctggggaacgagggggacacattccaccaggacaaccggccgtcggggcttatccgcacttacctggggagaagccctctggtctccggggacgagagcagcttgttgctgaacgcggccagcacggtcgcgcgtccggtgttcaccgagtatcaggccagtgcgtttgggaatgtcaagctggtggtccacgactgtcccgtctgggacatatttgacagtgattggtacacttctcgaaatctaattgggggcgctgacatcattgtgatcaaatacaacgttaatgacaagttttcattccatgaagtaaaggataattatattccagtgataaaaagagcattaaattcagttccagtaattattgctgctgttggtaccagacaaaatgaagagttaccttgtacatgcccactatgtacctcagacagagggagctgtgttagtacaactgaagggatccaacttgcaaaagaactaggagcgacctatcttgaactccacagccttgatgacttctacataggaaagtattttggaggagtgttggagtattttatgattcaagccttaaatcagaagacaagtgaaaaaatgaagaaaagaaaaatgagcaactcctttcatggaattagaccacctcaacttgaacaaccagaaaaaatgcctgtcttaaaggctgaagcgtcacattataactctgacttaaataacttgctgttctgctgccagtgtgtggacgtggtattttacaaccccaatttaaagaaagttgtagaggcccacaagatcgttctctgcgctgtaagccatgttttcatgctgcttttcaatgtgaagagtcccactgacattcaggattccagtatcatccgaactacccaggatctttttgctataaacagagatactgcatttccaggtgctagccatgaatcttcaggcaacccaccattacgagtcattgttaaagacgccctcttctgttcttgtttatcagacatccttcgcttcatttattcaggtgcttttcagtgggaagaattggaagaagatatcaggaagaagttgaaagattctggggatgtttcaaatgtaatcgagaaagttaaatgcattttaaaaacaccaggaaagattaattgcctaaggaattgcaaaacctatcaagccagaaaacctttgtggttttataacacttccctcaagtttttccttaataagccgatgcttgccgatgttgtcttcgaaattcaaggtacgacagtgccagcccacagggccatcctggtggcccgttgtgaagtgatggcagccatgtttaatggtaattacatggaagcaaagagtgtcctgattcccgtttatggtgtttccaaagagactttcttgtcatttttagaatacctgtacacagactcctgctgcccagctggcatattccaggccatgtgtctcctgatctgtgccgagatgtaccaagtgtccagactgcagcacatctgtgagctgttcatcattacccagctgcagagcatgccaagcagggaactggcatccatgaaccttgatatagttgacctgcttaaaaaggccaagtttcaccactctgattgcctttcaacctggctacttcatttcattgctactaactacctcatcttcagtcaaaagcctgaatttcaggatctttcagtggaagaacgcagttttgttgaaaagcacagatggccgtcgaatatgtacttgaagcagcttgcggaatacaggaagtatattcactcccggaaatgtcgttgcttagtaatgtaaccctggagcttttatacactacatttcttttttattattatgaagaatgggatacctcccaggttccagtaaaattcttctgaccgaaaccaatgtgggtgttagaaaaattaccatatagcttaatatgtttattagttctctttggaaaaaaactaccactgtggtcttaaaagggaacaaaatataccataggctaaaactaaggctttcactctagaatgcaaagctgttttgcagctgttttcccttaaagatgtcctgttgctttagtgatatttagacccctctcagttaagaaatgcttagattaaaaaaaaaaaattacgtaggattaatacagaaatttaatcatgtctgattaattgctctattaaaataaggggcatttaaagacccagcataaccatttgtataatgagaaatctaggggaaaaccaatcagtccaacatgagattttaggaatagaaatttgccggccatttggaaagtgaaatgccacttagttctcaattgatgacagtgtttgaatcatcataaaaaaaatacctgcttttcatctggacaacccaattgagccactttatctccttttggcaatctgagtaggcggggaacctaggcagggctggctttcttagcgtgtaacttgtgtagcagcacagggcccacacttagaaggaccccacacttggttcaaggctctgctatagcggaaattcttaataatgtttgaagaagggccccatgatttcattttgtgctgagccctcaaaattatgtctgtttcgtggtgggaaatatcctatgttttcttgctcaaacacctttctctctgaaagcagaaaaaggcactgatataaagggaagagaaggaggctcaccggagggaagagaacatagtgaagattcccgcctttggggaggtctggaccacccagggcctccactgccaccttggctggcaagggagaaatgtgttgtgttgtcttagctttaaaacagtcacagttcttgctctatcatagatgaacaaatactttcttgatcattctgtaagaccaggaggttggtaagagtgactaaccagcctaactttaatacacatgtataaagatgttcacagagaaagatgctctgtagagaatttgctaccgaagttggctcaagaatttgtttttagtgttatttaccaagattaggacgtcagtggcttaaattctttgaattcttttcaaggactgcaagattatttgataaagagtagcatgaatcttgtgctctaatattacacagtaagttcaaagaaaggatgtaagtcaaagacttgttacatagagggaaaatggactgggatagaggacagactgatagtttctttctttcatatcacatgtatagagaaataattatatcagaaactcacaaacctagacatggaaaaacagattactgtctattgtcagcatcattttcatctgtaagtcactactggaatatatttttcttttaatttccagtgactttagaatacacacagtttttccgacttttcaaaaatttgattaaatggttttatagtataatattgggaccccataccgttagcccttgtatgtataccaacactgccaaagtaaaacattaggtcaggcatggtggctcaggcctgtaatcccagcattttgggaggctgaggcaagtggataacttgaggtcatgagttcgaaaccagcctggccaaaacagtgaaaccccgtctctactaaaaatacaaaattagccagatgtggtggcgcacacctgtaatcccagctactcaggaagctgaggcaggaaaatcgcttgaacctgggaggtggaagttgcagtgagccgagatcgcaccactgcactccagcctgggtgacaagagcgaaactccatctcaaaaaaaaaaaaaaaaccaaagtgaaacactaaaaattccctatagatatattccaggaaatattttaattgggctgattttaattaggctgtatcattgatgattactggaatcgattttatgtcttttgtattttaatcacttgagttaatcaaccactggcaaatcccatttgacaaagattagcattgtaaaaaacagatactgtggtagatttctagaaattcattcacatttaagacttctaaaatggaataatagccttttgtttttcatgagcatattcgcacccctatatgaattacagcatttaaagttcaaaatcagtaacttttaatctaggaaattgaaaaatattaagttgcaaagcaaaaaaaggtattttcttgaaaatactatttaatgtttaactagactataggtagttccttaaggttgtttgacctgaagtggagttgggtttggaagctggtgcccagttggtgtggagtgtgtagttttgttatgaaagttctctaccacctacctgtgtgagtgacaccaacatccagatgtcacagctctccagagctagtcagaagagaaatcaaattagtgtttaaacccatttgcatattgacttgtcagtacctttaactcaatttaatataacaagaaatcgtaaaatacttataacctatcttagagaaatgagtgctggttttgagagttgttttttaactgaaagattatttctagatgggtagtgctttgtgctggtttctgcttccatatatttcccagtcattttaattagagaagatactctatggtagaactaaggcctttcctttcttggccaaagtctttaccctatttaaccctttgtatatttctgactgctcactgttcatattataggggaccagatttgtaatatagaattctccataacatgaatgaaattaattctgtccaagccagcatggtggcttcatattaagtagtaacagaagtctgaacaattggataaatttgacttccaagacagctaaacttttcaactgcaattttaaaaactacactacactgttatagttaatctgacaaaaatgtcctcaaagagtactttattttatttaaagcatctgtttaattcaacctttaataattttgcaaagaagggtatgtgtgtattttaatatagcctgacctgaatttatatgtttttagctttagtattacccggttgtacaaatacctttacacatcggcgtgtggtggcgtggggggtggggggggcgcggtgtgggcgggcggggggtgggggtggagttggcggtggggtgttgtt

SEQ ID NO: 373940 - DNA, 5822 bp, Homo sapiens
ccctttcctggctctggttacggccttgcgagttgaacaaacttgctgcaggcggattggcggctgggagctctcgggctggggcgttgtatttattaatttatattccgcggcgccccgcgcgggcggctcctttgtgtccagccgccgccaccggagctcccggggcctccgcggggagcgcgtcccccgcatccgcccgacccccggggctggcacgtgctgcgcccggtccgctgagggggcggaggccccgatctccccgaccccccttctctgcttagaggaggaggagcagcggcagcggcagcaggaggcgacagctgccagccgaggaggcgcggcggagaggggactgcggtcagctgcgtccacttggggctgtgcggcggtcccgcgcccggcgatgttcccgggcactccctgagtagcggcagcttatcccccgcccgctagcccgccctggtccccggctcgctcgctggctggcgcggccccggccccgctctgcgtcggccccgccgcggtggaggcgcgcgagggggacgcggccggggatgagcggattgcgggtgaactcgccgcccgggggccccgcgaagccgtgagccgctgcttttctccgagtcgccgccctgcccttggatttgagatcatgtccatccacatcgtggcgctggggaacgagggggacacattccaccaggacaaccggccgtcggggcttatccgcacttacctggggagaagccctctggtctccggggacgagagcagcttgttgctgaacgcggccagcacggtcgcgcgtccggtgttcaccgagtatcaggccagtgcgtttgggaatgtcaagctggtggtccacgactgtcccgtctgggacatatttgacagtgattggtacacttctcgaaatctaattgggggcgctgacatcattgtgatcaaatacaacgttaatgacaagttttcattccatgaagtaaaggataattatattccagtgataaaaagagcattaaattcagttccagtaattattgctgctgttggtaccagacaaaatgaagagttaccttgtacatgcccactatgtacctcagacagagggagctgtgttagtacaactgaagggatccaacttgcaaaagaactaggagcgacctatcttgaactccacagccttgatgacttctacataggaaagtattttggaggagtgttggagtattttatgattcaagccttaaatcagaagacaagtgaaaaaatgaagaaaagaaaaatgagcaactcctttcatggaattagaccacctcaacttgaacaaccagaaaaaatgcctgtcttaaaggctgaagcgtcacattataactctgacttaaataacttgctgttctgctgccagtgtgtggacgtggtattttacaaccccaatttaaagaaagttgtagaggcccacaagatcgttctctgcgctgtaagccatgttttcatgctgcttttcaatgtgaagagtcccactgacattcaggattccagtatcatccgaactacccaggatctttttgctataaacagagatactgcatttccaggtgctagccatgaatcttcaggcaacccaccattacgagtcattgttaaagacgccctcttctgttcttgtttatcagacatccttcgcttcatttattcaggtgcttttcagtgggaagaattggaagaagatatcaggaagaagttgaaagattctggggatgtttcaaatgtaatcgagaaagttaaatgcattttaaaaacaccaggaaagattaattgcctaaggaattgcaaaacctatcaagccagaaaacctttgtggttttataacacttccctcaagtttttccttaataagccgatgcttgccgatgttgtcttcgaaattcaaggtacgacagtgccagcccacagggccatcctggtggcccgttgtgaagtgatggcagccatgtttaatggtaattacatggaagcaaagagtgtcctgattcccgtttatggtgtttccaaagagactttcttgtcatttttagaatacctgtacacagactcctgctgcccagctggcatattccaggccatgtgtctcctgatctgtgccgagatgtaccaagtgtccagactgcagcacatctgtgagctgttcatcattacccagctgcagagcatgccaagcagggaactggcatccatgaaccttgatatagttgacctgcttaaaaaggccaagtttcaccactctgattgcctttcaacctggctacttcatttcattgctactaactacctcatcttcagtcaaaagcctgaatttcaggatctttcagtggaagaacgcagttttgttgaaaagcacagatggccgtcgaatatgtacttgaagcagcttgcggaatacaggaagtatattcactcccggaaatgtcgttgcttagtaatgtaaccctggagcttttatacactacatttcttttttattattatgaagaatgggatacctcccaggttccagtaaaattcttctgaccgaaaccaatgtgggtgttagaaaaattaccatatagcttaatatgtttattagttctctttggaaaaaaactaccactgtggtcttaaaagggaacaaaatataccataggctaaaactaaggctttcactctagaatgcaaagctgttttgcagctgttttcccttaaagatgtcctgttgctttagtgatatttagacccctctcagttaagaaatgcttagattaaaaaaaaaaaattacgtaggattaatacagaaatttaatcatgtctgattaattgctctattaaaataaggggcatttaaagacccagcataaccatttgtataatgagaaatctaggggaaaaccaatcagtccaacatgagattttaggaatagaaatttgccggccatttggaaagtgaaatgccacttagttctcaattgatgacagtgtttgaatcatcataaaagcaatctgagtaggcggggaacctaggcagggctggctttcttagcgtgtaacttgtgtagcagcacagggcccacacttagaaggaccccacacttggttcaaggctctgctatagcggaaattcttaataatgtttgaagaagggccccatgatttcattttgtgctgagccctcaaaattatgtctgtttcgtggtgggaaatatcctatgttttcttgctcaaacacctttctctctgaaagcagaaaaaggcactgatataaagggaagagaaggaggctcaccggagggaagagaacatagtgaagattcccgcctttggggaggtctggaccacccagggcctccactgccaccttggctggcaagggagaaatgtgttgtgttgtcttagctttaaaacagtcacagttcttgctctatcatagatgaacaaatactttcttgatcattctgtaagaccaggaggttggtaagagtgactaaccagcctaactttaatacacatgtataaagatgttcacagagaaagatgctctgtagagaatttgctaccgaagttggctcaagaatttgtttttagtgttatttaccaagattaggacgtcagtggcttaaattctttgaattcttttcaaggactgcaagattatttgataaagagtagcatgaatcttgtgctctaatattacacagtaagttcaaagaaaggatgtaagtcaaagacttgttacatagagggaaaatggactgggatagaggacagactgatagtttctttctttcatatcacatgtatagagaaataattatatcagaaactcacaaacctagacatggaaaaacagattactgtctattgtcagcatcattttcatctgtaagtcactactggaatatatttttcttttaatttccagtgactttagaatacacacagtttttccgacttttcaaaaatttgattaaatggttttatagtataatattgggaccccataccgttagcccttgtatgtataccaacactgccaaagtaaaacattaggtcaggcatggtggctcaggcctgtaatcccagcattttgggaggctgaggcaagtggataacttgaggtcatgagttcgaaaccagcctggccaaaacagtgaaaccccgtctctactaaaaatacaaaattagccagatgtggtggcgcacacctgtaatcccagctactcaggaagctgaggcaggaaaatcgcttgaacctgggaggtggaagttgcagtgagccgagatcgcaccactgcactccagcctgggtgacaagagcgaaactccatctcaaaaaaaaaaaaaaaaccaaagtgaaacactaaaaattccctatagatatattccaggaaatattttaattgggctgattttaattaggctgtatcattgatgattactggaatcgattttatgtcttttgtattttaatcacttgagttaatcaaccactggcaaatcccatttgacaaagattagcattgtaaaaaacagatactgtggtagatttctagaaattcattcacatttaagacttctaaaatggaataatagccttttgtttttcatgagcatattcgcacccctatatgaattacagcatttaaagttcaaaatcagtaacttttaatctaggaaattgaaaaatattaagttgcaaagcaaaaaaaggtattttcttgaaaatactatttaatgtttaactagactataggtagttccttaaggttgtttgacctgaagtggagttgggtttggaagctggtgcccagttggtgtggagtgtgtagttttgttatgaaagttctctaccacctacctgtgtgagtgacaccaacatccagatgtcacagctctccagagctagtcagaagagaaatcaaattagtgtttaaacccatttgcatattgacttgtcagtacctttaactcaatttaatataacaagaaatcgtaaaatacttataacctatcttagagaaatgagtgctggttttgagagttgttttttaactgaaagattatttctagatgggtagtgctttgtgctggtttctgcttccatatatttcccagtcattttaattagagaagatactctatggtagaactaaggcctttcctttcttggccaaagtctttaccctatttaaccctttgtatatttctgactgctcactgttcatattataggggaccagatttgtaatatagaattctccataacatgaatgaaattaattctgtccaagccagcatggtggcttcatattaagtagtaacagaagtctgaacaattggataaatttgacttccaagacagctaaacttttcaactgcaattttaaaaactacactacactgttatagttaatctgacaaaaatgtcctcaaagagtactttattttatttaaagcatctgtttaattcaacctttaataattttgcaaagaagggtatgtgtgtattttaatatagcctgacctgaatttatatgtttttagctttagtatttaactttttgtaacaaataaaccttttttaaaacaagtttaaaaacaacaaaaaaagggggggggctaaaggatcctgagggcaggttacggtccagttttgcaaggtgccaaggggcgttaaagaggggcgggttaaactggggggaagctctgggttggagactcttgggggatatggacactcgagttagccgataaatctttgggacgattggggatgtgtaaacagg

SEQ ID NO: 373941 - DNA, 5822 bp, Homo sapiens
ccctttcctggctctggttacggccttgcgagttgaacaaacttgctgcaggcggattggcggctgggagctctcgggctggggcgttgtatttattaatttatattccgcggcgccccgcgcgggcggctcctttgtgtccagccgccgccaccggagctcccggggcctccgcggggagcgcgtcccccgcatccgcccgacccccggggctggcacgtgctgcgcccggtccgctgagggggcggaggccccgatctccccgaccccccttctctgcttagaggaggaggagcagcggcagcggcagcaggaggcgacagctgccagccgaggaggcgcggcggagaggggactgcggtcagctgcgtccacttggggctgtgcggcggtcccgcgcccggcgatgttcccgggcactccctgagtagcggcagcttatcccccgcccgctagcccgccctggtccccggctcgctcgctggctggcgcggccccggccccgctctgcgtcggccccgccgcggtggaggcgcgcgagggggacgcggccggggatgagcggattgcgggtgaactcgccgcccgggggccccgcgaagccgtgagccgctgcttttctccgagtcgccgccctgcccttggatttgagatcatgtccatccacatcgtggcgctggggaacgagggggacacattccaccaggacaaccggccgtcggggcttatccgcacttacctggggagaagccctctggtctccggggacgagagcagcttgttgctgaacgcggccagcacggtcgcgcgtccggtgttcaccgagtatcaggccagtgcgtttgggaatgtcaagctggtggtccacgactgtcccgtctgggacatatttgacagtgattggtacacttctcgaaatctaattgggggcgctgacatcattgtgatcaaatacaacgttaatgacaagttttcattccatgaagtaaaggataattatattccagtgataaaaagagcattaaattcagttccagtaattattgctgctgttggtaccagacaaaatgaagagttaccttgtacatgcccactatgtacctcagacagagggagctgtgttagtacaactgaagggatccaacttgcaaaagaactaggagcgacctatcttgaactccacagccttgatgacttctacataggaaagtattttggaggagtgttggagtattttatgattcaagccttaaatcagaagacaagtgaaaaaatgaagaaaagaaaaatgagcaactcctttcatggaattagaccacctcaacttgaacaaccagaaaaaatgcctgtcttaaaggctgaagcgtcacattataactctgacttaaataacttgctgttctgctgccagtgtgtggacgtggtattttacaaccccaatttaaagaaagttgtagaggcccacaagatcgttctctgcgctgtaagccatgttttcatgctgcttttcaatgtgaagagtcccactgacattcaggattccagtatcatccgaactacccaggatctttttgctataaacagagatactgcatttccaggtgctagccatgaatcttcaggcaacccaccattacgagtcattgttaaagacgccctcttctgttcttgtttatcagacatccttcgcttcatttattcaggtgcttttcagtgggaagaattggaagaagatatcaggaagaagttgaaagattctggggatgtttcaaatgtaatcgagaaagttaaatgcattttaaaaacaccaggaaagattaattgcctaaggaattgcaaaacctatcaagccagaaaacctttgtggttttataacacttccctcaagtttttccttaataagccgatgcttgccgatgttgtcttcgaaattcaaggtacgacagtgccagcccacagggccatcctggtggcccgttgtgaagtgatggcagccatgtttaatggtaattacatggaagcaaagagtgtcctgattcccgtttatggtgtttccaaagagactttcttgtcatttttagaatacctgtacacagactcctgctgcccagctggcatattccaggccatgtgtctcctgatctgtgccgagatgtaccaagtgtccagactgcagcacatctgtgagctgttcatcattacccagctgcagagcatgccaagcagggaactggcatccatgaaccttgatatagttgacctgcttaaaaaggccaagtttcaccactctgattgcctttcaacctggctacttcatttcattgctactaactacctcatcttcagtcaaaagcctgaatttcaggatctttcagtggaagaacgcagttttgttgaaaagcacagatggccgtcgaatatgtacttgaagcagcttgcggaatacaggaagtatattcactcccggaaatgtcgttgcttagtaatgtaaccctggagcttttatacactacatttcttttttattattatgaagaatgggatacctcccaggttccagtaaaattcttctgaccgaaaccaatgtgggtgttagaaaaattaccatatagcttaatatgtttattagttctctttggaaaaaaactaccactgtggtcttaaaagggaacaaaatataccataggctaaaactaaggctttcactctagaatgcaaagctgttttgcagctgttttcccttaaagatgtcctgttgctttagtgatatttagacccctctcagttaagaaatgcttagattaaaaaaaaaaaattacgtaggattaatacagaaatttaatcatgtctgattaattgctctattaaaataaggggcatttaaagacccagcataaccatttgtataatgagaaatctaggggaaaaccaatcagtccaacatgagattttaggaatagaaatttgccggccatttggaaagtgaaatgccacttagttctcaattgatgacagtgtttgaatcatcataaaaaaaatacctgcttttcatctggacaacccaattgagccactttatctccttttggcaatctgagtaggcggggaacctaggcagggctggctttcttagcgtgtaacttgtgtagcagcacagggcccacacttagaaggaccccacacttggttcaaggctctgctatagcggaaattcttaataatgtttgaagaagggccccatgatttcattttgtgctgagccctcaaaattatgtctgtttcgtggtgggaaatatcctatgttttcttgctcaaacacctttctctctgaaagcagatagtgaagattcccgcctttggggaggtctggaccacccagggcctccactgccaccttggctggcaagggagaaatgtgttgtgttgtcttagctttaaaacagtcacagttcttgctctatcatagatgaacaaatactttcttgatcattctgtaagaccaggaggttggtaagagtgactaaccagcctaactttaatacacatgtataaagatgttcacagagaaagatgctctgtagagaatttgctaccgaagttggctcaagaatttgtttttagtgttatttaccaagattaggacgtcagtggcttaaattctttgaattcttttcaaggactgcaagattatttgataaagagtagcatgaatcttgtgctctaatattacacagtaagttcaaagaaaggatgtaagtcaaagacttgttacatagagggaaaatggactgggatagaggacagactgatagtttctttctttcatatcacatgtatagagaaataattatatcagaaactcacaaacctagacatggaaaaacagattactgtctattgtcagcatcattttcatctgtaagtcactactggaatatatttttcttttaatttccagtgactttagaatacacacagtttttccgacttttcaaaaatttgattaaatggttttatagtataatattgggaccccataccgttagcccttgtatgtataccaacactgccaaagtaaaacattaggtcaggcatggtggctcaggcctgtaatcccagcattttgggaggctgaggcaagtggataacttgaggtcatgagttcgaaaccagcctggccaaaacagtgaaaccccgtctctactaaaaatacaaaattagccagatgtggtggcgcacacctgtaatcccagctactcaggaagctgaggcaggaaaatcgcttgaacctgggaggtggaagttgcagtgagccgagatcgcaccactgcactccagcctgggtgacaagagcgaaactccatctcaaaaaaaaaaaaaaaaccaaagtgaaacactaaaaattccctatagatatattccaggaaatattttaattgggctgattttaattaggctgtatcattgatgattactggaatcgattttatgtcttttgtattttaatcacttgagttaatcaaccactggcaaatcccatttgacaaagattagcattgtaaaaaacagatactgtggtagatttctagaaattcattcacatttaagacttctaaaatggaataatagccttttgtttttcatgagcatattcgcacccctatatgaattacagcatttaaagttcaaaatcagtaacttttaatctaggaaattgaaaaatattaagttgcaaagcaaaaaaaggtattttcttgaaaatactatttaatgtttaactagactataggtagttccttaaggttgtttgacctgaagtggagttgggtttggaagctggtgcccagttggtgtggagtgtgtagttttgttatgaaagttctctaccacctacctgtgtgagtgacaccaacatccagatgtcacagctctccagagctagtcagaagagaaatcaaattagtgtttaaacccatttgcatattgacttgtcagtacctttaactcaatttaatataacaagaaatcgtaaaatacttataacctatcttagagaaatgagtgctggttttgagagttgttttttaactgaaagattatttctagatgggtagtgctttgtgctggtttctgcttccatatatttcccagtcattttaattagagaagatactctatggtagaactaaggcctttcctttcttggccaaagtctttaccctatttaaccctttgtatatttctgactgctcactgttcatattataggggaccagatttgtaatatagaattctccataacatgaatgaaattaattctgtccaagccagcatggtggcttcatattaagtagtaacagaagtctgaacaattggataaatttgacttccaagacagctaaacttttcaactgcaattttaaaaactacactacactgttatagttaatctgacaaaaatgtcctcaaagagtactttattttatttaaagcatctgtttaattcaacctttaataattttgcaaagaagggtatgtgtgtattttaatatagcctgacctgaatttatatgtttttagctttagtatttaactttttgtaacaaataaaccttttttaaaacaagtttaaaaacaacaaaaaaagggggggggctaaaggatcctgagggcaggttacggtccagttttgcaaggtgccaaggggcgttaaagaggggcgggttaaactggggggaagctctgggttggagactcttgggggatatggacactcgagttagccgataaatctttgggacgattggggatgtgtaaacagg

SEQ ID NO: 373942 - DNA, 4482 bp, Homo sapiens
aaacttactagaaacatgcgtagggccccgcggatccaagctactggtaactgaaccatggtgcttagcatgtctgcctagcaaatggcctggtacatgcactatgtgctttgcgaatgatttcacacgaaataatacccagagacctggcccaggatcgagcggttattgaaaaagaatcatgcatggatttcctggagggtctatgtcactggaatctttcaagaggacctcccatcgagactctcattgttaaagacgccctcttctgttcttgtttatcagacatccttcgcttcatttattcaggtgcttttcagtgggaagaattggaagaagatatcaggaagaagttgaaagattctggggatgtttcaaatgtaatcgagaaagttaaatgcattttaaaaacaccaggaaagattaattgcctaaggaattgcaaaacctatcaagccagaaaacctttgtggttttataacacttccctcaagtttttccttaataagccgatgcttgccgatgttgtcttcgaaattcaaggtacgacagtgccagcccacagggccatcctggtggcccgttgtgaagtgatggcagccatgtttaatggtaattacatggaagcaaagagtgtcctgattcccgtttatggtgtttccaaagagactttcttgtcatttttagaatacctgtacacagactcctgctgcccagctggcatattccaggccatgtgtctcctgatctgtgccgagatgtaccaagtgtccagactgcagcacatctgtgagctgttcatcattacccagctgcagagcatgccaagcagggaactggcatccatgaaccttgatatagttgacctgcttaaaaaggccaagtttcaccactctgattgcctttcaacctggctacttcatttcattgctactaactacctcatcttcagtcaaaagcctgaatttcaggatctttcagtggaagaacgcagttttgttgaaaagcacagatggccgtcgaatatgtacttgaagcagcttgcggaatacaggaagtatattcactcccggaaatgtcgttgcttagtaatgtaaccctggagcttttatacactacatttcttttttattattatgaagaatgggatacctcccaggttccagtaaaattcttctgaccgaaaccaatgtgggtgttagaaaaattaccatatagcttaatatgtttattagttctctttggaaaaaaactaccactgtggtcttaaaagggaacaaaatataccataggctaaaactaaggctttcactctagaatgcaaagctgttttgcagctgttttcccttaaagatgtcctgttgctttagtgatatttagacccctctcagttaagaaatgcttagattaaaaaaaaaaaattacgtaggattaatacagaaatttaatcatgtctgattaattgctctattaaaataaggggcatttaaagacccagcataaccatttgtataatgagaaatctaggggaaaaccaatcagtccaacatgagattttaggaatagaaatttgccggccatttggaaagtgaaatgccacttagttctcaattgatgacagtgtttgaatcatcataaaaaaaatacctgcttttcatctggacaacccaattgagccactttatctccttttggcaatctgagtaggcggggaacctaggcagggctggctttcttagcgtgtaacttgtgtagcagcacagggcccacacttagaaggaccccacacttggttcaaggctctgctatagcggaaattcttaataatgtttgaagaagggccccatgatttcattttgtgctgagccctcaaaattatgtctgtttcgtggtgggaaatatcctatgttttcttgctcaaacacctttctctctgaaagcagaaaaaggcactgatataaagggaagagaaggaggctcaccggagggaagagaacatagtgaagattcccgcctttggggaggtctggaccacccagggcctccactgccaccttggctggcaagggagaaatgtgttgtgttgtcttagctttaaaacagtcacagttcttgctctatcatagatgaacaaatactttcttgatcattctgtaagaccaggaggttggtaagagtgactaaccagcctaactttaatacacatgtataaagatgttcacagagaaagatgctctgtagagaatttgctaccgaagttggctcaagaatttgtttttagtgttatttaccaagattaggacgtcagtggcttaaattctttgaattcttttcaaggactgcaagattatttgataaagagtagcatgaatcttgtgctctaatattacacagtaagttcaaagaaaggatgtaagtcaaagacttgttacatagagggaaaatggactgggatagaggacagactgatagtttctttctttcatatcacatgtatagagaaataattatatcagaaactcacaaacctagacatggaaaaacagattactgtctattgtcagcatcattttcatctgtaagtcactactggaatatatttttcttttaatttccagtgactttagaatacacacagtttttccgacttttcaaaaatttgattaaatggttttatagtataatattgggaccccataccgttagcccttgtatgtataccaacactgccaaagtaaaacattaggtcaggcatggtggctcaggcctgtaatcccagcattttgggaggctgaggcaagtggataacttgaggtcatgagttcgaaaccagcctggccaaaacagtgaaaccccgtctctactaaaaatacaaaattagccagatgtggtggcgcacacctgtaatcccagctactcaggaagctgaggcaggaaaatcgcttgaacctgggaggtggaagttgcagtgagccgagatcgcaccactgcactccagcctgggtgacaagagcgaaactccatctcaaaaaaaaaaaaaaaaccaaagtgaaacactaaaaattccctatagatatattccaggaaatattttaattgggctgattttaattaggctgtatcattgatgattactggaatcgattttatgtcttttgtattttaatcacttgagttaatcaaccactggcaaatcccatttgacaaagattagcattgtaaaaaacagatactgtggtagatttctagaaattcattcacatttaagacttctaaaatggaataatagccttttgtttttcatgagcatattcgcacccctatatgaattacagcatttaaagttcaaaatcagtaacttttaatctaggaaattgaaaaatattaagttgcaaagcaaaaaaaggtattttcttgaaaatactatttaatgtttaactagactataggtagttccttaaggttgtttgacctgaagtggagttgggtttggaagctggtgcccagttggtgtggagtgtgtagttttgttatgaaagttctctaccacctacctgtgtgagtgacaccaacatccagatgtcacagctctccagagctagtcagaagagaaatcaaattagtgtttaaacccatttgcatattgacttgtcagtacctttaactcaatttaatataacaagaaatcgtaaaatacttataacctatcttagagaaatgagtgctggttttgagagttgttttttaactgaaagattatttctagatgggtagtgctttgtgctggtttctgcttccatatatttcccagtcattttaattagagaagatactctatggtagaactaaggcctttcctttcttggccaaagtctttaccctatttaaccctttgtatatttctgactgctcactgttcatattataggggaccagatttgtaatatagaattctccataacatgaatgaaattaattctgtccaagccagcatggtggcttcatattaagtagtaacagaagtctgaacaattggataaatttgacttccaagacagctaaacttttcaactgcaattttaaaaactacactacactgttatagttaatctgacaaaaatgtcctcaaagagtactttattttatttaaagcatctgtttaattcaacctttaataattttgcaaagaagggtatgtgtgtattttaatatagcctgacctgaatttatatgtttttagctttagtatttaactttttgtaacaaataaaccttttttaaaacaagtttaaaaacaacaaaaaaagggggggggctaaaggatcctgagggcaggttacggtccagttttgcaaggtgccaaggggcgttaaagaggggcgggttaaactggggggaagctctgggttggagactcttgggggatatggacactcgagttagccgataaatctttgggacgattggggatgtgtaaacagg

SEQ ID NO: 373943 - DNA, 5767 bp, Homo sapiens
ccctttcctggctctggttacggccttgcgagttgaacaaacttgctgcaggcggattggcggctgggagctctcgggctggggcgttgtatttattaatttatattccgcggcgccccgcgcgggcggctcctttgtgtccagccgccgccaccggagctcccggggcctccgcggggagcgcgtcccccgcatccgcccgacccccggggctggcacgtgctgcgcccggtccgctgagggggcggaggccccgatctccccgaccccccttctctgcttagaggaggaggagcagcggcagcggcagcaggaggcgacagctgccagccgaggaggcgcggcggagaggggactgcggtcagctgcgtccacttggggctgtgcggcggtcccgcgcccggcgatgttcccgggcactccctgagtagcggcagcttatcccccgcccgctagcccgccctggtccccggctcgctcgctggctggcgcggccccggccccgctctgcgtcggccccgccgcggtggaggcgcgcgagggggacgcggccggggatgagcggattgcgggtgaactcgccgcccgggggccccgcgaagccgtgagccgctgcttttctccgagtcgccgccctgcccttggatttgagatcatgtccatccacatcgtggcgctggggaacgagggggacacattccaccaggacaaccggccgtcggggcttatccgcacttacctggggagaagccctctggtctccggggacgagagcagcttgttgctgaacgcggccagcacggtcgcgcgtccggtgttcaccgagtatcaggccagtgcgtttgggaatgtcaagctggtggtccacgactgtcccgtctgggacatatttgacagtgattggtacacttctcgaaatctaattgggggcgctgacatcattgtgatcaaatacaacgttaatgacaagttttcattccatgaagtaaaggataattatattccagtgataaaaagagcattaaattcagttccagtaattattgctgctgttggtaccagacaaaatgaagagttaccttgtacatgcccactatgtacctcagacagagggagctgtgttagtacaactgaagggatccaacttgcaaaagaactaggagcgacctatcttgaactccacagccttgatgacttctacataggaaagtattttggaggagtgttggagtattttatgattcaagccttaaatcagaagacaagtgaaaaaatgaagaaaagaaaaatgagcaactcctttcatggaattagaccacctcaacttgaacaaccagaaaaaatgcctgtcttaaaggctgaagcgtcacattataactctgacttaaataacttgctgttctgctgccagtgtgtggacgtggtattttacaaccccaatttaaagaaagttgtagaggcccacaagatcgttctctgcgctgtaagccatgttttcatgctgcttttcaatgtgaagagtcccactgacattcaggattccagtatcatccgaactacccaggatctttttgctataaacagagatactgcatttccaggtgctagccatgaatcttcaggcaacccaccattacgagtcattgttaaagacgccctcttctgttcttgtttatcagacatccttcgcttcatttattcaggtgcttttcagtgggaagaattggaagaagatatcaggaagaagttgaaagattctggggatgtttcaaatgtaatcgagaaagttaaatgcattttaaaaacaccaggaaagattaattgcctaaggaattgcaaaacctatcaagccagaaaacctttgtggttttataacacttccctcaagtttttccttaataagccgatgcttgccgatgttgtcttcgaaattcaaggtacgacagtgccagcccacagggccatcctggtggcccgttgtgaagtgatggcagccatgtttaatggtaattacatggaagcaaagagtgtcctgattcccgtttatggtgtttccaaagagactttcttgtcatttttagaatacctgtacacagactcctgctgcccagctggcatattccaggccatgtgtctcctgatctgtgccgagatgtaccaagtgtccagactgcagcacatctgtgagctgttcatcattacccagctgcagagcatgccaagcagggaactggcatccatgaaccttgatatagttgacctgcttaaaaaggccaagtttcaccactctgattgcctttcaacctggctacttcatttcattgctactaactacctcatcttcagtcaaaagcctgaatttcaggatctttcagtggaagaacgcagttttgttgaaaagcacagatggccgtcgaatatgtacttgaagcagcttgcggaatacaggaagtatattcactcccggaaatgtcgttgcttagtaatgtaaccctggagcttttatacactacatttcttttttattattatgaagaatgggatacctcccaggttccagtaaaattcttctgaccgaaaccaatgtgggtgttagaaaaattaccatatagcttaatatgtttattagttctctttggaaaaaaactaccactgtggtcttaaaagggaacaaaatataccataggctaaaactaaggctttcactctagaatgcaaagctgttttgcagctgttttcccttaaagatgtcctgttgctttagtgatatttagacccctctcagttaagaaatgcttagattaaaaaaaaaaaattacgtaggattaatacagaaatttaatcatgtctgattaattgctctattaaaataaggggcatttaaagacccagcataaccatttgtataatgagaaatctaggggaaaaccaatcagtccaacatgagattttaggaatagaaatttgccggccatttggaaagtgaaatgccacttagttctcaattgatgacagtgtttgaatcatcataaaaaaaatacctgcttttcatctggacaacccaattgagccactttatctccttttggcaatctgagtaggcggggaacctaggcagggctggctttcttagcgtgtaacttgtgtagcagcacagggcccacacttagaaggaccccacacttggttcaaggctctgctatagcggaaattcttaataatgtttgaagaagggccccatgatttcattttgtgctgagccctcaaaattatgtctgtttcgtggtgggaaatatcctatgttttcttgctcaaacacctttctctctgaaagcagaaaaaggcactgatataaagggaagagaaggaggctcaccggagggaagagaacatagtgaagattcccgcctttggggaggtctggaccacccagggcctccactgccaccttggctggcaagggagaaatgtgttgtgttgtcttagctttaaaacagtcacagttcttgctctatcatagatgaacaaatactttcttgatcattctgtaagaccaggaggttggtaagagtgactaaccagcctaactttaatacacatgtataaagatgttcacagagaaagatgctctgtagagaatttgctaccgaagttggctcaagaatttgtttttagtgttatttaccaagattaggacgtcagtggcttaaattctttgaattcttttcaaggactgcaagattatttgataaagagtagcatgaatcttgtgctctaatattacacagtaagttcaaagaaaggatgtaagtcaaagacttgttacatagagggaaaatggactgggatagaggacagactgatagtttctttctttcatatcacatgtatagagaaataattatatcagaaactcacaaacctagacatggaaaaacagattactgtctattgtcagcatcattttcatctgtaagtcactactggaatatatttttcttttaatttccagtgactttagaatacacacagtttttccgacttttcaaaaatttgattaaatggttttatagtataatattgggaccccataccgttagcccttgtatgtataccaacactgccaaaacagtgaaaccccgtctctactaaaaatacaaaattagccagatgtggtggcgcacacctgtaatcccagctactcaggaagctgaggcaggaaaatcgcttgaacctgggaggtggaagttgcagtgagccgagatcgcaccactgcactccagcctgggtgacaagagcgaaactccatctcaaaaaaaaaaaaaaaaccaaagtgaaacactaaaaattccctatagatatattccaggaaatattttaattgggctgattttaattaggctgtatcattgatgattactggaatcgattttatgtcttttgtattttaatcacttgagttaatcaaccactggcaaatcccatttgacaaagattagcattgtaaaaaacagatactgtggtagatttctagaaattcattcacatttaagacttctaaaatggaataatagccttttgtttttcatgagcatattcgcacccctatatgaattacagcatttaaagttcaaaatcagtaacttttaatctaggaaattgaaaaatattaagttgcaaagcaaaaaaaggtattttcttgaaaatactatttaatgtttaactagactataggtagttccttaaggttgtttgacctgaagtggagttgggtttggaagctggtgcccagttggtgtggagtgtgtagttttgttatgaaagttctctaccacctacctgtgtgagtgacaccaacatccagatgtcacagctctccagagctagtcagaagagaaatcaaattagtgtttaaacccatttgcatattgacttgtcagtacctttaactcaatttaatataacaagaaatcgtaaaatacttataacctatcttagagaaatgagtgctggttttgagagttgttttttaactgaaagattatttctagatgggtagtgctttgtgctggtttctgcttccatatatttcccagtcattttaattagagaagatactctatggtagaactaaggcctttcctttcttggccaaagtctttaccctatttaaccctttgtatatttctgactgctcactgttcatattataggggaccagatttgtaatatagaattctccataacatgaatgaaattaattctgtccaagccagcatggtggcttcatattaagtagtaacagaagtctgaacaattggataaatttgacttccaagacagctaaacttttcaactgcaattttaaaaactacactacactgttatagttaatctgacaaaaatgtcctcaaagagtactttattttatttaaagcatctgtttaattcaacctttaataattttgcaaagaagggtatgtgtgtattttaatatagcctgacctgaatttatatgtttttagctttagtatttaactttttgtaacaaataaaccttttttaaaacaagtttaaaaacaacaaaaaaagggggggggctaaaggatcctgagggcaggttacggtccagttttgcaaggtgccaaggggcgttaaagaggggcgggttaaactggggggaagctctgggttggagactcttgggggatatggacactcgagttagccgataaatctttgggacgattggggatgtgtaaacagg

SEQ ID NO: 373944 - DNA, 3735 bp, Homo sapiens
aatactactcgaagtagtggacaagatatatataattgtaagtcacataataacttaaatcctgatactaatttaaccaaaatggtagtaaattatttgggaaaacttgtgggaatggtaggagatgtatcacagagctggatctcatctattaaagaggaaatcaatagctgatatcttaattgatccataataaaacatattcggttaacagtctttttcttaaaacttcagtggaagaacgcagttttgttgaaaagcacagatggccgtcgaatatgtacttgaagcagcttgcggaatacaggaagtatattcactcccggaaatgtcgttgcttagtaatgtaaccctggagcttttatacactacatttcttttttattattatgaagaatgggatacctcccaggttccagtaaaattcttctgaccgaaaccaatgtgggtgttagaaaaattaccatatagcttaatatgtttattagttctctttggaaaaaaactaccactgtggtcttaaaagggaacaaaatataccataggctaaaactaaggctttcactctagaatgcaaagctgttttgcagctgttttcccttaaagatgtcctgttgctttagtgatatttagacccctctcagttaagaaatgcttagattaaaaaaaaaaaattacgtaggattaatacagaaatttaatcatgtctgattaattgctctattaaaataaggggcatttaaagacccagcataaccatttgtataatgagaaatctaggggaaaaccaatcagtccaacatgagattttaggaatagaaatttgccggccatttggaaagtgaaatgccacttagttctcaattgatgacagtgtttgaatcatcataaaaaaaatacctgcttttcatctggacaacccaattgagccactttatctccttttggcaatctgagtaggcggggaacctaggcagggctggctttcttagcgtgtaacttgtgtagcagcacagggcccacacttagaaggaccccacacttggttcaaggctctgctatagcggaaattcttaataatgtttgaagaagggccccatgatttcattttgtgctgagccctcaaaattatgtctgtttcgtggtgggaaatatcctatgttttcttgctcaaacacctttctctctgaaagcagaaaaaggcactgatataaagggaagagaaggaggctcaccggagggaagagaacatagtgaagattcccgcctttggggaggtctggaccacccagggcctccactgccaccttggctggcaagggagaaatgtgttgtgttgtcttagctttaaaacagtcacagttcttgctctatcatagatgaacaaatactttcttgatcattctgtaagaccaggaggttggtaagagtgactaaccagcctaactttaatacacatgtataaagatgttcacagagaaagatgctctgtagagaatttgctaccgaagttggctcaagaatttgtttttagtgttatttaccaagattaggacgtcagtggcttaaattctttgaattcttttcaaggactgcaagattatttgataaagagtagcatgaatcttgtgctctaatattacacagtaagttcaaagaaaggatgtaagtcaaagacttgttacatagagggaaaatggactgggatagaggacagactgatagtttctttctttcatatcacatgtatagagaaataattatatcagaaactcacaaacctagacatggaaaaacagattactgtctattgtcagcatcattttcatctgtaagtcactactggaatatatttttcttttaatttccagtgactttagaatacacacagtttttccgacttttcaaaaatttgattaaatggttttatagtataatattgggaccccataccgttagcccttgtatgtataccaacactgccaaagtaaaacattaggtcaggcatggtggctcaggcctgtaatcccagcattttgggaggctgaggcaagtggataacttgaggtcatgagttcgaaaccagcctggccaaaacagtgaaaccccgtctctactaaaaatacaaaattagccagatgtggtggcgcacacctgtaatcccagctactcaggaagctgaggcaggaaaatcgcttgaacctgggaggtggaagttgcagtgagccgagatcgcaccactgcactccagcctgggtgacaagagcgaaactccatctcaaaaaaaaaaaaaaaaccaaagtgaaacactaaaaattccctatagatatattccaggaaatattttaattgggctgattttaattaggctgtatcattgatgattactggaatcgattttatgtcttttgtattttaatcacttgagttaatcaaccactggcaaatcccatttgacaaagattagcattgtaaaaaacagatactgtggtagatttctagaaattcattcacatttaagacttctaaaatggaataatagccttttgtttttcatgagcatattcgcacccctatatgaattacagcatttaaagttcaaaatcagtaacttttaatctaggaaattgaaaaatattaagttgcaaagcaaaaaaaggtattttcttgaaaatactatttaatgtttaactagactataggtagttccttaaggttgtttgacctgaagtggagttgggtttggaagctggtgcccagttggtgtggagtgtgtagttttgttatgaaagttctctaccacctacctgtgtgagtgacaccaacatccagatgtcacagctctccagagctagtcagaagagaaatcaaattagtgtttaaacccatttgcatattgacttgtcagtacctttaactcaatttaatataacaagaaatcgtaaaatacttataacctatcttagagaaatgagtgctggttttgagagttgttttttaactgaaagattatttctagatgggtagtgctttgtgctggtttctgcttccatatatttcccagtcattttaattagagaagatactctatggtagaactaaggcctttcctttcttggccaaagtctttaccctatttaaccctttgtatatttctgactgctcactgttcatattataggggaccagatttgtaatatagaattctccataacatgaatgaaattaattctgtccaagccagcatggtggcttcatattaagtagtaacagaagtctgaacaattggataaatttgacttccaagacagctaaacttttcaactgcaattttaaaaactacactacactgttatagttaatctgacaaaaatgtcctcaaagagtactttattttatttaaagcatctgtttaattcaacctttaataattttgcaaagaagggtatgtgtgtattttaatatagcctgacctgaatttatatgtttttagctttagtatttaactttttgtaacaaataaaccttttttaaaacaagtttaaaaacaacaaaaaaagggggggggctaaaggatcctgagggcaggttacggtccagttttgcaaggtgccaaggggcgttaaagaggggcgggttaaactggggggaagctctgggttggagactcttgggggatatggacactcgagttagccgataaatctttgggacgattggggatgtgtaaacagg

SEQ ID NO: 373945 - DNA, 1510 bp, Homo sapiens
tatcttacccttctccacttcagagtccacccaaccttttggaactacctaatagtctagttcaacattagatagtataaacacacgaacatacctttttttgcttagcaacgaaatattttaattgggctgattttaattaggctgtatcattgatgattactggaatcgattttatgtcttttgtattttaatcacttgagttaatcaaccactggcaaatcccatttgacaaagattagcattgtaaaaaacagatactgtggtagatttctagaaattcattcacatttaagacttctaaaatggaataatagccttttgtttttcatgagcatattcgcacccctatatgaattacagcatttaaagttcaaaatcagtaacttttaatctaggaaattgaaaaatattaagttgcaaagcaaaaaaaggtattttcttgaaaatactatttaatgtttaactagactataggtagttccttaaggttgtttgacctgaagtggagttgggtttggaagctggtgcccagttggtgtggagtgtgtagttttgttatgaaagttctctaccacctacctgtgtgagtgacaccaacatccagatgtcacagctctccagagctagtcagaagagaaatcaaattagtgtttaaacccatttgcatattgacttgtcagtacctttaactcaatttaatataacaagaaatcgtaaaatacttataacctatcttagagaaatgagtgctggttttgagagttgttttttaactgaaagattatttctagatgggtagtgctttgtgctggtttctgcttccatatatttcccagtcattttaattagagaagatactctatggtagaactaaggcctttcctttcttggccaaagtctttaccctatttaaccctttgtatatttctgactgctcactgttcatattataggggaccagatttgtaatatagaattctccataacatgaatgaaattaattctgtccaagccagcatggtggcttcatattaagtagtaacagaagtctgaacaattggataaatttgacttccaagacagctaaacttttcaactgcaattttaaaaactacactacactgttatagttaatctgacaaaaatgtcctcaaagagtactttattttatttaaagcatctgtttaattcaacctttaataattttgcaaagaagggtatgtgtgtattttaatatagcctgacctgaatttatatgtttttagctttagtatttaactttttgtaacaaataaaccttttttaaaacaagtttaaaaacaacaaaaaaagggggggggctaaaggatcctgagggcaggttacggtccagttttgcaaggtgccaaggggcgttaaagaggggcgggttaaactggggggaagctctgggttggagactcttgggggatatggacactcgagttagccgataaatctttgggacgattggggatgtgtaaacagg

SEQ ID NO: 373946 - DNA, 2447 bp, Homo sapiens
  misc_feature (2428)..(2428): n is a, c, g, or t
ccctttcctggctctggttacggccttgcgagttgaacaaacttgctgcaggcggattggcggctgggagctctcgggctggggcgttgtatttattaatttatattccgcggcgccccgcgcgggcggctcctttgtgtccagccgccgccaccggagctcccggggcctccgcggggagcgcgtcccccgcatccgcccgacccccggggctggcacgtgctgcgcccggtccgctgagggggcggaggccccgatctccccgaccccccttctctgcttagaggaggaggagcagcggcagcggcagcaggaggcgacagctgccagccgaggaggcgcggcggagaggggactgcggtcagctgcgtccacttggggctgtgcggcggtcccgcgcccggcgatgttcccgggcactccctgagtagcggcagcttatcccccgcccgctagcccgccctggtccccggctcgctcgctggctggcgcggccccggccccgctctgcgtcggccccgccgcggtggaggcgcgcgagggggacgcggccggggatgagcggattgcgggtgaactcgccgcccgggggccccgcgaagccgtgagccgctgcttttctccgagtcgccgccctgcccttggatttgagatcatgtccatccacatcgtggcgctggggaacgagggggacacattccaccaggacaaccggccgtcggggcttatccgcacttacctggggagaagccctctggtctccggggacgagagcagcttgttgctgaacgcggccagcacggtcgcgcgtccggtgttcaccgagtatcaggccagtgcgtttgggaatgtcaagctggtggtccacgactgtcccgtctgggacatatttgacagtgattggtacacttctcgaaatctaattgggggcgctgacatcattgtgatcaaatacaacgttaatgacaagttttcattccatgaagtaaaggataattatattccagtgataaaaagagcattaaattcagttccagtaattattgctgctgttggtaccagacaaaatgaagagttaccttgtacatgcccactatgtacctcagacagagggagctgtgttagtacaactgaagggatccaacttgcaaaagaactaggagcgacctatcttgaactccacagccttgatgacttctacataggaaagtattttggaggagtgttggagtattttatgattcaagccttaaatcagaagacaagtgaaaaaatgaagaaaagaaaaatgagcaactcctttcatggaattagaccacctcaacttgaacaaccagaaaaaatgcctgtcttaaaggctgaagcgtcacattataactctgacttaaataacttgctgttctgctgccagtgtgtggacgtggtattttacaaccccaatttaaagaaagttgtagaggcccacaagatcgttctctgcgctgtaagccatgttttcatgctgcttttcaatgtgaagagtcccactgacattcaggattccagtatcatccgaactacccaggatctttttgctataaacagagatactgcatttccaggtgctagccatgaatcttcaggcaacccaccattacgagtcattgttaaagacgccctcttctgttcttgtttatcagacatccttcgcttcatttattcaggtgcttttcagtgggaagaattggaagaagatatcaggaagaagttgaaagattctggggatgtttcaaatgtaatcgagaaagttaaatgcattttaaaaacaccaggaaagattaattgcctaaggaattgcaaaacctatcaagccagaaaacctttgtggttttataacacttccctcaagtttttccttaataagccgatgcttgccgatgttgtcttcgaaattcaaggtacgacagtgccagcccacagggccatcctggtggcccgttgtgaagtgatggcagccatgtttaatggtaattacatggaagcaaagagtgtcctgattcccgtttatggtgtttccaaagagactttcttgtcatttttagaatacctgtacacagactcctgctgcccagctggcatattccaggccatgtgtctcctgatctgtgccgagatgtaccaagtgtccagactgcagcacatctgtgagctgttcatcattacccagctgcagagcatgccaagcagggaactggcatccatgaaccttgatatagttgacctgcttaaaaaggccaagtttcaccactctgattgcctttcaacctggctacttcatttcattgctactaactacctcatcttcagtcaaaagcctgaatttcaggatctttcagtgggaggaacggcagtttttgttggaaaagcacaggtggggcccttcgaatanggttactttgaagggcagg

SEQ ID NO: 373947 - DNA, 2348 bp, Homo sapiens
  misc_feature (1844)..(1844): n is a, c, g, or t
  misc_feature (1968)..(1968): n is a, c, g, or t
ccctttcctggctctggttacggccttgcgagttgaacaaacttgctgcaggcggattggcggctgggagctctcgggctggggcgttgtatttattaatttatattccgcggcgccccgcgcgggcggctcctttgtgtccagccgccgccaccggagctcccggggcctccgcggggagcgcgtcccccgcatccgcccgacccccggggctggcacgtgctgcgcccggtccgctgagggggcggaggccccgatctccccgaccccccttctctgcttagaggaggaggagcagcggcagcggcagcaggaggcgacagctgccagccgaggaggcgcggcggagaggggactgcggtcagctgcgtccacttggggctgtgcggcggtcccgcgcccggcgatgttcccgggcactccctgagtagcggcagcttatcccccgcccgctagcccgccctggtccccggctcgctcgctggctggcgcggccccggccccgctctgcgtcggccccgccgcggtggaggcgcgcgagggggacgcggccggggatgagcggattgcgggtgaactcgccgcccgggggccccgcgaagccgtgagccgctgcttttctccgagtcgccgccctgcccttggatttgagatcatgtccatccacatcgtggcgctggggaacgagggggacacattccaccaggacaaccggccgtcggggcttatccgcacttacctggggagaagccctctggtctccggggacgagagcagcttgttgctgaacgcggccagcacggtcgcgcgtccggtgttcaccgagtatcaggccagtgcgtttgggaatgtcaagctggtggtccacgactgtcccgtctgggacatatttgacagtgattggtacacttctcgaaatctaattgggggcgctgacatcattgtgatcaaatacaacgttaatgacaagttttcattccatgaagtaaaggataattatattccagtgataaaaagagcattaaattcagttccagtaattattgctgctgttggtaccagacaaaatgaagagttaccttgtacatgcccactatgtacctcagacagagggagctgtgttagtacaactgaagggatccaacttgcaaaagaactaggagcgacctatcttgaactccacagccttgatgacttctacataggaaagtattttggaggagtgttggagtattttatgattcaagccttaaatcagaagacaagtgaaaaaatgaagaaaagaaaaatgagcaactcctttcatggaattagaccacctcaacttgaacaaccagaaaaaatgcctgtcttaaaggctgaagcgtcacattataactctgacttaaataacttgctgttctgctgccagtgtgtggacgtggtattttacaaccccaatttaaagaaagttgtagaggcccacaagatcgttctctgcgctgtaagccatgttttcatgctgcttttcaatgtgaagagtcccactgacattcaggattccagtatcatccgaactacccaggatctttttgctataaacagagatactgcatttccaggtgctagccatgaatcttcaggcaacccaccattacgagtcattgttaaagacgccctcttctgttcttgtttatcagacatccttcgcttcatttattcaggtatcttgtcaagtggttctggttacttacaatctcataagctttggaaatgaaatgtgcctgtgacactcaagggtactggttagttttacagtggtctttacctaccatctgagattaagattatacatgaaatattanttgctttatatataagaattggtccaagctttctgttttccttacaaatgtacttgcctcatcttttccctatcaatttcattttattgtggtaaaatacatagaacataaattttaccatctnaaccatttttaagaacacagttcagtggaattaaacacattcataatgttgtgtaactatcaccaccatccgtgtccataattctttgcatcttataaaactgaaactctatacccattaaacgatgattccccattccgacctctttccagcccctgacagccaccattctactttctgtctctgtgattttaactctcctaagtgcctcatgtaagtggaatcatacagtatttgtcattttgtgattgatgtattttacttagcataatgtcttaaaggttcatccaagttgtggcatgtatcaggattttcttccttttaaggttgataatattctgtagtacatatagaccacattttgtttacccattcattca

SEQ ID NO: 373948 - DNA, 320 bp, Homo sapiens
atgacaagttttcattccatgaagtaaaggataattatattccagtgataaaaagagcattaaattcagttccagtaattattgctgctgttggtaccagacaaaatggtaagtatttaatattcttttttgtagtgagcatgcaaatattatatatactttaaatagtgctaagtttattaatggataatagggtttgtttttgaaaaccaaaatgactttggttcaatgccagctgctatcgcttcatcatttgatacgataaaaaaacaacaaaggagaggatcatgaacttctgctgtgattccactgggtgcaaa

SEQ ID NO: 373949 - DNA, 694 bp, Homo sapiens
ggtggggggtgtttagatcattaaagaaatggtttcatcatccactttctctcatgtcccttttctcatcagctgctggcatattccaggccatgtgtctcctgatctgtgccgagatgtaccaagtgtccagactgcagcacatctgtgagctgttcatcattacccagctgcagagcatgccaagcagggaactggcatccatgaaccttgatatagttgacctgcttaaaaaggccaagtttcgtaattgactctgtgtatctgatagcctagttttttataaaatatttttcaaattatactattttaaaatttatcattttttaacatacgttaatactagtcttagtttggaagtttggctaatgaggctaaagtgccttcacaacagtttatctggctagataattttgaagcgttagggtttgtgtgcagtcccttttataaggaggcaaaatgtccagatacggaatttttttaactaaatagtggcccttagtagagtcatttgaatgtggtgctatactatgtcacataggcattgtaggaaatagaatttatgttgaatttccccaaacaatcacatcttcaggttcctaaaagggaaatgacagaattggtccatatatactgatagcgatggttaagctaaactaatttacttcttcattttttcatccatataatgaac

SEQ ID NO: 373950 - DNA, 6055 bp, Homo sapiens
ccctttcctggctctggttacggccttgcgagttgaacaaacttgctgcaggcggattggcggctgggagctctcgggctggggcgttgtatttattaatttatattccgcggcgccccgcgcgggcggctcctttgtgtccagccgccgccaccggagctcccggggcctccgcggggagcgcgtcccccgcatccgcccgacccccggggctggcacgtgctgcgcccggtccgctgagggggcggaggccccgatctccccgaccccccttctctgcttagaggaggaggagcagcggcagcggcagcaggaggcgacagctgccagccgaggaggcgcggcggagaggggactgcggtcagctgcgtccacttggggctgtgcggcggtcccgcgcccggcgatgttcccgggcactccctgagtagcggcagcttatcccccgcccgctagcccgccctggtccccggctcgctcgctggctggcgcggccccggccccgctctgcgtcggccccgccgcggtggaggcgcgcgagggggacgcggccggggatgagcggattgcgggtgaactcgccgcccgggggccccgcgaagccgtgagccgctgcttttctccgagtcgccgccctgcccttggatttgagatcatgtccatccacatcgtggcgctggggaacgagggggacacattccaccaggacaaccggccgtcggggcttatccgcacttacctggggagaagccctctggtctccggggacgagagcagcttgttgctgaacgcggccagcacggtcgcgcgtccggtgttcaccgagtatcaggccagtgcgtttgggaatgtcaagctggtggtccacgactgtcccgtctgggacatatttgacagtgattggtacacttctcgaaatctaattgggggcgctgacatcattgtgatcaaatacaacgttaatgacaagttttcattccatgaagtaaaggataattatattccagtgataaaaagagcattaaattcagttccagtaattattgctgctgttggtaccagacaaaatgaagagttaccttgtacatgcccactatgtacctcagacagagggagctgtgttagtacaactgaagggatccaacttgcaaaagaactaggagcgacctatcttgaactccacagccttgatgacttctacataggaaagtattttggaggagtgttggagtattttatgattcaagccttaaatcagaagacaagtgaaaaaatgaagaaaagaaaaatgagcaactcctttcatggaattagaccacctcaacttgaacaaccagaaaaaatgcctgtcttaaaggctgaagcgtcacattataactctgacttaaataacttgctgttctgctgccagtgtgtggacgtggtattttacaaccccaatttaaagaaagttgtagaggcccacaagatcgttctctgcgctgtaagccatgttttcatgctgcttttcaatgtgaagagtcccactgacattcaggattccagtatcatccgaactacccaggatctttttgctataaacagagatactgcatttccaggtgctagccatgaatcttcaggcaacccaccattacgagtcattgttaaagacgccctcttctgttcttgtttatcagacatccttcgcttcatttattcaggtgcttttcagtgggaagaattggaagaagatatcaggaagaagttgaaagattctggggatgtttcaaatgtaatcgagaaagttaaatgcattttaaaaacaccaggaaagattaattgcctaaggaattgcaaaacctatcaagccagaaaacctttgtggttttataacacttccctcaagtttttccttaataagccgatgcttgccgatgttgtcttcgaaattcaaggtacgacagtgccagcccacagggccatcctggtggcccgttgtgaagtgatggcagccatgtttaatggtaattacatggaagcaaagagtgtcctgattcccgtttatggtgtttccaaagagactttcttgtcatttttagaatacctgtacacagactcctgctgcccagctggcatattccaggccatgtgtctcctgatctgtgccgagatgtaccaagtgtccagactgcagcacatctgtgagctgttcatcattacccagctgcagagcatgccaagcagggaactggcatccatgaaccttgatatagttgacctgcttaaaaaggccaagtttcaccactctgattgcctttcaacctggctacttcatttcattgctactaactacctcatcttcagtcaaaagcctgaatttcaggatctttcagtggaagaacgcagttttgttgaaaagcacagatggccgtcgaatatgtacttgaagcagcttgcggaatacaggaagtatattcactcccggaaatgtcgttgcttagtaatgtaaccctggagcttttatacactacatttcttttttattattatgaagaatgggatacctcccaggttccagtaaaattcttctgaccgaaaccaatgtgggtgttagaaaaattaccatatagcttaatatgtttattagttctctttggaaaaaaactaccactgtggtcttaaaagggaacaaaatataccataggctaaaactaaggctttcactctagaatgcaaagctgttttgcagctgttttcccttaaagatgtcctgttgctttagtgatatttagacccctctcagttaagaaatgcttagattaaaaaaaaaaaattacgtaggattaatacagaaatttaatcatgtctgattaattgctctattaaaataaggggcatttaaagacccagcataaccatttgtataatgagaaatctaggggaaaaccaatcagtccaacatgagattttaggaatagaaatttgccggccatttggaaagtgaaatgccacttagttctcaattgatgacagtgtttgaatcatcataaaaaaaatacctgcttttcatctggacaacccaattgagccactttatctccttttggcaatctgagtaggcggggaacctaggcagggctggctttcttagcgtgtaacttgtgtagcagcacagggcccacacttagaaggaccccacacttggttcaaggctctgctatagcggaaattcttaataatgtttgaagaagggccccatgatttcattttgtgctgagccctcaaaattatgtctgtttcgtggtgggaaatatcctatgttttcttgctcaaacacctttctctctgaaagcagaaaaaggcactgatataaagggaagagaaggaggctcaccggagggaagagaacatagtgaagattcccgcctttggggaggtctggaccacccagggcctccactgccaccttggctggcaagggagaaatgtgttgtgttgtcttagctttaaaacagtcacagttcttgctctatcatagatgaacaaatactttcttgatcattctgtaagaccaggaggttggtaagagtgactaaccagcctaactttaatacacatgtataaagatgttcacagagaaagatgctctgtagagaatttgctaccgaagttggctcaagaatttgtttttagtgttatttaccaagattaggacgtcagtggcttaaattctttgaattcttttcaaggactgcaagattatttgataaagagtagcatgaatcttgtgctctaatattacacagtaagttcaaagaaaggatgtaagtcaaagacttgttacatagagggaaaatggactgggatagaggacagactgatagtttctttctttcatatcacatgtatagagaaataattatatcagaaactcacaaacctagacatggaaaaacagattactgtctattgtcagcatcattttcatctgtaagtcactactggaatatatttttcttttaatttccagtgactttagaatacacacagtttttccgacttttcaaaaatttgattaaatggttttatagtataatattgggaccccataccgttagcccttgtatgtataccaacactgccaaagtaaaacattaggtcaggcatggtggctcaggcctgtaatcccagcattttgggaggctgaggcaagtggataacttgaggtcatgagttcgaaaccagcctggccaaaacagtgaaaccccgtctctactaaaaatacaaaattagccagatgtggtggcgcacacctgtaatcccagctactcaggaagctgaggcaggaaaatcgcttgaacctgggaggtggaagttgcagtgagccgagatcgcaccactgcactccagcctgggtgacaagagcgaaactccatctcaaaaaaaaaaaaaaaaccaaagtgaaacactaaaaattccctatagatatattccaggaaatattttaattgggctgattttaattaggctgtatcattgatgattactggaatcgattttatgtcttttgtattttaatcacttgagttaatcaaccactggcaaatcccatttgacaaagattagcattgtaaaaaacagatactgtggtagatttctagaaattcattcacatttaagacttctaaaatggaataatagccttttgtttttcatgagcatattcgcacccctatatgaattacagcatttaaagttcaaaatcagtaacttttaatctaggaaattgaaaaatattaagttgcaaagcaaaaaaaggtattttcttgaaaatactatttaatgtttaactagactataggtagttccttaaggttgtttgacctgaagtggagttgggtttggaagctggtgcccagttggtgtggagtgtgtagttttgttatgaaagttctctaccacctacctgtgtgagtgacaccaacatccagatgtcacagctctccagagctagtcagaagagaaatcaaattagtgtttaaacccatttgcatattgacttgtcagtacctttaactcaatttaatataacaagaaatcgtaaaatacttataacctatcttagagaaatgagtgctggttttgagagttgttttttaactgaaagattatttctagatgggtagtgctttgtgctggtttctgcttccatatatttcccagtcattttaattagagaagatactctatggtagaactaaggcctttcctttcttggccaaagtctttaccctatttaaccctttgtatatttctgactgctcactgttcatattataggggaccagatttgtaatatagaattctccataacatgaatgaaattaattctgtccaagccagcatggtggcttcatattaagtagtaacagaagtctgaacaattggataaatttgacttccaagacagctaaacttttcaactgcaattttaaaaactacactacactgttatagttaatctgacaaaaatgtcctcaaagagtactttattttatttaaagcatctgtttaattcaacctttaataattttgcaaagaagggtatgtgtgtattttaatatagcctgacctgaatttatatgtttttagctttagtatttaactttttgtaacaaataaaccttttttaaaacaagtttaaacacacacaccccccccacccacacaccaccacaccccacccacaccaatccacacccccaccacacaacacaccagcacccccccagcccccgcagctcggcggcaagcatacggagcggggggagtggtgccgcccaatgccaagtggcgtcttttgctcaccacaggcggtccgctgagtcgtcgagcgcccgaacacggatcgcgaacgccagcgaacactcagtgcgcgttccatccacatgggaagcacgagcggccaccgcatagccggcttgctctcgtatgcgctccctcaatcaacagctagcacagcgcacgtgatgcggcacgctctgccggtcgcacacgcacaacacggggatgc

SEQ ID NO: 373951 - DNA, 5757 bp, Homo sapiens
ccctttcctggctctggttacggccttgcgagttgaacaaacttgctgcaggcggattggcggctgggagctctcgggctggggcgttgtatttattaatttatattccgcggcgccccgcgcgggcggctcctttgtgtccagccgccgccaccggagctcccggggcctccgcggggagcgcgtcccccgcatccgcccgacccccggggctggcacgtgctgcgcccggtccgctgagggggcggaggccccgatctccccgaccccccttctctgcttagaggaggaggagcagcggcagcggcagcaggaggcgacagctgccagccgaggaggcgcggcggagaggggactgcggtcagctgcgtccacttggggctgtgcggcggtcccgcgcccggcgatgttcccgggcactccctgagtagcggcagcttatcccccgcccgctagcccgccctggtccccggctcgctcgctggctggcgcggccccggccccgctctgcgtcggccccgccgcggtggaggcgcgcgagggggacgcggccggggatgagcggattgcgggtgaactcgccgcccgggggccccgcgaagccgtgagccgctgcttttctccgagtcgccgccctgcccttggatttgagatcatgtccatccacatcgtggcgctggggaacgagggggacacattccaccaggacaaccggccgtcggggcttatccgcacttacctggggagaagccctctggtctccggggacgagagcagcttgttgctgaacgcggccagcacggtcgcgcgtccggtgttcaccgagtatcaggccagtgcgtttgggaatgtcaagctggtggtccacgactgtcccgtctgggacatatttgacagtgattggtacacttctcgaaatctaattgggggcgctgacatcattgtgatcaaatacaacgttaatgacaagttttcattccatgaagtaaaggataattatattccagtgataaaaagagcattaaattcagttccagtaattattgctgctgttggtaccagacaaaatgaagagttaccttgtacatgcccactatgtacctcagacagagggagctgtgttagtacaactgaagggatccaacttgcaaaagaactaggagcgacctatcttgaactccacagccttgatgacttctacataggaaagtattttggaggagtgttggagtattttatgattcaagccttaaatcagaagacaagtgaaaaaatgaagaaaagaaaaatgagcaactcctttcatggaattagaccacctcaacttgaacaaccagaaaaaatgcctgtcttaaaggctgaagcgtcacattataactctgacttaaataacttgctgttctgctgccagtgtgtggacgtggtattttacaaccccaatttaaagaaagttgtagaggcccacaagatcgttctctgcgctgtaagccatgttttcatgctgcttttcaatgtgaagagtcccactgacattcaggattccagtatcatccgaactacccaggatctttttgctataaacagagatactgcatttccaggtgctagccatgaatcttcaggcaacccaccattacgagtcattgttaaagacgccctcttctgttcttgtttatcagacatccttcgcttcatttattcaggtgcttttcagtgggaagaattggaagaagatatcaggaagaagttgaaagattctggggatgtttcaaatgtaatcgagaaagttaaatgcattttaaaaacaccaggaaagattaattgcctaaggaattgcaaaacctatcaagccagaaaacctttgtggttttataacacttccctcaagtttttccttaataagccgatgcttgccgatgttgtcttcgaaattcaaggtacgacagtgccagcccacagggccatcctggtggcccgttgtgaagtgatggcagccatgtttaatggtaattacatggaagcaaagagtgtcctgattcccgtttatggtgtttccaaagagactttcttgtcatttttagaatacctgtacacagactcctgctgcccagctggcatattccaggccatgtgtctcctgatctgtgccgagatgtaccaagtgtccagactgcagcacatctgtgagctgttcatcattacccagctgcagagcatgccaagcagggaactggcatccatgaaccttgatatagttgacctgcttaaaaaggccaagtttcaccactctgattgcctttcaacctggctacttcatttcattgctactaactacctcatcttcagtcaaaagcctgaatttcaggatctttcagtggaagaacgcagttttgttgaaaagcacagatggccgtcgaatatgtacttgaagcagcttgcggaatacaggaagtatattcactcccggaaatgtcgttgcttagtaatgtaaccctggagcttttatacactacatttcttttttattattatgaagaatgggatacctcccaggttccagtaaaattcttctgaccgaaaccaatgtgggtgttagaaaaattaccatatagcttaatatgtttattagttctctttggaaaaaaactaccactgtggtcttaaaagggaacaaaatataccataggctaaaactaaggctttcactctagaatgcaaagctgttttgcagctgttttcccttaaagatgtcctgttgctttagtgatatttagacccctctcagttaagaaatgcttagattaaaaaaaaaaaattacgtaggattaatacagaaatttaatcatgtctgattaattgctctattaaaataaggggcatttaaagacccagcataaccatttgtataatgagaaatctaggggaaaaccaatcagtccaacatgagattttaggaatagaaatttgccggccatttggaaagtgaaatgccacttagttctcaattgatgacagtgtttgaatcatcataaaaaaaatacctgcttttcatctggacaacccaattgagccactttatctccttttggcaatctgagtaggcggggaacctaggcagggctggctttcttagcgtgtaacttgtgtagcagcacagggcccacacttagaaggaccccacacttggttcaaggctctgctatagcggaaattcttaataatgtttgaagaagggccccatgatttcattttgtgctgagccctcaaaattatgtctgtttcgtggtgggaaatatcctatgttttcttgctcaaacacctttctctctgaaagcagaaaaaggcactgatataaagggaagagaaggaggctcaccggagggaagagaacatagtgaagattcccgcctttggggaggtctggaccacccagggcctccactgccaccttggctggcaagggagaaatgtgttgtgttgtcttagctttaaaacagtcacagttcttgctctatcatagatgaacaaatactttcttgatcattctgtaagaccaggaggttggtaagagtgactaaccagcctaactttaatacacatgtataaagatgttcacagagaaagatgctctgtagagaatttgctaccgaagttggctcaagaatttgtttttagtgttatttaccaagattaggacgtcagtggcttaaattctttgaattcttttcaaggactgcaagattatttgataaagagtagcatgaatcttgtgctctaatattacacagtaagttcaaagaaaggatgtaagtcaaagacttgttacatagagggaaaatggactgggatagaggacagactgatagtttctttctttcatatcacatgtatagagaaataattatatcagaaactcacaaacctagacatggaaaaacagattactgtctattgtcagcatcattttcatctgtaagtcactactggaatatatttttcttttaatttccagtgactttagaatacacacagtttttccgacttttcaaaaatttgattaaatggttttatagtataatattgggaccccataccgttagcccttgtatgtataccaacactgccaaagtaaaacattaggtcaggcatggtggctcaggcctgtaatcccagcattttgggaggctgaggcaagtggataacttgaggtcatgagttcgaaaccagcctggccaaaacagtgaaaccccgtctctactaaaaatacaaaattagccagatgtggtggcgcacacctgtaatcccagctactcaggaagctgaggcaggaaaatcgcttgaacctgggaggtggaagttgcagtgagccgagatcgcaccactgcactccagcctgggtgacaagagcgaaactccatctcaaaaaaaaaaaaaaaaccaaagtgaaacactaaaaattccctatagatatattccaggaaatattttaattgggctgattttaattaggctgtatcattgatgattactggaatcgattttatgtcttttgtattttaatcacttgagttaatcaaccactggcaaatcccatttgacaaagattagcattgtaaaaaacagatactgtggtagatttctagaaattcattcacatttaagacttctaaaatggaataatagccttttgtttttcatgagcatattcgcacccctatatgaattacagcatttaaagttcaaaatcagtaacttttaatctaggaaattgaaaaatattaagttgcaaagcaaaaaaaggtattttcttgaaaatactatttaatgtttaactagactataggtagttccttaaggttgtttgacctgaagtggagttgggtttggaagctggtgcccagttggtgtggagtgtgtagttttgttatgaaagttctctaccacctacctgtgtgagtgacaccaacatccagatgtcacagctctccagagctagtcagaagagaaatcaaattagtgtttaaacccatttgcatattgacttgtcagtacctttaactcaatttaatataacaagaaatcgtaaaatacttataacctatcttagagaaatgagtgctggttttgagagttgttttttaactgaaagattatttctagatgggtagtgctttgtgctggtttctgcttccatatatttcccagtcattttaattagagaagatactctatggtagaactaaggcctttcctttcttggccaaagtctttaccctatttaaccctttgtatatttctgactgctcactgttcatattataggggaccagatttgtaatatagaattctccataacatgaatgaaattaattctgtccaagccagcatggtggcttcatattaagtagtaacagaagtctgaacaattggataaatttgacttccaagacagctaaacttttcaactgcaattttaaaaactacactacactgttatagttaatctgacaaaaatgtcctcaaagagtactttattttatttaaagcatctgtttaattcaacctttaataattttgcaaagaagggtatgtgtgtattttaatatagcctgacctgaatttatatgtttttagctttagtatttaactttttgtaacaaataaaccttttttaaaacaagtttaaaaaaaccacacaaataccaccccacaaccacccaacacacacacacctctgcggcgcgcccccaaactctc

SEQ ID NO: 373952 - DNA, 5828 bp, Homo sapiens
  misc_feature (5720)..(5722): n is a, c, g, or t
  misc_feature (5727)..(5727): n is a, c, g, or t
  misc_feature (5753)..(5753): n is a, c, g, or t
ccctttcctggctctggttacggccttgcgagttgaacaaacttgctgcaggcggattggcggctgggagctctcgggctggggcgttgtatttattaatttatattccgcggcgccccgcgcgggcggctcctttgtgtccagccgccgccaccggagctcccggggcctccgcggggagcgcgtcccccgcatccgcccgacccccggggctggcacgtgctgcgcccggtccgctgagggggcggaggccccgatctccccgaccccccttctctgcttagaggaggaggagcagcggcagcggcagcaggaggcgacagctgccagccgaggaggcgcggcggagaggggactgcggtcagctgcgtccacttggggctgtgcggcggtcccgcgcccggcgatgttcccgggcactccctgagtagcggcagcttatcccccgcccgctagcccgccctggtccccggctcgctcgctggctggcgcggccccggccccgctctgcgtcggccccgccgcggtggaggcgcgcgagggggacgcggccggggatgagcggattgcgggtgaactcgccgcccgggggccccgcgaagccgtgagccgctgcttttctccgagtcgccgccctgcccttggatttgagatcatgtccatccacatcgtggcgctggggaacgagggggacacattccaccaggacaaccggccgtcggggcttatccgcacttacctggggagaagccctctggtctccggggacgagagcagcttgttgctgaacgcggccagcacggtcgcgcgtccggtgttcaccgagtatcaggccagtgcgtttgggaatgtcaagctggtggtccacgactgtcccgtctgggacatatttgacagtgattggtacacttctcgaaatctaattgggggcgctgacatcattgtgatcaaatacaacgttaatgacaagttttcattccatgaagtaaaggataattatattccagtgataaaaagagcattaaattcagttccagtaattattgctgctgttggtaccagacaaaatgaagagttaccttgtacatgcccactatgtacctcagacagagggagctgtgttagtacaactgaagggatccaacttgcaaaagaactaggagcgacctatcttgaactccacagccttgatgacttctacataggaaagtattttggaggagtgttggagtattttatgattcaagccttaaatcagaagacaagtgaaaaaatgaagaaaagaaaaatgagcaactcctttcatggaattagaccacctcaacttgaacaaccagaaaaaatgcctgtcttaaaggctgaagcgtcacattataactctgacttaaataacttgctgttctgctgccagtgtgtggacgtggtattttacaaccccaatttaaagaaagttgtagaggcccacaagatcgttctctgcgctgtaagccatgttttcatgctgcttttcaatgtgaagagtcccactgacattcaggattccagtatcatccgaactacccaggatctttttgctataaacagagatactgcatttccaggtgctagccatgaatcttcaggcaacccaccattacgagtcattgttaaagacgccctcttctgttcttgtttatcagacatccttcgcttcatttattcaggtgcttttcagtgggaagaattggaagaagatatcaggaagaagttgaaagattctggggatgtttcaaatgtaatcgagaaagttaaatgcattttaaaaacaccaggaaagattaattgcctaaggaattgcaaaacctatcaagccagaaaacctttgtggttttataacacttccctcaagtttttccttaataagccgatgcttgccgatgttgtcttcgaaattcaaggtacgacagtgccagcccacagggccatcctggtggcccgttgtgaagtgatggcagccatgtttaatggtaattacatggaagcaaagagtgtcctgattcccgtttatggtgtttccaaagagactttcttgtcatttttagaatacctgtacacagactcctgctgcccagctggcatattccaggccatgtgtctcctgatctgtgccgagatgtaccaagtgtccagactgcagcacatctgtgagctgttcatcattacccagctgcagagcatgccaagcagggaactggcatccatgaaccttgatatagttgacctgcttaaaaaggccaagtttcaccactctgattgcctttcaacctggctacttcatttcattgctactaactacctcatcttcagtcaaaagcctgaatttcaggatctttcagtggaagaacgcagttttgttgaaaagcacagatggccgtcgaatatgtacttgaagcagcttgcggaatacaggaagtatattcactcccggaaatgtcgttgcttagtaatgtaaccctggagcttttatacactacatttcttttttattattatgaagaatgggatacctcccaggttccagtaaaattcttctgaccgaaaccaatgtgggtgttagaaaaattaccatatagcttaatatgtttattagttctctttggaaaaaaactaccactgtggtcttaaaagggaacaaaatataccataggctaaaactaaggctttcactctagaatgcaaagctgttttgcagctgttttcccttaaagatgtcctgttgctttagtgatatttagacccctctcagttaagaaatgcttagattaaaaaaaaaaaattacgtaggattaatacagaaatttaatcatgtctgattaattgctctattaaaataaggggcatttaaagacccagcataaccatttgtataatgagaaatctaggggaaaaccaatcagtccaacatgagattttaggaatagaaatttgccggccatttggaaagtgaaatgccacttagttctcaattgatgacagtgtttgaatcatcataaaaaaaatacctgcttttcatctggacaacccaattgagccactttatctccttttggcaatctgagtaggcggggaacctaggcagggctggctttcttagcgtgtaacttgtgtagcagcacagggcccacacttagaaggaccccacacttggttcaaggctctgctatagcggaaattcttaataatgtttgaagaagggccccatgatttcattttgtgctgagccctcaaaattatgtctgtttcgtggtgggaaatatcctatgttttcttgctcaaacacctttctctctgaaagcagaaaaaggcactgatataaagggaagagaaggaggctcaccggagggaagagaacatagtgaagattcccgcctttggggaggtctggaccacccagggcctccactgccaccttggctggcaagggagaaatgtgttgtgttgtcttagctttaaaacagtcacagttcttgctctatcatagatgaacaaatactttcttgatcattctgtaagaccaggaggttggtaagagtgactaaccagcctaactttaatacacatgtataaagatgttcacagagaaagatgctctgtagagaatttgctaccgaagttggctcaagaatttgtttttagtgttatttaccaagattaggacgtcagtggcttaaattctttgaattcttttcaaggactgcaagattatttgataaagagtagcatgaatcttgtgctctaatattacacagtaagttcaaagaaaggatgtaagtcaaagacttgttacatagagggaaaatggactgggatagaggacagactgatagtttctttctttcatatcacatgtatagagaaataattatatcagaaactcacaaacctagacatggaaaaacagattactgtctattgtcagcatcattttcatctgtaagtcactactggaatatatttttcttttaatttccagtgactttagaatacacacagtttttccgacttttcaaaaatttgattaaatggttttatagtataatattgggaccccataccgttagcccttgtatgtataccaacactgccaaagtaaaacattaggtcaggcatggtggctcaggcctgtaatcccagcattttgggaggctgaggcaagtggataacttgaggtcatgagttcgaaaccagcctggccaaaacagtgaaaccccgtctctactaaaaatacaaaattagccagatgtggtggcgcacacctgtaatcccagctactcaggaagctgaggcaggaaaatcgcttgaacctgggaggtggaagttgcagtgagccgagatcgcaccactgcactccagcctgggtgacaagagcgaaactccatctcaaaaaaaaaaaaaaaaccaaagtgaaacactaaaaattccctatagatatattccaggaaatattttaattgggctgattttaattaggctgtatcattgatgattactggaatcgattttatgtcttttgtattttaatcacttgagttaatcaaccactggcaaatcccatttgacaaagattagcattgtaaaaaacagatactgtggtagatttctagaaattcattcacatttaagacttctaaaatggaataatagccttttgtttttcatgagcatattcgcacccctatatgaattacagcatttaaagttcaaaatcagtaacttttaatctaggaaattgaaaaatattaagttgcaaagcaaaaaaaggtattttcttgaaaatactatttaatgtttaactagactataggtagttccttaaggttgtttgacctgaagtggagttgggtttggaagctggtgcccagttggtgtggagtgtgtagttttgttatgaaagttctctaccacctacctgtgtgagtgacaccaacatccagatgtcacagctctccagagctagtcagaagagaaatcaaattagtgtttaaacccatttgcatattgacttgtcagtacctttaactcaatttaatataacaagaaatcgtaaaatacttataacctatcttagagaaatgagtgctggttttgagagttgttttttaactgaaagattatttctagatgggtagtgctttgtgctggtttctgcttccatatatttcccagtcattttaattagagaagatactctatggtagaactaaggcctttcctttcttggccaaagtctttaccctatttaaccctttgtatatttctgactgctcactgttcatattataggggaccagatttgtaatatagaattctccataacatgaatgaaattaattctgtccaagccagcatggtggcttcatattaagtagtaacagaagtctgaacaattggataaatttgacttccaagacagctaaacttttcaactgcaattttaaaaactacactacactgttatagttaatctgacaaaaatgtcctcaaagagtactttattttatttaaagcatctgtttaattcaacctttaataattttgcaaagaagggtatgtgtgtattttaatatagcctgacctgaatttatatgtttttagctttagtatttaactttttgtaacaaataaaccttttttaaaacaagtttaaaaaaaaaaaaaaaaaaaaaaaaaaaaaaaaaaannntttangggggggggggggggaaaaaaaaaanttttggggggggggggggggcccccgccccccctagggggggttattttttgggggggggggggggccccctttt

SEQ ID NO: 373953 - DNA, 5677 bp, Homo sapiens
ccctttcctggctctggttacggccttgcgagttgaacaaacttgctgcaggcggattggcggctgggagctctcgggctggggcgttgtatttattaatttatattccgcggcgccccgcgcgggcggctcctttgtgtccagccgccgccaccggagctcccggggcctccgcggggagcgcgtcccccgcatccgcccgacccccggggctggcacgtgctgcgcccggtccgctgagggggcggaggccccgatctccccgaccccccttctctgcttagaggaggaggagcagcggcagcggcagcaggaggcgacagctgccagccgaggaggcgcggcggagaggggactgcggtcagctgcgtccacttggggctgtgcggcggtcccgcgcccggcgatgttcccgggcactccctgagtagcggcagcttatcccccgcccgctagcccgccctggtccccggctcgctcgctggctggcgcggccccggccccgctctgcgtcggccccgccgcggtggaggcgcgcgagggggacgcggccggggatgagcggattgcgggtgaactcgccgcccgggggccccgcgaagccgtgagccgctgcttttctccgagtcgccgccctgcccttggatttgagatcatgtccatccacatcgtggcgctggggaacgagggggacacattccaccaggacaaccggccgtcggggcttatccgcacttacctggggagaagccctctggtctccggggacgagagcagcttgttgctgaacgcggccagcacggtcgcgcgtccggtgttcaccgagtatcaggccagtgcgtttgggaatgtcaagctggtggtccacgactgtcccgtctgggacatatttgacagtgattggtacacttctcgaaatctaattgggggcgctgacatcattgtgatcaaatacaacgttaatgacaagttttcattccatgaagtaaaggataattatattccagtgataaaaagagcattaaattcagttccagtaattattgctgctgttggtaccagacaaaatgaagagttaccttgtacatgcccactatgtacctcagacagagggagctgtgttagtacaactgaagggatccaacttgcaaaagaactaggagcgacctatcttgaactccacagccttgatgacttctacataggaaagtattttggaggagtgttggagtattttatgattcaagccttaaatcagaagacaagtgaaaaaatgaagaaaagaaaaatgagcaactcctttcatggaattagaccacctcaacttgaacaaccagaaaaaatgcctgtcttaaaggctgaagcgtcacattataactctgacttaaataacttgctgttctgctgccagtgtgtggacgtggtattttacaaccccaatttaaagaaagttgtagaggcccacaagatcgttctctgcgctgtaagccatgttttcatgctgcttttcaatgtgaagagtcccactgacattcaggattccagtatcatccgaactacccaggatctttttgctataaacagagatactgcatttccaggtgctagccatgaatcttcaggcaacccaccattacgagtcattgttaaagacgccctcttctgttcttgtttatcagacatccttcgcttcatttattcaggtgcttttcagtgggaagaattggaagaagatatcaggaagaagttgaaagattctggggatgtttcaaatgtaatcgagaaagttaaatgcattttaaaaacaccaggaaagattaattgcctaaggaattgcaaaacctatcaagccagaaaacctttgtggttttataacacttccctcaagtttttccttaataagccgatgcttgccgatgttgtcttcgaaattcaaggtacgacagtgccagcccacagggccatcctggtggcccgttgtgaagtgatggcagccatgtttaatggtaattacatggaagcaaagagtgtcctgattcccgtttatggtgtttccaaagagactttcttgtcatttttagaatacctgtacacagactcctgctgcccagctggcatattccaggccatgtgtctcctgatctgtgccgagatgtaccaagtgtccagactgcagcacatctgtgagctgttcatcattacccagctgcagagcatgccaagcagggaactggcatccatgaaccttgatatagttgacctgcttaaaaaggccaagtttcaccactctgattgcctttcaacctggctacttcatttcattgctactaactacctcatcttcagtcaaaagcctgaatttcaggatctttcagtggaagaacgcagttttgttgaaaagcacagatggccgtcgaatatgtacttgaagcagcttgcggaatacaggaagtatattcactcccggaaatgtcgttgcttagtaatgtaaccctggagcttttatacactacatttcttttttattattatgaagaatgggatacctcccaggttccagtaaaattcttctgaccgaaaccaatgtgggtgttagaaaaattaccatatagcttaatatgtttattagttctctttggaaaaaaactaccactgtggtcttaaaagggaacaaaatataccataggctaaaactaaggctttcactctagaatgcaaagctgttttgcagctgttttcccttaaagatgtcctgttgctttagtgatatttagacccctctcagttaagaaatgcttagattaaaaaaaaaaaattacgtaggattaatacagaaatttaatcatgtctgattaattgctctattaaaataaggggcatttaaagacccagcataaccatttgtataatgagaaatctaggggaaaaccaatcagtccaacatgagattttaggaatagaaatttgccggccatttggaaagtgaaatgccacttagttctcaattgatgacagtgtttgaatcatcataaaaaaaatacctgcttttcatctggacaacccaattgagccactttatctccttttggcaatctgagtaggcggggaacctaggcagggctggctttcttagcgtgtaacttgtgtagcagcacagggcccacacttagaaggaccccacacttggttcaaggctctgctatagcggaaattcttaataatgtttgaagaagggccccatgatttcattttgtgctgagccctcaaaattatgtctgtttcgtggtgggaaatatcctatgttttcttgctcaaacacctttctctctgaaagcagaaaaaggcactgatataaagggaagagaaggaggctcaccggagggaagagaacatagtgaagattcccgcctttggggaggtctggaccacccagggcctccactgccaccttggctggcaagggagaaatgtgttgtgttgtcttagctttaaaacagtcacagttcttgctctatcatagatgaacaaatactttcttgatcattctgtaagaccaggaggttggtaagagtgactaaccagcctaactttaatacacatgtataaagatgttcacagagaaagatgctctgtagagaatttgctaccgaagttggctcaagaatttgtttttagtgttatttaccaagattaggacgtcagtggcttaaattctttgaattcttttcaaggactgcaagattatttgataaagagtagcatgaatcttgtgctctaatattacacagtaagttcaaagaaaggatgtaagtcaaagacttgttacatagagggaaaatggactgggatagaggacagactgatagtttctttctttcatatcacatgtatagagaaataattatatcagaaactcacaaacctagacatggaaaaacagattactgtctattgtcagcatcattttcatctgtaagtcactactggaatatatttttcttttaatttccagtgactttagaatacacacagtttttccgacttttcaaaaatttgattaaatggttttatagtataatattgggaccccataccgttagcccttgtatgtataccaacactgccaaagtaaaacattaggtcaggcatggtggctcaggcctgtaatcccagcattttgggaggctgaggcaagtggataacttgaggtcatgagttcgaaaccagcctggccaaaacagtgaaaccccgtctctactaaaaatacaaaattagccagatgtggtggcgcacacctgtaatcccagctactcaggaagctgaggcaggaaaatcgcttgaacctgggaggtggaagttgcagtgagccgagatcgcaccactgcactccagcctgggtgacaagagcgaaactccatctcaaaaaaaaaaaaaaaaccaaagtgaaacactaaaaattccctatagatatattccaggaaatattttaattgggctgattttaattaggctgtatcattgatgattaagcatttaaagttcaaaatcagtaacttttaatctaggaaattgaaaaatattaagttgcaaagcaaaaaaaggtattttcttgaaaatactatttaatgtttaactagactataggtagttccttaaggttgtttgacctgaagtggagttgggtttggaagctggtgcccagttggtgtggagtgtgtagttttgttatgaaagttctctaccacctacctgtgtgagtgacaccaacatccagatgtcacagctctccagagctagtcagaagagaaatcaaattagtgtttaaacccatttgcatattgacttgtcagtacctttaactcaatttaatataacaagaaatcgtaaaatacttataacctatcttagagaaatgagtgctggttttgagagttgttttttaactgaaagattatttctagatgggtagtgctttgtgctggtttctgcttccatatatttcccagtcattttaattagagaagatactctatggtagaactaaggcctttcctttcttggccaaagtctttaccctatttaaccctttgtatatttctgactgctcactgttcatattataggggaccagatttgtaatatagaattctccataacatgaatgaaattaattctgtccaagccagcatggtggcttcatattaagtagtaacagaagtctgaacaattggataaatttgacttccaagacagctaaacttttcaactgcaattttaaaaactacactacactgttatagttaatctgacaaaaatgtcctcaaagagtactttattttatttaaagcatctgtttaattcaacctttaataattttgcaaagaagggtatgtgtgtattttaatatagcctgacctgaatttatatgtttttagctttagtatttaactttttgtaacaaataaaccttttttaaaacaagtttaaaaacaacaaaaaaagggggggggctaaaggatcctgagggcaggttacggtccagttttgcaaggtgccaaggggcgttaaagaggggcgggttaaactggggggaagctctgggttggagactcttgggggatatggacactcgagttagccgataaatctttgggacgattggggatgtgtaaacagg

SEQ ID NO: 373954 - DNA, 5847 bp, Homo sapiens
  misc_feature (97)..(97): n is a, c, g, or t
agaggctgtcctagaccgatcgcgctacctggagcctccgcggcggcacctcacgtgaaggtaagcgctgtgctccactgagattgctgtctccgtnagcgcaccagtgcgcgtcgtgtgccaatcggatcgtcatggtcggctctcgggattctcgtctagacgaggtgagacagagaagcgcccccggacgcgtcacaccggaagccgtccttgatactgaattcaaagagtagggaagtgacgtcgaagcgtcatgagcggagatcgatcgcgacgagatgccaagcgagcgaggatgctgagatgacggcgcggagaggggactgcggtcagctgcgtccacttggggctgtgcggcggtcccgcgcccggcgatgttcccgggcactccctgagtagcggcagcttatcccccgcccgctagcccgccctggtccccggctcgctcgctggctggcgcggccccggccccgctctgcgtcggccccgccgcggtggaggcgcgcgagggggacgcggccggggatgagcggattgcgggtgaactcgccgcccgggggccccgcgaagccgtgagccgctgcttttctccgagtcgccgccctgcccttggatttgagatcatgtccatccacatcgtggcgctggggaacgagggggacacattccaccaggacaaccggccgtcggggcttatccgcacttacctggggagaagccctctggtctccggggacgagagcagcttgttgctgaacgcggccagcacggtcgcgcgtccggtgttcaccgagtatcaggccagtgcgtttgggaatgtcaagctggtggtccacgactgtcccgtctgggacatatttgacagtgattggtacacttctcgaaatctaattgggggcgctgacatcattgtgatcaaatacaacgttaatgacaagttttcattccatgaagtaaaggataattatattccagtgataaaaagagcattaaattcagttccagtaattattgctgctgttggtaccagacaaaatgaagagttaccttgtacatgcccactatgtacctcagacagagggagctgtgttagtacaactgaagggatccaacttgcaaaagaactaggagcgacctatcttgaactccacagccttgatgacttctacataggaaagtattttggaggagtgttggagtattttatgattcaagccttaaatcagaagacaagtgaaaaaatgaagaaaagaaaaatgagcaactcctttcatggaattagaccacctcaacttgaacaaccagaaaaaatgcctgtcttaaaggctgaagcgtcacattataactctgacttaaataacttgctgttctgctgccagtgtgtggacgtggtattttacaaccccaatttaaagaaagttgtagaggcccacaagatcgttctctgcgctgtaagccatgttttcatgctgcttttcaatgtgaagagtcccactgacattcaggattccagtatcatccgaactacccaggatctttttgctataaacagagatactgcatttccaggtgctagccatgaatcttcaggcaacccaccattacgagtcattgttaaagacgccctcttctgttcttgtttatcagacatccttcgcttcatttattcaggtgcttttcagtgggaagaattggaagaagatatcaggaagaagttgaaagattctggggatgtttcaaatgtaatcgagaaagttaaatgcattttaaaaacaccaggaaagattaattgcctaaggaattgcaaaacctatcaagccagaaaacctttgtggttttataacacttccctcaagtttttccttaataagccgatgcttgccgatgttgtcttcgaaattcaaggtacgacagtgccagcccacagggccatcctggtggcccgttgtgaagtgatggcagccatgtttaatggtaattacatggaagcaaagagtgtcctgattcccgtttatggtgtttccaaagagactttcttgtcatttttagaatacctgtacacagactcctgctgcccagctggcatattccaggccatgtgtctcctgatctgtgccgagatgtaccaagtgtccagactgcagcacatctgtgagctgttcatcattacccagctgcagagcatgccaagcagggaactggcatccatgaaccttgatatagttgacctgcttaaaaaggccaagtttcaccactctgattgcctttcaacctggctacttcatttcattgctactaactacctcatcttcagtcaaaagcctgaatttcaggatctttcagtggaagaacgcagttttgttgaaaagcacagatggccgtcgaatatgtacttgaagcagcttgcggaatacaggaagtatattcactcccggaaatgtcgttgcttagtaatgtaaccctggagcttttatacactacatttcttttttattattatgaagaatgggatacctcccaggttccagtaaaattcttctgaccgaaaccaatgtgggtgttagaaaaattaccatatagcttaatatgtttattagttctctttggaaaaaaactaccactgtggtcttaaaagggaacaaaatataccataggctaaaactaaggctttcactctagaatgcaaagctgttttgcagctgttttcccttaaagatgtcctgttgctttagtgatatttagacccctctcagttaagaaatgcttagattaaaaaaaaaaaattacgtaggattaatacagaaatttaatcatgtctgattaattgctctattaaaataaggggcatttaaagacccagcataaccatttgtataatgagaaatctaggggaaaaccaatcagtccaacatgagattttaggaatagaaatttgccggccatttggaaagtgaaatgccacttagttctcaattgatgacagtgtttgaatcatcataaaaaaaatacctgcttttcatctggacaacccaattgagccactttatctccttttggcaatctgagtaggcggggaacctaggcagggctggctttcttagcgtgtaacttgtgtagcagcacagggcccacacttagaaggaccccacacttggttcaaggctctgctatagcggaaattcttaataatgtttgaagaagggccccatgatttcattttgtgctgagccctcaaaattatgtctgtttcgtggtgggaaatatcctatgttttcttgctcaaacacctttctctctgaaagcagaaaaaggcactgatataaagggaagagaaggaggctcaccggagggaagagaacatagtgaagattcccgcctttggggaggtctggaccacccagggcctccactgccaccttggctggcaagggagaaatgtgttgtgttgtcttagctttaaaacagtcacagttcttgctctatcatagatgaacaaatactttcttgatcattctgtaagaccaggaggttggtaagagtgactaaccagcctaactttaatacacatgtataaagatgttcacagagaaagatgctctgtagagaatttgctaccgaagttggctcaagaatttgtttttagtgttatttaccaagattaggacgtcagtggcttaaattctttgaattcttttcaaggactgcaagattatttgataaagagtagcatgaatcttgtgctctaatattacacagtaagttcaaagaaaggatgtaagtcaaagacttgttacatagagggaaaatggactgggatagaggacagactgatagtttctttctttcatatcacatgtatagagaaataattatatcagaaactcacaaacctagacatggaaaaacagattactgtctattgtcagcatcattttcatctgtaagtcactactggaatatatttttcttttaatttccagtgactttagaatacacacagtttttccgacttttcaaaaatttgattaaatggttttatagtataatattgggaccccataccgttagcccttgtatgtataccaacactgccaaagtaaaacattaggtcaggcatggtggctcaggcctgtaatcccagcattttgggaggctgaggcaagtggataacttgaggtcatgagttcgaaaccagcctggccaaaacagtgaaaccccgtctctactaaaaatacaaaattagccagatgtggtggcgcacacctgtaatcccagctactcaggaagctgaggcaggaaaatcgcttgaacctgggaggtggaagttgcagtgagccgagatcgcaccactgcactccagcctgggtgacaagagcgaaactccatctcaaaaaaaaaaaaaaaaccaaagtgaaacactaaaaattccctatagatatattccaggaaatattttaattgggctgattttaattaggctgtatcattgatgattactggaatcgattttatgtcttttgtattttaatcacttgagttaatcaaccactggcaaatcccatttgacaaagattagcattgtaaaaaacagatactgtggtagatttctagaaattcattcacatttaagacttctaaaatggaataatagccttttgtttttcatgagcatattcgcacccctatatgaattacagcatttaaagttcaaaatcagtaacttttaatctaggaaattgaaaaatattaagttgcaaagcaaaaaaaggtattttcttgaaaatactatttaatgtttaactagactataggtagttccttaaggttgtttgacctgaagtggagttgggtttggaagctggtgcccagttggtgtggagtgtgtagttttgttatgaaagttctctaccacctacctgtgtgagtgacaccaacatccagatgtcacagctctccagagctagtcagaagagaaatcaaattagtgtttaaacccatttgcatattgacttgtcagtacctttaactcaatttaatataacaagaaatcgtaaaatacttataacctatcttagagaaatgagtgctggttttgagagttgttttttaactgaaagattatttctagatgggtagtgctttgtgctggtttctgcttccatatatttcccagtcattttaattagagaagatactctatggtagaactaaggcctttcctttcttggccaaagtctttaccctatttaaccctttgtatatttctgactgctcactgttcatattataggggaccagatttgtaatatagaattctccataacatgaatgaaattaattctgtccaagccagcatggtggcttcatattaagtagtaacagaagtctgaacaattggataaatttgacttccaagacagctaaacttttcaactgcaattttaaaaactacactacactgttatagttaatctgacaaaaatgtcctcaaagagtactttattttatttaaagcatctgtttaattcaacctttaataattttgcaaagaagggtatgtgtgtattttaatatagcctgacctgaatttatatgtttttagctttagtatttaactttttgtaacaaataaaccttttttaaaacaagtttaaaaacaacaaaaaaagggggggggctaaaggatcctgagggcaggttacggtccagttttgcaaggtgccaaggggcgttaaagaggggcgggttaaactggggggaagctctgggttggagactcttgggggatatggacactcgagttagccgataaatctttgggacgattggggatgtgtaaacagg

SEQ ID NO: 373955 - DNA, 5352 bp, Homo sapiens
attgactaaacctaactagaagccagaggccaaaggaatctgtcgatatacaagctagcttcccagtggatggagcaggatggagaagaggaagaacgggcctggagggacaaacaaagggttaaaagaaaaggtccatccacatcgtggcgctggggaacgagggggacacattccaccaggacaaccggccgtcggggcttatccgcacttacctggggagaagccctctggtctccggggacgagagcagcttgttgctgaacgcggccagcacggtcgcgcgtccggtgttcaccgagtatcaggccagtgcgtttgggaatgtcaagctggtggtccacgactgtcccgtctgggacatatttgacagtgattggtacacttctcgaaatctaattgggggcgctgacatcattgtgatcaaatacaacgttaatgacaagttttcattccatgaagtaaaggataattatattccagtgataaaaagagcattaaattcagttccagtaattattgctgctgttggtaccagacaaaatgaagagttaccttgtacatgcccactatgtacctcagacagagggagctgtgttagtacaactgaagggatccaacttgcaaaagaactaggagcgacctatcttgaactccacagccttgatgacttctacataggaaagtattttggaggagtgttggagtattttatgattcaagccttaaatcagaagacaagtgaaaaaatgaagaaaagaaaaatgagcaactcctttcatggaattagaccacctcaacttgaacaaccagaaaaaatgcctgtcttaaaggctgaagcgtcacattataactctgacttaaataacttgctgttctgctgccagtgtgtggacgtggtattttacaaccccaatttaaagaaagttgtagaggcccacaagatcgttctctgcgctgtaagccatgttttcatgctgcttttcaatgtgaagagtcccactgacattcaggattccagtatcatccgaactacccaggatctttttgctataaacagagatactgcatttccaggtgctagccatgaatcttcaggcaacccaccattacgagtcattgttaaagacgccctcttctgttcttgtttatcagacatccttcgcttcatttattcaggtgcttttcagtgggaagaattggaagaagatatcaggaagaagttgaaagattctggggatgtttcaaatgtaatcgagaaagttaaatgcattttaaaaacaccaggaaagattaattgcctaaggaattgcaaaacctatcaagccagaaaacctttgtggttttataacacttccctcaagtttttccttaataagccgatgcttgccgatgttgtcttcgaaattcaaggtacgacagtgccagcccacagggccatcctggtggcccgttgtgaagtgatggcagccatgtttaatggtaattacatggaagcaaagagtgtcctgattcccgtttatggtgtttccaaagagactttcttgtcatttttagaatacctgtacacagactcctgctgcccagctggcatattccaggccatgtgtctcctgatctgtgccgagatgtaccaagtgtccagactgcagcacatctgtgagctgttcatcattacccagctgcagagcatgccaagcagggaactggcatccatgaaccttgatatagttgacctgcttaaaaaggccaagtttcaccactctgattgcctttcaacctggctacttcatttcattgctactaactacctcatcttcagtcaaaagcctgaatttcaggatctttcagtggaagaacgcagttttgttgaaaagcacagatggccgtcgaatatgtacttgaagcagcttgcggaatacaggaagtatattcactcccggaaatgtcgttgcttagtaatgtaaccctggagcttttatacactacatttcttttttattattatgaagaatgggatacctcccaggttccagtaaaattcttctgaccgaaaccaatgtgggtgttagaaaaattaccatatagcttaatatgtttattagttctctttggaaaaaaactaccactgtggtcttaaaagggaacaaaatataccataggctaaaactaaggctttcactctagaatgcaaagctgttttgcagctgttttcccttaaagatgtcctgttgctttagtgatatttagacccctctcagttaagaaatgcttagattaaaaaaaaaaaattacgtaggattaatacagaaatttaatcatgtctgattaattgctctattaaaataaggggcatttaaagacccagcataaccatttgtataatgagaaatctaggggaaaaccaatcagtccaacatgagattttaggaatagaaatttgccggccatttggaaagtgaaatgccacttagttctcaattgatgacagtgtttgaatcatcataaaaaaaatacctgcttttcatctggacaacccaattgagccactttatctccttttggcaatctgagtaggcggggaacctaggcagggctggctttcttagcgtgtaacttgtgtagcagcacagggcccacacttagaaggaccccacacttggttcaaggctctgctatagcggaaattcttaataatgtttgaagaagggccccatgatttcattttgtgctgagccctcaaaattatgtctgtttcgtggtgggaaatatcctatgttttcttgctcaaacacctttctctctgaaagcagaaaaaggcactgatataaagggaagagaaggaggctcaccggagggaagagaacatagtgaagattcccgcctttggggaggtctggaccacccagggcctccactgccaccttggctggcaagggagaaatgtgttgtgttgtcttagctttaaaacagtcacagttcttgctctatcatagatgaacaaatactttcttgatcattctgtaagaccaggaggttggtaagagtgactaaccagcctaactttaatacacatgtataaagatgttcacagagaaagatgctctgtagagaatttgctaccgaagttggctcaagaatttgtttttagtgttatttaccaagattaggacgtcagtggcttaaattctttgaattcttttcaaggactgcaagattatttgataaagagtagcatgaatcttgtgctctaatattacacagtaagttcaaagaaaggatgtaagtcaaagacttgttacatagagggaaaatggactgggatagaggacagactgatagtttctttctttcatatcacatgtatagagaaataattatatcagaaactcacaaacctagacatggaaaaacagattactgtctattgtcagcatcattttcatctgtaagtcactactggaatatatttttcttttaatttccagtgactttagaatacacacagtttttccgacttttcaaaaatttgattaaatggttttatagtataatattgggaccccataccgttagcccttgtatgtataccaacactgccaaagtaaaacattaggtcaggcatggtggctcaggcctgtaatcccagcattttgggaggctgaggcaagtggataacttgaggtcatgagttcgaaaccagcctggccaaaacagtgaaaccccgtctctactaaaaatacaaaattagccagatgtggtggcgcacacctgtaatcccagctactcaggaagctgaggcaggaaaatcgcttgaacctgggaggtggaagttgcagtgagccgagatcgcaccactgcactccagcctgggtgacaagagcgaaactccatctcaaaaaaaaaaaaaaaaccaaagtgaaacactaaaaattccctatagatatattccaggaaatattttaattgggctgattttaattaggctgtatcattgatgattactggaatcgattttatgtcttttgtattttaatcacttgagttaatcaaccactggcaaatcccatttgacaaagattagcattgtaaaaaacagatactgtggtagatttctagaaattcattcacatttaagacttctaaaatggaataatagccttttgtttttcatgagcatattcgcacccctatatgaattacagcatttaaagttcaaaatcagtaacttttaatctaggaaattgaaaaatattaagttgcaaagcaaaaaaaggtattttcttgaaaatactatttaatgtttaactagactataggtagttccttaaggttgtttgacctgaagtggagttgggtttggaagctggtgcccagttggtgtggagtgtgtagttttgttatgaaagttctctaccacctacctgtgtgagtgacaccaacatccagatgtcacagctctccagagctagtcagaagagaaatcaaattagtgtttaaacccatttgcatattgacttgtcagtacctttaactcaatttaatataacaagaaatcgtaaaatacttataacctatcttagagaaatgagtgctggttttgagagttgttttttaactgaaagattatttctagatgggtagtgctttgtgctggtttctgcttccatatatttcccagtcattttaattagagaagatactctatggtagaactaaggcctttcctttcttggccaaagtctttaccctatttaaccctttgtatatttctgactgctcactgttcatattataggggaccagatttgtaatatagaattctccataacatgaatgaaattaattctgtccaagccagcatggtggcttcatattaagtagtaacagaagtctgaacaattggataaatttgacttccaagacagctaaacttttcaactgcaattttaaaaactacactacactgttatagttaatctgacaaaaatgtcctcaaagagtactttattttatttaaagcatctgtttaattcaacctttaataattttgcaaagaagggtatgtgtgtattttaatatagcctgacctgaatttatatgtttttagctttagtatttaactttttgtaacaaataaaccttttttaaaacaagtttaaaaacaacaaaaaaagggggggggctaaaggatcctgagggcaggttacggtccagttttgcaaggtgccaaggggcgttaaagaggggcgggttaaactggggggaagctctgggttggagactcttgggggatatggacactcgagttagccgataaatctttgggacgattggggatgtgtaaacagg

SEQ ID NO: 373956 - DNA, 5689 bp, Homo sapiens
ccctttcctggctctggttacggccttgcgagttgaacaaacttgctgcaggcggattggcggctgggagctctcgggctggggcgttgtatttattaatttatattccgcggcgccccgcgcgggcggctcctttgtgtccagccgccgccaccggagctcccggggcctccgcggggagcgcgtcccccgcatccgcccgacccccggggctggcacgtgctgcgcccggtccgctgagggggcggaggccccgatctccccgaccccccttctctgcttagaggaggaggagcagcggcagcggcagcaggaggcgacagctgccagccgaggaggcgcggcggagaggggactgcggtcagctgcgtccacttggggctgtgcggcggtcccgcgcccggcgatgttcccgggcactccctgagtagcggcagcttatcccccgcccgctagcccgccctggtccccggctcgctcgctggctggcgcggccccggccccgctctgcgtcggccccgccgcggtggaggcgcgcgagggggacgcggccggggatgagcggattgcgggtgaactcgccgcccgggggccccgcgaagccgtgagccgctgcttttctccgagtcgccgccctgcccttggatttgagatcatgtccatccacatcgtggcgctggggaacgagggggacacattccaccaggacaaccggccgtcggggcttatccgcacttacctggggagaagccctctggtctccggggacgagagcagcttgttgctgaacgcggccagcacggtcgcgcgtccggtgttcaccgagtatcaggccagtgcgtttgggaatgtcaagctggtggtccacgactgtcccgtctggaagagttaccttgtacatgcccactatgtacctcagacagagggagctgtgttagtacaactgaagggatccaacttgcaaaagaactaggagcgacctatcttgaactccacagccttgatgacttctacataggaaagtattttggaggagtgttggagtattttatgattcaagccttaaatcagaagacaagtgaaaaaatgaagaaaagaaaaatgagcaactcctttcatggaattagaccacctcaacttgaacaaccagaaaaaatgcctgtcttaaaggctgaagcgtcacattataactctgacttaaataacttgctgttctgctgccagtgtgtggacgtggtattttacaaccccaatttaaagaaagttgtagaggcccacaagatcgttctctgcgctgtaagccatgttttcatgctgcttttcaatgtgaagagtcccactgacattcaggattccagtatcatccgaactacccaggatctttttgctataaacagagatactgcatttccaggtgctagccatgaatcttcaggcaacccaccattacgagtcattgttaaagacgccctcttctgttcttgtttatcagacatccttcgcttcatttattcaggtgcttttcagtgggaagaattggaagaagatatcaggaagaagttgaaagattctggggatgtttcaaatgtaatcgagaaagttaaatgcattttaaaaacaccaggaaagattaattgcctaaggaattgcaaaacctatcaagccagaaaacctttgtggttttataacacttccctcaagtttttccttaataagccgatgcttgccgatgttgtcttcgaaattcaaggtacgacagtgccagcccacagggccatcctggtggcccgttgtgaagtgatggcagccatgtttaatggtaattacatggaagcaaagagtgtcctgattcccgtttatggtgtttccaaagagactttcttgtcatttttagaatacctgtacacagactcctgctgcccagctggcatattccaggccatgtgtctcctgatctgtgccgagatgtaccaagtgtccagactgcagcacatctgtgagctgttcatcattacccagctgcagagcatgccaagcagggaactggcatccatgaaccttgatatagttgacctgcttaaaaaggccaagtttcaccactctgattgcctttcaacctggctacttcatttcattgctactaactacctcatcttcagtcaaaagcctgaatttcaggatctttcagtggaagaacgcagttttgttgaaaagcacagatggccgtcgaatatgtacttgaagcagcttgcggaatacaggaagtatattcactcccggaaatgtcgttgcttagtaatgtaaccctggagcttttatacactacatttcttttttattattatgaagaatgggatacctcccaggttccagtaaaattcttctgaccgaaaccaatgtgggtgttagaaaaattaccatatagcttaatatgtttattagttctctttggaaaaaaactaccactgtggtcttaaaagggaacaaaatataccataggctaaaactaaggctttcactctagaatgcaaagctgttttgcagctgttttcccttaaagatgtcctgttgctttagtgatatttagacccctctcagttaagaaatgcttagattaaaaaaaaaaaattacgtaggattaatacagaaatttaatcatgtctgattaattgctctattaaaataaggggcatttaaagacccagcataaccatttgtataatgagaaatctaggggaaaaccaatcagtccaacatgagattttaggaatagaaatttgccggccatttggaaagtgaaatgccacttagttctcaattgatgacagtgtttgaatcatcataaaaaaaatacctgcttttcatctggacaacccaattgagccactttatctccttttggcaatctgagtaggcggggaacctaggcagggctggctttcttagcgtgtaacttgtgtagcagcacagggcccacacttagaaggaccccacacttggttcaaggctctgctatagcggaaattcttaataatgtttgaagaagggccccatgatttcattttgtgctgagccctcaaaattatgtctgtttcgtggtgggaaatatcctatgttttcttgctcaaacacctttctctctgaaagcagaaaaaggcactgatataaagggaagagaaggaggctcaccggagggaagagaacatagtgaagattcccgcctttggggaggtctggaccacccagggcctccactgccaccttggctggcaagggagaaatgtgttgtgttgtcttagctttaaaacagtcacagttcttgctctatcatagatgaacaaatactttcttgatcattctgtaagaccaggaggttggtaagagtgactaaccagcctaactttaatacacatgtataaagatgttcacagagaaagatgctctgtagagaatttgctaccgaagttggctcaagaatttgtttttagtgttatttaccaagattaggacgtcagtggcttaaattctttgaattcttttcaaggactgcaagattatttgataaagagtagcatgaatcttgtgctctaatattacacagtaagttcaaagaaaggatgtaagtcaaagacttgttacatagagggaaaatggactgggatagaggacagactgatagtttctttctttcatatcacatgtatagagaaataattatatcagaaactcacaaacctagacatggaaaaacagattactgtctattgtcagcatcattttcatctgtaagtcactactggaatatatttttcttttaatttccagtgactttagaatacacacagtttttccgacttttcaaaaatttgattaaatggttttatagtataatattgggaccccataccgttagcccttgtatgtataccaacactgccaaagtaaaacattaggtcaggcatggtggctcaggcctgtaatcccagcattttgggaggctgaggcaagtggataacttgaggtcatgagttcgaaaccagcctggccaaaacagtgaaaccccgtctctactaaaaatacaaaattagccagatgtggtggcgcacacctgtaatcccagctactcaggaagctgaggcaggaaaatcgcttgaacctgggaggtggaagttgcagtgagccgagatcgcaccactgcactccagcctgggtgacaagagcgaaactccatctcaaaaaaaaaaaaaaaaccaaagtgaaacactaaaaattccctatagatatattccaggaaatattttaattgggctgattttaattaggctgtatcattgatgattactggaatcgattttatgtcttttgtattttaatcacttgagttaatcaaccactggcaaatcccatttgacaaagattagcattgtaaaaaacagatactgtggtagatttctagaaattcattcacatttaagacttctaaaatggaataatagccttttgtttttcatgagcatattcgcacccctatatgaattacagcatttaaagttcaaaatcagtaacttttaatctaggaaattgaaaaatattaagttgcaaagcaaaaaaaggtattttcttgaaaatactatttaatgtttaactagactataggtagttccttaaggttgtttgacctgaagtggagttgggtttggaagctggtgcccagttggtgtggagtgtgtagttttgttatgaaagttctctaccacctacctgtgtgagtgacaccaacatccagatgtcacagctctccagagctagtcagaagagaaatcaaattagtgtttaaacccatttgcatattgacttgtcagtacctttaactcaatttaatataacaagaaatcgtaaaatacttataacctatcttagagaaatgagtgctggttttgagagttgttttttaactgaaagattatttctagatgggtagtgctttgtgctggtttctgcttccatatatttcccagtcattttaattagagaagatactctatggtagaactaaggcctttcctttcttggccaaagtctttaccctatttaaccctttgtatatttctgactgctcactgttcatattataggggaccagatttgtaatatagaattctccataacatgaatgaaattaattctgtccaagccagcatggtggcttcatattaagtagtaacagaagtctgaacaattggataaatttgacttccaagacagctaaacttttcaactgcaattttaaaaactacactacactgttatagttaatctgacaaaaatgtcctcaaagagtactttattttatttaaagcatctgtttaattcaacctttaataattttgcaaagaagggtatgtgtgtattttaatatagcctgacctgaatttatatgtttttagctttagtatttaactttttgtaacaaataaaccttttttaaaacaagtttaaaaacaacaaaaaaagggggggggctaaaggatcctgagggcaggttacggtccagttttgcaaggtgccaaggggcgttaaagaggggcgggttaaactggggggaagctctgggttggagactcttgggggatatggacactcgagttagccgataaatctttgggacgattggggatgtgtaaacagg

SEQ ID NO: 373957 - DNA, 4729 bp, Homo sapiens
actcacggccctatccagcgctgcctttgtgtggtgcagcagtagctagagagcctagcaagcttttcctagagagttaattcagttcggtgagttcagtgagcagtatgggctgagagagccctcaaaattcaacgtagcactggctctcccagcagcaggcattgttcaggtgagacagaatggttgcctgaggaagtagtgtgctggggagactgcagggattaaggtcatcctcttccagattttcattaagtctgaaatgctctccttggctccacaagagatcctcttgctattcctactgtggtgtacggacagcttatggtttacttcttacagtttcctgtttcagataaggggaagcatggccaagatggttctgtgagtcaggcccagaagggtaatggggttgttttcttgggaggcacatgggcacgggtagtattattaatatttcaagccaattggaaaggattgatgtttcattataaaaatatgaagcaaaatacttcatttcagtgtttctatttctggaaatacaaactaagtaacaaattgttgtcttgacttgcaaattgttggtttcaaggtcaacatctgaactttctttattgctccctttaaaattaagaagtttctggattaatggtagttatcactcccaaattcagattctgcatatcagcctagctgtccctaatgtggtagtctaattagaaggaaaattgctggaataaccctgcaggtttatctcacttgtttcttgtttcccttttgaacctttcaggtacgacagtgccagcccacagggccatcctggtggcccgttgtgaagtgatggcagccatgtttaatggtaattacatggaagcaaagagtgtcctgattcccgtttatggtgtttccaaagagactttcttgtcatttttagaatacctgtacacagactcctgctgcccagctggcatattccaggccatgtgtctcctgatctgtgccgagatgtaccaagtgtccagactgcagcacatctgtgagctgttcatcattacccagctgcagagcatgccaagcagggaactggcatccatgaaccttgatatagttgacctgcttaaaaaggccaagtttcaccactctgattgcctttcaacctggctacttcatttcattgctactaactacctcatcttcagtcaaaagcctgaatttcaggatctttcagtggaagaacgcagttttgttgaaaagcacagatggccgtcgaatatgtacttgaagcagcttgcggaatacaggaagtatattcactcccggaaatgtcgttgcttagtaatgtaaccctggagcttttatacactacatttcttttttattattatgaagaatgggatacctcccaggttccagtaaaattcttctgaccgaaaccaatgtgggtgttagaaaaattaccatatagcttaatatgtttattagttctctttggaaaaaaactaccactgtggtcttaaaagggaacaaaatataccataggctaaaactaaggctttcactctagaatgcaaagctgttttgcagctgttttcccttaaagatgtcctgttgctttagtgatatttagacccctctcagttaagaaatgcttagattaaaaaaaaaaaattacgtaggattaatacagaaatttaatcatgtctgattaattgctctattaaaataaggggcatttaaagacccagcataaccatttgtataatgagaaatctaggggaaaaccaatcagtccaacatgagattttaggaatagaaatttgccggccatttggaaagtgaaatgccacttagttctcaattgatgacagtgtttgaatcatcataaaaaaaatacctgcttttcatctggacaacccaattgagccactttatctccttttggcaatctgagtaggcggggaacctaggcagggctggctttcttagcgtgtaacttgtgtagcagcacagggcccacacttagaaggaccccacacttggttcaaggctctgctatagcggaaattcttaataatgtttgaagaagggccccatgatttcattttgtgctgagccctcaaaattatgtctgtttcgtggtgggaaatatcctatgttttcttgctcaaacacctttctctctgaaagcagaaaaaggcactgatataaagggaagagaaggaggctcaccggagggaagagaacatagtgaagattcccgcctttggggaggtctggaccacccagggcctccactgccaccttggctggcaagggagaaatgtgttgtgttgtcttagctttaaaacagtcacagttcttgctctatcatagatgaacaaatactttcttgatcattctgtaagaccaggaggttggtaagagtgactaaccagcctaactttaatacacatgtataaagatgttcacagagaaagatgctctgtagagaatttgctaccgaagttggctcaagaatttgtttttagtgttatttaccaagattaggacgtcagtggcttaaattctttgaattcttttcaaggactgcaagattatttgataaagagtagcatgaatcttgtgctctaatattacacagtaagttcaaagaaaggatgtaagtcaaagacttgttacatagagggaaaatggactgggatagaggacagactgatagtttctttctttcatatcacatgtatagagaaataattatatcagaaactcacaaacctagacatggaaaaacagattactgtctattgtcagcatcattttcatctgtaagtcactactggaatatatttttcttttaatttccagtgactttagaatacacacagtttttccgacttttcaaaaatttgattaaatggttttatagtataatattgggaccccataccgttagcccttgtatgtataccaacactgccaaagtaaaacattaggtcaggcatggtggctcaggcctgtaatcccagcattttgggaggctgaggcaagtggataacttgaggtcatgagttcgaaaccagcctggccaaaacagtgaaaccccgtctctactaaaaatacaaaattagccagatgtggtggcgcacacctgtaatcccagctactcaggaagctgaggcaggaaaatcgcttgaacctgggaggtggaagttgcagtgagccgagatcgcaccactgcactccagcctgggtgacaagagcgaaactccatctcaaaaaaaaaaaaaaaaccaaagtgaaacactaaaaattccctatagatatattccaggaaatattttaattgggctgattttaattaggctgtatcattgatgattactggaatcgattttatgtcttttgtattttaatcacttgagttaatcaaccactggcaaatcccatttgacaaagattagcattgtaaaaaacagatactgtggtagatttctagaaattcattcacatttaagacttctaaaatggaataatagccttttgtttttcatgagcatattcgcacccctatatgaattacagcatttaaagttcaaaatcagtaacttttaatctaggaaattgaaaaatattaagttgcaaagcaaaaaaaggtattttcttgaaaatactatttaatgtttaactagactataggtagttccttaaggttgtttgacctgaagtggagttgggtttggaagctggtgcccagttggtgtggagtgtgtagttttgttatgaaagttctctaccacctacctgtgtgagtgacaccaacatccagatgtcacagctctccagagctagtcagaagagaaatcaaattagtgtttaaacccatttgcatattgacttgtcagtacctttaactcaatttaatataacaagaaatcgtaaaatacttataacctatcttagagaaatgagtgctggttttgagagttgttttttaactgaaagattatttctagatgggtagtgctttgtgctggtttctgcttccatatatttcccagtcattttaattagagaagatactctatggtagaactaaggcctttcctttcttggccaaagtctttaccctatttaaccctttgtatatttctgactgctcactgttcatattataggggaccagatttgtaatatagaattctccataacatgaatgaaattaattctgtccaagccagcatggtggcttcatattaagtagtaacagaagtctgaacaattggataaatttgacttccaagacagctaaacttttcaactgcaattttaaaaactacactacactgttatagttaatctgacaaaaatgtcctcaaagagtactttattttatttaaagcatctgtttaattcaacctttaataattttgcaaagaagggtatgtgtgtattttaatatagcctgacctgaatttatatgtttttagctttagtatttaactttttgtaacaaataaaccttttttaaaacaagtttaaaaacaacaaaaaaagggggggggctaaaggatcctgagggcaggttacggtccagttttgcaaggtgccaaggggcgttaaagaggggcgggttaaactggggggaagctctgggttggagactcttgggggatatggacactcgagttagccgataaatctttgggacgattggggatgtgtaaacagg

SEQ ID NO: 373958 - DNA, 4320 bp, Homo sapiens
ccctttcctggctctggttacggccttgcgagttgaacaaacttgctgcaggcggattggcggctgggagctctcgggctggggcgttgtatttattaatttatattccgcggcgccccgcgcgggcggctcctttgtgtccagccgccgccaccggagctcccggggcctccgcggggagcgcgtcccccgcatccgcccgacccccggggctggcacgtgctgcgcccggtccgctgagggggcggaggccccgatctccccgaccccccttctctgcttagaggaggaggagcagcggcagcggcagcaggaggcgacagctgccagccgaggaggcgcggcggagaggggactgcggtcagctgcgtccacttggggctgtgcggcggtcccgcgcccggcgatgttcccgggcactccctgagtagcggcagcttatcccccgcccgctagcccgccctggtccccggctcgctcgctggctggcgcggccccggccccgctctgcgtcggccccgccgcggtggaggcgcgcgagggggacgcggccggggatgagcggattgcgggtgaactcgccgcccgggggccccgcgaagccgtgagccgctgcttttctccgagtcgccgccctgcccttggatttgagatcatgtccatccacatcgtggcgctggggaacgagggggacacattccaccaggacaaccggccgtcggggcttatccgcacttacctggggagaagccctctggtctccggggacgagagcagcttgttgctgaacgcggccagcacggtcgcgcgtccggtgttcaccgagtatcaggccagtgcgtttgggaatgtcaagctggtggtccacgactgtcccgtctgggacatatttgacagtgattggtacacttctcgaaatctaattgggggcgctgacatcattgtgatcaaatacaacgttaatgacaagttttcattccatgaagtaaaggataattatattccagtgataaaaagagcattaaattcagttccagtaattattgctgctgttggtaccagacaaaatgaagagttaccttgtacatgcccactatgtacctcagacagagggagctgtgttagtacaactgaagggatccaacttgcaaaagaactaggagcgacctatcttgaactccacagccttgatgacttctacataggaaagtattttggaggagtgttggagtattttatgattcaagccttaaatcagaagacaagtgaaaaaatgaagaaaagaaaaatgagcaactcctttcatggaattagaccacctcaacttgaacaaccagaaaaaatgcctgtcttaaaggctgaagcgtcacattataactctgacttaaataacttgctgttctgctgccagtgtgtggacgtggtattttacaaccccaatttaaagaaagttgtagaggcccacaagatcgttctctgcgctgtaagccatgttttcatgctgcttttcaatgtgaagagtcccactgacattcaggattccagtatcatccgaactacccaggatctttttgctataaacagagatactgcatttccaggtgctagccatgaatcttcaggcaacccaccattacgagtcattgttaaagacgccctcttctgttcttgtttatcagacatccttcgcttcatttattcaggtgcttttcagtgggaagaattggaagaagatatcaggaagaagttgaaagattctggggatgtttcaaatgtaatcgagaaagttaaatgcattttaaaaacaccaggaaagattaattgcctaaggaattgcaaaacctatcaagccagaaaacctttgtggttttataacacttccctcaagtttttccttaataagccgatgcttgccgatgttgtcttcgaaattcaaggtacgacagtgccagcccacagggccatcctggtggcccgttgtgaagtgatggcagccatgtttaatggtaattacatggaagcaaagagtgtcctgattcccgtttatggtgtttccaaagagactttcttgtcatttttagaatacctgtacacagactcctgctgcccagctggcatattccaggccatgtgtctcctgatctgtgccgagatgtaccaagtgtccagactgcagcacatctgtgagctgttcatcattacccagctgcagagcatgccaagcagggaactggcatccatgaaccttgatatagttgacctgcttaaaaaggccaagtttcaccactctgattgcctttcaacctggctacttcatttcattgctactaactacctcatcttcagtcaaaagcctgaatttcaggatctttcagtggaagaacgcagttttgttgaaaagcacagatggccgtcgaatatgtacttgaagcagcttgcggaatacaggaagtatattcactcccggaaatgtcgttgcttagtaatgtaaccctggagcttttatacactacatttcttttttattattatgaagaatgggatacctcccaggttccagtaaaattcttctgaccgaaaccaatgtgggtgttagaaaaattaccatatagcttaatatgtttattagttctctttggaaaaaaactaccactgtggtcttaaaagggaacaaaatataccataggctaaaactaaggctttcactctagaatgcaaagctgttttgcagctgttttcccttaaagatgtcctgttgctttagtgatatttagacccctctcagttaagaaatgcttagattaaaaaaaaaaaattacgtaggattaatacagaaatttaatcatgtctgattaattgctctattaaaataaggggcatttaaagacccagcataaccatttgtataatgagaaatctaggggaaaaccaatcagtccaacatgagattttaggaatagaaatttgccggccatttggaaagtgaaatgccacttagttctcaattgatgacagtgtttgaatcatcataaaaaaaatacctgcttttcatctggacaacccaattgagccactttatctccttttggcaatctgagtaggcggggaacctaggcagggctggctttcttagcgtgtaacttgtgtagcagcacagggcccacacttagaaggaccccacacttggttcaaggctctgctatagcggaaattcttaataatgtttgaagaagggccccatgatttcattttgtgctgagccctcaaaattatgtctgtttcgtggtgggaaatatcctatgttttcttgctcaaacacctttctctctgaaagcagaaaaaggcactgatataaagggaagagaaggaggctcaccggagggaagagaacatagtgaagattcccgcctttggggaggtctggaccacccagggcctccactgccaccttggctggcaagggagaaatgtgttgtgttgtcttagctttaaaacagtcacagttcttgctctatcatagatgaacaaatactttcttgatcattctgtaagaccaggaggttggtaagagtgactaaccagcctaactttaatacacatgtataaagatgttcacagagaaagatgctctgtagagaatttgctaccgaagttggctcaagaatttgtttttagtgttatttaccaagattaggacgtcagtggcttaaattctttgaattcttttcaaggactgcaagattatttgataaagagtagcatgaatcttgtgctctaatattacacagtaagttcaaagaaaggatgtaagtcaaagacttgttacatagagggaaaatggactgggatagaggacagactgatagtttctttctttcatatcacatgtatagagaaataattatatcagaaactcacaaacctagacatggaaaaacagattactgtctattgtcagcatcattttcatctgtaagtcactactggaatatatttttcttttaatttccagtgactttagaatacacacagtttttccgacttttcaaaaatttgattaaatggttttatagtataatattgggaccccataccgttagcccttgtatgtataccaacactgccaaagtaaaacattaggtcaggcatggtggctcaggcctgtaatcccagcattttgggaggctgaggcaagtggataacttgaggtcatgagttcgaaaccagcctggccaaaacagtgaaaccccgtctctacacttatatatagaaatttatctgctttatattttcaggtcccctaggtacttgttcggttca

SEQ ID NO: 373959 - DNA, 1688 bp, Homo sapiens
ccctttcctggctctggttacggccttgcgagttgaacaaacttgctgcaggcggattggcggctgggagctctcgggctggggcgttgtatttattaatttatattccgcggcgccccgcgcgggcggctcctttgtgtccagccgccgccaccggagctcccggggcctccgcggggagcgcgtcccccgcatccgcccgacccccggggctggcacgtgctgcgcccggtccgctgagggggcggaggccccgatctccccgaccccccttctctgcttagaggaggaggagcagcggcagcggcagcaggaggcgacagctgccagccgaggaggcgcggcggagaggggactgcggtcagctgcgtccacttggggctgtgcggcggtcccgcgcccggcgatgttcccgggcactccctgagtagcggcagcttatcccccgcccgctagcccgccctggtccccggctcgctcgctggctggcgcggccccggccccgctctgcgtcggccccgccgcggtggaggcgcgcgagggggacgcggccggggatgagcggattgcgggtgaactcgccgcccgggggccccgcgaagccgtgagccgctgcttttctccgagtcgccgccctgcccttggatttgagatcatgtccatccacatcgtggcgctggggaacgagggggacacattccaccaggacaaccggccgtcggggcttatccgcacttacctggggagaagccctctggtctccggggacgagagcagcttgttgctgaacgcggccagcacggtcgcgcgtccggtgttcaccgagtatcaggccagtgcgtttgggaatgtcaagctggtggtccacgactgtcccgtctgggacatatttgacagtgattggtacacttctcgaaatctaattgggggcgctgacatcattgtgatcaaatacaacgttaatgacaagttttcattccatgaagtaaaggataattatattccagtgataaaaagagcattaaattcagttccagtaattattgctgctgttggtaccagacaaaatgaagagttaccttgtacatgcccactatgtacctcagacagagggagctgtgttagtacaactgaagggatccaacttgcaaaagaactaggagcgacctatcttgaactccacagccttgatgacttctacataggaaagtattttggaggagtgttggagtattttatgattcaagccttaaatcagaagacaagtgaaaaaatgaagaaaagaaaaatgagcaactcctttcatggaattagaccacctcaacttgaacaaccagaaaaaatgcctgtcttaaaggctgaagcgtcacattataactctgacttaaataacttgctgttctgctgccagtgtgtggacgtggtattttacaaccccaatttaaagaaagttgtagaggcccacaagatcgttctctgcgctgtaagccatgttttcatgctgcttttcaatgtgaagagtcccactgacattcaggattccagtatcatccgaactacccaggatcttgtgggcctctacaactttctttaaattagggttgtaaaataccacgtccacacactggcagcagaacagcaagttatttaagtcacagtatcacatatccggggagtcctctagagct

SEQ ID NO: 373960 - DNA, 572 bp, Homo sapiens
acccacccacaccccttcaatctttttcatcacacttgcaaaccagtagaaagatgaaaggcctgtgacgatccaagacacttggaggttgatccacagaggactgggacacaccacgagaatctcccagagtgtcattacagtggaagacttcgagacgattgatgcaggatattacatttgcactgctcagaatcttcaaggacagaccacagtagctaccactgttgagttttcctgacttggaaaaggaaatgtaatgaacttatggaaagcccatttgtgtacacagtcagctttggggttccttttattagtgctttgccagaggctgatgtcaagcaccacaccccaaccccagcgtctcgtgagtccgacccagacatccaaactaaaaggaagtcatccagtctattcacagaagtgttaacttttctaacagaaagcatgattttgattgcttacctacatacgtgttcctagtttttatacatgtgtaaacaattttatataatcaatcatttctattaaatgagcacgtttttgtaaaaaataaaaagtgggataagtgt

SEQ ID NO: 373961 - DNA, 1654 bp, Homo sapiens
cccgtcctcccacccccaccagcagttacagggctgggtgcggagaccaactctggccagacacagaggagcagcaagaacccggggcaacggtcctaaaccgaatcctcccgcttcggcgtcccaggagcccgcccctcgcccgccgcctcccctgcgtccccgccccgcgcagccgccgcgctcctgcgctccgaggtccgaggttcccgagatgaaggtctggctgctgcttggtcttctgctggtgcacgaagcgctggaggatgttactggccaacaccttcccaagaacaagcgtccaaaagaaccaggagagaatagaatcaaacctaccaacaagaaggtgaagcccaaaattcctaaaatgaaggacagggactcagccaattcagcaccaaagacgcagtctatcatgatgcaagtgctggataaaggtcgcttccagaaacccgccgctaccctgagtctgctggcggggcaaactgtagagcttcgatgtaaagggagtagaattgggtggagctaccctgcgtatctggacacctttaaggattctcgcctcagcgtcaagcagaatgagcgctacggccagttgactctggtcaactccacctcggcagacacaggtgaattcagctgctgggtgcagctctgcagcggctacatctgcaggaaggacgaggccaaaacgggctccacctacatcttttttacagagaaaggagaactctttgtaccttctcccagctacttcgatgttgtctacttgaacccggacagacaggctgtggttccttgtcgggtgaccgtgctgtcggccaaagtcacgctccacagggaattcccagccaaggagatcccagccaatggaacggacattgtttatgacatgaagcggggctttgtgtatctgcaacctcattccgagcaccagggtgtggtttactgcagggcggaggccgggggcagatctcagatctccgtcaagtaccagctgctctacgtggcggttcccagtggccctccctcaacaaccatcttggcttcttcaaacaaagtgaaaagtggggacgacatcagtgtgctctgcactgtcctgggggagcccgatgtggaggtggagttcacctggatcttcccagggcagaagcagaaattgttacagccagccaaaatttatttgtcaaacatagatagctttgaatttagagaagaagagcttacctctcactctagctctgtgagcccatgaccaactctgctgttgcagtggaaattcctgggaaatataaactaagaggagatacgacctttactgtgctgtcacagggctgtaaaaatgaagaatttgaagaatgaagtaggtcagaggatgcaattcttgagtattccagcattatttatttgatcagagtaaaatacacttcccatcactacaaactgagcacaactacagttgtctacacattcatatttttgacgtgccaacattttgcattctacatgaaacatttggtttaaacaaaatcttaagaattctctattttgtttcccatcttccctcctgttctctcccatcctccaaagatgttttatattaactgctatgagatttatttgccggtcacgtaatacggaggacagcagggaa

SEQ ID NO: 373962 - DNA, 658 bp, Homo sapiens
gcctgtctgtccgggttcaagtagacaacatcgaagtagctgggagaaggtacaaagagttctcctttctctgtaaaaaagatgtaggtggagcccgatgtggaggtggagttcacctggatcttcccagggcagaaggatgaaaggcctgtgacgatccaagacacttggaggttgatccacagaggactgggacacaccacgagaatctcccagagtgtcattacagtggaagacttcgagacgattgatgcaggatattacatttgcactgctcagaatcttcaaggacagaccacagtagctaccactgttgagttttcctgacttggaaaaggaaatgtaatgaacttatggaaagcccatttgtgtacacagtcagctttggggttccttttattagtgctttgccagaggctgatgtcaagcaccacaccccaaccccagcgtctcgtgagtccgacccagacatccaaactaaaaggaagtcatccagtctattcacagaagtgttaacttttctaacagaaagcatgattttgattgcttacctacatacgtgttcctagtttttatacatgtgtaaacaattttatataatcaatcatttctattaaatgagcacgtttttgtaaaaaataaaaagtgggataagtgt

SEQ ID NO: 373963 - DNA, 1673 bp, Homo sapiens
cccgtcctcccacccccaccagcagttacagggctgggtgcggagaccaactctggccagacacagaggagcagcaagaacccggggcaacggtcctaaaccgaatcctcccgcttcggcgtcccaggagcccgcccctcgcccgccgcctcccctgcgtccccgccccgcgcagccgccgcgctcctgcgctccgaggtccgaggttcccgagatgaaggtctggctgctgcttggtcttctgctggtgcacgaagcgctggaggatgttactggccaacaccttcccaagaacaagcgtccaaaagaaccaggagagaatagaatcaaacctaccaacaagaaggtgaagcccaaaattcctaaaatgaaggacagggactcagccaattcagcaccaaagacgcagtctatcatgatgcaagtgctggataaaggtcgcttccagaaacccgccgctaccctgagtctgctggcggggcaaactgtagagcttcgatgtaaagggagtagaattgggtggagctaccctgcgtatctggacacctttaaggattctcgcctcagcgtcaagcagaatgagcgctacggccagttgactctggtcaactccacctcggcagacacaggtgaattcagctgctgggtgcagctctgcagcggctacatctgcaggaaggacgaggccaaaacgggctccacctacatcttttttacagagaaaggagaactctttgtaccttctcccagctacttcgatgttgtctacttgaacccggacagacaggctgtggttccttgtcgggtgaccgtgctgtcggccaaagtcacgctccacagggaattcccagccaaggagatcccagccaatggaacggacattgtttatgacatgaagcggggctttgtgtatctgcaacctcattccgagcaccagggtgtggtttactgcagggcggaggccgggggcagatctcagatctccgtcaagtaccagctgctctacgtggcggttcccagtggccctccctcaacaaccatcttggcttcttcaaacaaagtgaaaagtggggacgacatcagtgtgctctgcactgtcctgggggagcccgatgtggaggtggagttcacctggatcttcccagggcagaaggatgaaaggcctgtgacgatccaagacacttggaggttgatccacagaggactgggacacaccacgagaatctcccagagtgtcattacagtggaagacttcgagacgattgatgcaggatattacatttgcactgctcagaatcttcaaggacagaccacagtagctaccactgttgagttttcctgacttggaaaaggaaatgtaatgaacttatggaaagcccatttgtgtacacagtcagctttggggttccttttattagtgctttgccagaggctgatgtcaagcaccacaccccaaccccagcgtctcgtgagtccgacccagacatccaaactaaaaggaagtcatccagtctattcacagaagtgttaacttttctaacagaaagcatgattttgattgcttacctacatacgtgttcctagtttttatacatgtgtaaacaattttatataatcaatcatttctattaaatgagcacgtttttgtaaaaaataaaaagtgggataagtgt

SEQ ID NO: 373964 - DNA, 768 bp, Homo sapiens
taccctataaggtcatcaaaaacttagagttataaaacttgtatgtgattttgcagacttttccgtgtaagtctgaatcctgaaactgatttccattgcattgtaacctccctaacttagatttcaaggaatcttgtgctttaaatcagggtttctcaactcaatcactattgatatttttgtgctagataattcttcgttgtggatgctattctgtgtattataggatatttagtagcatccctggcctctaccaactagatgtccagtagcagtcctctcctagttgtgacaaccaaaaaatgtctctagccattactaaatgtcccctgcaggcagcacggtcacttatgactgggtaccactggtttaaacggtctcaagatgttatcaatgcttccctcttaacggtaggcaggataatggcctctcaaagatattcacacccaattcccagagcctctgaatatgttgccttatatggcaacatgcctgtaatcccagcactttgggaggccaaggcgggtggatcacttgaggtcgggagttgaagaccagcctggcctacatggtgaaaccccatctctgctaaaaatacaaaaatccaggcatggtagcacgcgcctataatcccagagggaggagaattgcttgaacccaggaggcagaggttgaagcgagccaagattgcacgactgcactccagcctggaagacagcgcaagactctatctccaaaaaaaagaaaaagacaacagagaattgaggg

SEQ ID NO: 373965 - DNA, 5665 bp, Homo sapiens
agtccggcctcagcctggagcccgcgcgccttgggcggatgcacggactgagaggcgcttggctgggctctcagcccgccactgccacccggccccgtgcgctcattggtcgggatgtgtcggctcagcagcctccaacttctcccgaatcccactgattttaggtgatgggcaagtcagaaagtcagatggatataactgatatcaacactccaaagccaaagaagaaacagcgatggactccactggagatcagcctctcggtccttgtcctgctcctcaccatcatagctgtgacaatgatcgcactctatgcaacctacgatgatggtatttgcaagtcatcagactgcataaaatcagctgctcgactgatccaaaacatggatgccaccactgagccttgtacagactttttcaaatatgcttgcggaggctggttgaaacgtaatgtcattcccgagaccagctcccgttacggcaactttgacattttaagagatgaactagaagtcgttttgaaagatgtccttcaagaacccaaaactgaagatatagtagcagtgcagaaagcaaaagcattgtacaggtcttgtataaatgaatctgctattgatagcagaggtggagaacctctactcaaactgttaccagacatatatgggtggccagtagcaacagaaaactgggagcaaaaatatggtgcttcttggacagctgaaaaagctattgcacaactgaattctaaatatgggaaaaaagtccttattaatttgtttgttggcactgatgataagaattctgtgaatcatgtaattcatattgaccaacctcgacttggcctcccttctagagattactatgaatgcactggaatctataaagaggcttgtacagcatatgtggattttatgatttctgtggccagattgattcgtcaggaagaaagattgcccatcgatgaaaaccagcttgctttggaaatgaataaagttatggaattggaaaaagaaattgccaatgctacggctaaacctgaagatcgaaatgatccaatgcttctgtataacaagatgacattggcccagatccaaaataacttttcactagagatcaatgggaagccattcagctggttgaatttcacaaatgaaatcatgtcaactgtgaatattagtattacaaatgaggaagatgtggttgtttatgctccagaatatttaaccaaacttaagcccattcttaccaaatattctgccagagatcttcaaaatttaatgtcctggagattcataatggatcttgtaagcagcctcagccgaacctacaaggagtccagaaatgctttccgcaaggccctttatggtacaacctcagaaacagcaacttggagacgttgtgcaaactatgtcaatgggaatatggaaaatgctgtggggaggctttatgtggaagcagcatttgctggagagagtaaacatgtggtcgaggatttgattgcacagatccgagaagtttttattcagactttagatgacctcacttggatggatgccgagacaaaaaagagagctgaagaaaaggccttagcaattaaagaaaggatcggctatcctgatgacattgtttcaaatgataacaaactgaataatgagtacctcgagttgaactacaaagaagatgaatacttcgagaacataattcaaaatttgaaattcagccaaagtaaacaactgaagaagctccgagaaaaggtggacaaagatgagtggataagtggagcagctgtagtcaatgcattttactcttcaggaagaaatcagatagtcttcccagccggcattctgcagccccccttctttagtgcccagcagtccaactcattgaactatgggggcatcggcatggtcataggacacgaaatcacccatggcttcgatgacaatggcagaaactttaacaaagatggagacctcgttgactggtggactcaacagtctgcaagtaactttaaggagcaatcccagtgcatggtgtatcagtatggaaacttttcctgggacctggcaggtggacagcaccttaatggaattaatacactgggagaaaacattgctgataatggaggtcttggtcaagcatacagagcctatcagaattatattaaaaagaatggcgaagaaaaattacttcctggacttgacctaaatcacaaacaactatttttcttgaactttgcacaggtgtggtgtggaacctataggccagagtatgcggttaactccattaaaacagatgtgcacagtccaggcaatttcaggattattgggactttgcagaactctgcagagttttcagaagcctttcactgccgcaagaattcatacatgaatccagaaaagaagtgccgggtttggtgatcttcaaaagaagcattgcagcccttggctagacttgccaacaccacagaaatggggaattctctaatcgaaagaaaatgggccctaggggtcactgtactgacttgagggtgattaacagagagggcaccatcacaatacagataacattaggttgtcctagaaagggtgtggagggaggaagggggtctaaggtctatcaagtcaatcatttctcactgtgtacataatgcttaatttctaaagataatattactgtttatttctgtttctcatatggtctaccagtttgctgatgtccctagaaaacaatgcaaaacctttgaggtagaccaggatttctaatcaaaagggaaaagaagatgttgaagaatacagttaggcaccagaagaacagtaggtgacactatagtttaaaacacattgcctaactactagtttttacttttatttgcaacatttacagtccttcaaaatccttccaaagaattcttatacacattggggccttggagcttacatagttttaaactcatttttgccatacatcagttattcattctgtgatcatttattttaagcactcttaaagcaaaaaatgaatgtctaaaattgttttttgttgtacctgctttgactgatgctgagattcttcaggcttcctgcaattttctaagcaatttcttgctctatctctcaaaacttggtatttttcagagatttatataaatgtaaaaataataatttttatatttaattattaactacatttatgagtaactattattataggtaatcaatgaatattgaagtttcagcttaaaataaacagttgtgaaccaagatctataaagcgatatacagatgaaaatttgagactatttaaacttataaatcatattgatgaaaagatttaagcacaaactttagggtaaaaattgccattggacagttgtctagagatatatatacttgtggttttcaaattggactttcaaaattaaatctgtccctgagagtgtctctgataaaagggcaaatctgcacctatgtagctctgcatctcctgtcttttcaggtttgtcatcagatggaaatattttgataataaattgaaattgtgaactcattgctccctaagactgtgacaactgtctaactttagaagtgcatttctgaatagaaatgggaggcctctgatggaccttctagaattataagtcacaaagagttctggaaaagaactgtttactgcttgataggaattcatcttttgaggcttctgttcctctcttttcctgttgtattgactattttcgttcattacttgattaagattttacaaaagaggagcacttccaaaattcttatttttcctaacaaaagatgaaagcagggaatttctatctaaatgatgagtattagttccctgtctcttgaaaaatgcccatttgcctttaaaaaaaaaagttacagaaatactataacatatgtacataaattgcataaagcataagtatacagttcaataaacttaactttaactgaacaatggccctgtagccagcacctgtaagaaacagagcagtaccagcgctctaaaagcacctccttgtcactttattactcccagaacaacaactatcctgacttctaatatcattcactagctttgcctggttttgtcttttatgtagatagaatcaatcagtatgtattcttttgtgcctggcttctttctctcagccttacatttgtgagattcctctgtattgtgctgattgtggatcttttcattctcattgcagaataatgttctattgtgggacttattacaatttgttcatcctattgttgatgggcacttgagaactttccattttggcgctattacaaatagtgcaactatgaatgtactgcatgttaccatcttacttgagcctttaatggacttatttcttcaaatccttccaaaaattattataagcattgaaattatagtttcaagccaactgtggatacccttaccctttcctcctttatcacaaccaccgttacaagtatacttatatttccctaaaatacatttaaaacttacctaagtgacatttgtagttggagtaataggagcttccagctctaataaaacagctgtctctaacttattttatttccatcatgtcagagcaggtgaagagccagaagtgaagagtgactagtacaaattataaaaagccactagactcttcactgttagctttttaaaacattaggctcccatccctatggaggaacaactctccagtgcctggatcccctctgtctacaaatataagattttctgggcctaaaggatagatcaaagtcaaaaatagcaatgcctccctatccctcacacatccagacatcatgaattttacatggtactcttgttgagttctatagagccttctgatgtctctaaagcactaccgattctttggagttgtcacatcagataagacatatctctaattccatccataaatccagttctactatggctgagttctggtcaaagaaagaaagtttagaagctgagacacaaagggttgggagctgatgaaactcacaaatgatggtaggaagaagctctcgacaatacccgttggcaaggagtctgcctccatgctgcagtgttcgagtggattgtaggtgcaagatggaaaggattgtaggtgcaagctgtccagagaaaagagtccttgttccagccctattctgccactcctgacagggtgaccttgggtatttgcaatattcctttgggcctctgcttctctcacctaaaaaaagagaattagattatattggtggttctcagcaagagaaggagtatgtgtccaatgctgccttcccatgaatctgtctcccagttatgaatcagtgggcaggataaactgaaaactcccatttaagtgtctgaatcgagtgagacaaaattttagtccaaataacaagtaccaaagttttatcaagtttgggtctgtgctgctgttactgttaaccatttaagtggggcaaaaccttgctaattttctcaaaagcatttatcattcttgttgccacagctggagctctcaaactaaaagacatttgttattttggaaagaagaaagactctattctcaaagtttcctaatcagaaatttttatcagtttccagtctcaaaaatacaaaataaaaacaaacgtttttaatacta

SEQ ID NO: 373966 - DNA, 660 bp, Homo sapiens
cgccacgcagttttatccggtaaagcgaatgattggggccttggagcttacatagttttaaactcatttttgccatacatcagttattcattctgtgatcatttattttaagcactcttaaagcaaaaaatgaatgtctaaaattgttttttgttgtacctgctttgactgatgctgagattcttcaggcttcctgcaattttctaagcaatttcttgctctatctctcaaaacttggtatttttcagagatttatataaatgtaaaaataataatttttatatttaattattaactacatttatgagtaactattattataggtaatcaatgaatattgaagtttcagcttaaaataaacagttgtgaaccaagatctataaagcgatatacagatgaaaatttgagactatttaaacttataaatcatattgatgaaaagatttaagcacaaactttagggtaaaaattgccattggacagttgtctagagatatatatacttgtggttttcaaattggactttcaaaattaaatctgtccctgagagtgtctctgataaaagggcaaatctgcacctatgtagctctgcatctcctgtcttttcaggtttgtcatcagatggaaatattttgataataaattgaaattgtgaactca

SEQ ID NO: 373967 - DNA, 5959 bp, Homo sapiens
gctgagggagaaaggtccaaagggcgcgagcgcccagggcgctgggagcccgtgggacgggcacggggagggcagagccagccgaggggagcggctgccgggaggtgcgctgagcagggtccgcagctaaggtccagcgcgatccgagcgcccaggaccctgcggccgtggaggaggcgtgccctgggaaggagccgctactgggacctgaagagtgaggggagggagaggggcccagagggtgacctggaggagggctctggaagtcacgtcaggttggctcttcaggttcatttccatagttccctgcggcctctgccttggggagttatgttttgttaccgagatccgcgctaccagattgcaccggggctgatttgggggctgggaatttgccattctgctgtacagacactgatttttttttcttctttttaaaaagcaaggtttgattttaggtgatgggcaagtcagaaagtcagatggatataactgatatcaacactccaaagccaaagaagaaacagcgatggactccactggagatcagcctctcggtccttgtcctgctcctcaccatcatagctgtgacaatgatcgcactctatgcaacctacgatgatggtatttgcaagtcatcagactgcataaaatcagctgctcgactgatccaaaacatggatgccaccactgagccttgtacagactttttcaaatatgcttgcggaggctggttgaaacgtaatgtcattcccgagaccagctcccgttacggcaactttgacattttaagagatgaactagaagtcgttttgaaagatgtccttcaagaacccaaaactgaagatatagtagcagtgcagaaagcaaaagcattgtacaggtcttgtataaatgaatctgctattgatagcagaggtggagaacctctactcaaactgttaccagacatatatgggtggccagtagcaacagaaaactgggagcaaaaatatggtgcttcttggacagctgaaaaagctattgcacaactgaattctaaatatgggaaaaaagtccttattaatttgtttgttggcactgatgataagaattctgtgaatcatgtaattcatattgaccaacctcgacttggcctcccttctagagattactatgaatgcactggaatctataaagaggcttgtacagcatatgtggattttatgatttctgtggccagattgattcgtcaggaagaaagattgcccatcgatgaaaaccagcttgctttggaaatgaataaagttatggaattggaaaaagaaattgccaatgctacggctaaacctgaagatcgaaatgatccaatgcttctgtataacaagatgacattggcccagatccaaaataacttttcactagagatcaatgggaagccattcagctggttgaatttcacaaatgaaatcatgtcaactgtgaatattagtattacaaatgaggaagatgtggttgtttatgctccagaatatttaaccaaacttaagcccattcttaccaaatattctgccagagatcttcaaaatttaatgtcctggagattcataatggatcttgtaagcagcctcagccgaacctacaaggagtccagaaatgctttccgcaaggccctttatggtacaacctcagaaacagcaacttggagacgttgtgcaaactatgtcaatgggaatatggaaaatgctgtggggaggctttatgtggaagcagcatttgctggagagagtaaacatgtggtcgaggatttgattgcacagatccgagaagtttttattcagactttagatgacctcacttggatggatgccgagacaaaaaagagagctgaagaaaaggccttagcaattaaagaaaggatcggctatcctgatgacattgtttcaaatgataacaaactgaataatgagtacctcgagttgaactacaaagaagatgaatacttcgagaacataattcaaaatttgaaattcagccaaagtaaacaactgaagaagctccgagaaaaggtggacaaagatgagtggataagtggagcagctgtagtcaatgcattttactcttcaggaagaaatcagatagtcttcccagccggcattctgcagccccccttctttagtgcccagcagtccaactcattgaactatgggggcatcggcatggtcataggacacgaaatcacccatggcttcgatgacaatggcagaaactttaacaaagatggagacctcgttgactggtggactcaacagtctgcaagtaactttaaggagcaatcccagtgcatggtgtatcagtatggaaacttttcctgggacctggcaggtggacagcaccttaatggaattaatacactgggagaaaacattgctgataatggaggtcttggtcaagcatacagagcctatcagaattatattaaaaagaatggcgaagaaaaattacttcctggacttgacctaaatcacaaacaactatttttcttgaactttgcacaggtgtggtgtggaacctataggccagagtatgcggttaactccattaaaacagatgtgcacagtccaggcaatttcaggattattgggactttgcagaactctgcagagttttcagaagcctttcactgccgcaagaattcatacatgaatccagaaaagaagtgccgggtttggtgatcttcaaaagaagcattgcagcccttggctagacttgccaacaccacagaaatggggaattctctaatcgaaagaaaatgggccctaggggtcactgtactgacttgagggtgattaacagagagggcaccatcacaatacagataacattaggttgtcctagaaagggtgtggagggaggaagggggtctaaggtctatcaagtcaatcatttctcactgtgtacataatgcttaatttctaaagataatattactgtttatttctgtttctcatatggtctaccagtttgctgatgtccctagaaaacaatgcaaaacctttgaggtagaccaggatttctaatcaaaagggaaaagaagatgttgaagaatacagttaggcaccagaagaacagtaggtgacactatagtttaaaacacattgcctaactactagtttttacttttatttgcaacatttacagtccttcaaaatccttccaaagaattcttatacacattggggccttggagcttacatagttttaaactcatttttgccatacatcagttattcattctgtgatcatttattttaagcactcttaaagcaaaaaatgaatgtctaaaattgttttttgttgtacctgctttgactgatgctgagattcttcaggcttcctgcaattttctaagcaatttcttgctctatctctcaaaacttggtatttttcagagatttatataaatgtaaaaataataatttttatatttaattattaactacatttatgagtaactattattataggtaatcaatgaatattgaagtttcagcttaaaataaacagttgtgaaccaagatctataaagcgatatacagatgaaaatttgagactatttaaacttataaatcatattgatgaaaagatttaagcacaaactttagggtaaaaattgccattggacagttgtctagagatatatatacttgtggttttcaaattggactttcaaaattaaatctgtccctgagagtgtctctgataaaagggcaaatctgcacctatgtagctctgcatctcctgtcttttcaggtttgtcatcagatggaaatattttgataataaattgaaattgtgaactcattgctccctaagactgtgacaactgtctaactttagaagtgcatttctgaatagaaatgggaggcctctgatggaccttctagaattataagtcacaaagagttctggaaaagaactgtttactgcttgataggaattcatcttttgaggcttctgttcctctcttttcctgttgtattgactattttcgttcattacttgattaagattttacaaaagaggagcacttccaaaattcttatttttcctaacaaaagatgaaagcagggaatttctatctaaatgatgagtattagttccctgtctcttgaaaaatgcccatttgcctttaaaaaaaaaagttacagaaatactataacatatgtacataaattgcataaagcataagtatacagttcaataaacttaactttaactgaacaatggccctgtagccagcacctgtaagaaacagagcagtaccagcgctctaaaagcacctccttgtcactttattactcccagaacaacaactatcctgacttctaatatcattcactagctttgcctggttttgtcttttatgtagatagaatcaatcagtatgtattcttttgtgcctggcttctttctctcagccttacatttgtgagattcctctgtattgtgctgattgtggatcttttcattctcattgcagaataatgttctattgtgggacttattacaatttgttcatcctattgttgatgggcacttgagaactttccattttggcgctattacaaatagtgcaactatgaatgtactgcatgttaccatcttacttgagcctttaatggacttatttcttcaaatccttccaaaaattattataagcattgaaattatagtttcaagccaactgtggatacccttaccctttcctcctttatcacaaccaccgttacaagtatacttatatttccctaaaatacatttaaaacttacctaagtgacatttgtagttggagtaataggagcttccagctctaataaaacagctgtctctaacttattttatttccatcatgtcagagcaggtgaagagccagaagtgaagagtgactagtacaaattataaaaagccactagactcttcactgttagctttttaaaacattaggctcccatccctatggaggaacaactctccagtgcctggatcccctctgtctacaaatataagattttctgggcctaaaggatagatcaaagtcaaaaatagcaatgcctccctatccctcacacatccagacatcatgaattttacatggtactcttgttgagttctatagagccttctgatgtctctaaagcactaccgattctttggagttgtcacatcagataagacatatctctaattccatccataaatccagttctactatggctgagttctggtcaaagaaagaaagtttagaagctgagacacaaagggttgggagctgatgaaactcacaaatgatggtaggaagaagctctcgacaatacccgttggcaaggagtctgcctccatgctgcagtgttcgagtggattgtaggtgcaagatggaaaggattgtaggtgcaagctgtccagagaaaagagtccttgttccagccctattctgccactcctgacagggtgaccttgggtatttgcaatattcctttgggcctctgcttctctcacctaaaaaaagagaattagattatattggtggttctcagcaagagaaggagtatgtgtccaatgctgccttcccatgaatctgtctcccagttatgaatcagtgggcaggataaactgaaaactcccatttaagtgtctgaatcgagtgagacaaaattttagtccaaataacaagtaccaaagttttatcaagtttgggtctgtgctgctgttactgttaaccatttaagtggggcaaaaccttgctaattttctcaaaagcatttatcattcttgttgccacagctggagctctcaaactaaaagacatttgttattttggaaagaagaaagactctattctcaaagtttcctaatcagaaatttttatcagtttccagtctcaaaaatacaaaataaaaacaaacgtttttaatacta

SEQ ID NO: 373968 - DNA, 5722 bp, Homo sapiens
gctgagggagaaaggtccaaagggcgcgagcgcccagggcgctgggagcccgtgggacgggcacggggagggcagagccagccgaggggagcggctgccgggaggtgcgctgagcagggtccgcagctaaggtccagcgcgatccgagcgcccaggaccctgcggccgtggaggaggcgtgccctgggaaggagccgctactgggacctgaagaattttaggtgatgggcaagtcagaaagtcagatggatataactgatatcaacactccaaagccaaagaagaaacagcgatggactccactggagatcagcctctcggtccttgtcctgctcctcaccatcatagctgtgacaatgatcgcactctatgcaacctacgatgatggtatttgcaagtcatcagactgcataaaatcagctgctcgactgatccaaaacatggatgccaccactgagccttgtacagactttttcaaatatgcttgcggaggctggttgaaacgtaatgtcattcccgagaccagctcccgttacggcaactttgacattttaagagatgaactagaagtcgttttgaaagatgtccttcaagaacccaaaactgaagatatagtagcagtgcagaaagcaaaagcattgtacaggtcttgtataaatgaatctgctattgatagcagaggtggagaacctctactcaaactgttaccagacatatatgggtggccagtagcaacagaaaactgggagcaaaaatatggtgcttcttggacagctgaaaaagctattgcacaactgaattctaaatatgggaaaaaagtccttattaatttgtttgttggcactgatgataagaattctgtgaatcatgtaattcatattgaccaacctcgacttggcctcccttctagagattactatgaatgcactggaatctataaagaggcttgtacagcatatgtggattttatgatttctgtggccagattgattcgtcaggaagaaagattgcccatcgatgaaaaccagcttgctttggaaatgaataaagttatggaattggaaaaagaaattgccaatgctacggctaaacctgaagatcgaaatgatccaatgcttctgtataacaagatgacattggcccagatccaaaataacttttcactagagatcaatgggaagccattcagctggttgaatttcacaaatgaaatcatgtcaactgtgaatattagtattacaaatgaggaagatgtggttgtttatgctccagaatatttaaccaaacttaagcccattcttaccaaatattctgccagagatcttcaaaatttaatgtcctggagattcataatggatcttgtaagcagcctcagccgaacctacaaggagtccagaaatgctttccgcaaggccctttatggtacaacctcagaaacagcaacttggagacgttgtgcaaactatgtcaatgggaatatggaaaatgctgtggggaggctttatgtggaagcagcatttgctggagagagtaaacatgtggtcgaggatttgattgcacagatccgagaagtttttattcagactttagatgacctcacttggatggatgccgagacaaaaaagagagctgaagaaaaggccttagcaattaaagaaaggatcggctatcctgatgacattgtttcaaatgataacaaactgaataatgagtacctcgagttgaactacaaagaagatgaatacttcgagaacataattcaaaatttgaaattcagccaaagtaaacaactgaagaagctccgagaaaaggtggacaaagatgagtggataagtggagcagctgtagtcaatgcattttactcttcaggaagaaatcagatagtcttcccagccggcattctgcagccccccttctttagtgcccagcagtccaactcattgaactatgggggcatcggcatggtcataggacacgaaatcacccatggcttcgatgacaatggcagaaactttaacaaagatggagacctcgttgactggtggactcaacagtctgcaagtaactttaaggagcaatcccagtgcatggtgtatcagtatggaaacttttcctgggacctggcaggtggacagcaccttaatggaattaatacactgggagaaaacattgctgataatggaggtcttggtcaagcatacagagcctatcagaattatattaaaaagaatggcgaagaaaaattacttcctggacttgacctaaatcacaaacaactatttttcttgaactttgcacaggtgtggtgtggaacctataggccagagtatgcggttaactccattaaaacagatgtgcacagtccaggcaatttcaggattattgggactttgcagaactctgcagagttttcagaagcctttcactgccgcaagaattcatacatgaatccagaaaagaagtgccgggtttggtgatcttcaaaagaagcattgcagcccttggctagacttgccaacaccacagaaatggggaattctctaatcgaaagaaaatgggccctaggggtcactgtactgacttgagggtgattaacagagagggcaccatcacaatacagataacattaggttgtcctagaaagggtgtggagggaggaagggggtctaaggtctatcaagtcaatcatttctcactgtgtacataatgcttaatttctaaagataatattactgtttatttctgtttctcatatggtctaccagtttgctgatgtccctagaaaacaatgcaaaacctttgaggtagaccaggatttctaatcaaaagggaaaagaagatgttgaagaatacagttaggcaccagaagaacagtaggtgacactatagtttaaaacacattgcctaactactagtttttacttttatttgcaacatttacagtccttcaaaatccttccaaagaattcttatacacattggggccttggagcttacatagttttaaactcatttttgccatacatcagttattcattctgtgatcatttattttaagcactcttaaagcaaaaaatgaatgtctaaaattgttttttgttgtacctgctttgactgatgctgagattcttcaggcttcctgcaattttctaagcaatttcttgctctatctctcaaaacttggtatttttcagagatttatataaatgtaaaaataataatttttatatttaattattaactacatttatgagtaactattattataggtaatcaatgaatattgaagtttcagcttaaaataaacagttgtgaaccaagatctataaagcgatatacagatgaaaatttgagactatttaaacttataaatcatattgatgaaaagatttaagcacaaactttagggtaaaaattgccattggacagttgtctagagatatatatacttgtggttttcaaattggactttcaaaattaaatctgtccctgagagtgtctctgataaaagggcaaatctgcacctatgtagctctgcatctcctgtcttttcaggtttgtcatcagatggaaatattttgataataaattgaaattgtgaactcattgctccctaagactgtgacaactgtctaactttagaagtgcatttctgaatagaaatgggaggcctctgatggaccttctagaattataagtcacaaagagttctggaaaagaactgtttactgcttgataggaattcatcttttgaggcttctgttcctctcttttcctgttgtattgactattttcgttcattacttgattaagattttacaaaagaggagcacttccaaaattcttatttttcctaacaaaagatgaaagcagggaatttctatctaaatgatgagtattagttccctgtctcttgaaaaatgcccatttgcctttaaaaaaaaaagttacagaaatactataacatatgtacataaattgcataaagcataagtatacagttcaataaacttaactttaactgaacaatggccctgtagccagcacctgtaagaaacagagcagtaccagcgctctaaaagcacctccttgtcactttattactcccagaacaacaactatcctgacttctaatatcattcactagctttgcctggttttgtcttttatgtagatagaatcaatcagtatgtattcttttgtgcctggcttctttctctcagccttacatttgtgagattcctctgtattgtgctgattgtggatcttttcattctcattgcagaataatgttctattgtgggacttattacaatttgttcatcctattgttgatgggcacttgagaactttccattttggcgctattacaaatagtgcaactatgaatgtactgcatgttaccatcttacttgagcctttaatggacttatttcttcaaatccttccaaaaattattataagcattgaaattatagtttcaagccaactgtggatacccttaccctttcctcctttatcacaaccaccgttacaagtatacttatatttccctaaaatacatttaaaacttacctaagtgacatttgtagttggagtaataggagcttccagctctaataaaacagctgtctctaacttattttatttccatcatgtcagagcaggtgaagagccagaagtgaagagtgactagtacaaattataaaaagccactagactcttcactgttagctttttaaaacattaggctcccatccctatggaggaacaactctccagtgcctggatcccctctgtctacaaatataagattttctgggcctaaaggatagatcaaagtcaaaaatagcaatgcctccctatccctcacacatccagacatcatgaattttacatggtactcttgttgagttctatagagccttctgatgtctctaaagcactaccgattctttggagttgtcacatcagataagacatatctctaattccatccataaatccagttctactatggctgagttctggtcaaagaaagaaagtttagaagctgagacacaaagggttgggagctgatgaaactcacaaatgatggtaggaagaagctctcgacaatacccgttggcaaggagtctgcctccatgctgcagtgttcgagtggattgtaggtgcaagatggaaaggattgtaggtgcaagctgtccagagaaaagagtccttgttccagccctattctgccactcctgacagggtgaccttgggtatttgcaatattcctttgggcctctgcttctctcacctaaaaaaagagaattagattatattggtggttctcagcaagagaaggagtatgtgtccaatgctgccttcccatgaatctgtctcccagttatgaatcagtgggcaggataaactgaaaactcccatttaagtgtctgaatcgagtgagacaaaattttagtccaaataacaagtaccaaagttttatcaagtttgggtctgtgctgctgttactgttaaccatttaagtggggcaaaaccttgctaattttctcaaaagcatttatcattcttgttgccacagctggagctctcaaactaaaagacatttgttattttggaaagaagaaagactctattctcaaagtttcctaatcagaaatttttatcagtttccagtctcaaaaatacaaaataaaaacaaacgtttttaatacta

SEQ ID NO: 373969 - DNA, 5776 bp, Homo sapiens
gaccattttcagaatgttgtctaaccagttaatagatactggtatcagtagtagtagtaattttgaactgtaaaaataaaggttgtttttatgactaaaataaactacttcatgtgttcattcgttttgctgtttatctatattaatatttcaaattattgcttagtcaaaacctcaaggtattagtcactggtttttgagcttataaaggaagccactggagcaagatataaaattaaccattgatgttagtccagagttcaaaaggattttaggtgatgggcaagtcagaaagtcagatggatataactgatatcaacactccaaagccaaagaagaaacagcgatggactccactggagatcagcctctcggtccttgtcctgctcctcaccatcatagctgtgacaatgatcgcactctatgcaacctacgatgatggtatttgcaagtcatcagactgcataaaatcagctgctcgactgatccaaaacatggatgccaccactgagccttgtacagactttttcaaatatgcttgcggaggctggttgaaacgtaatgtcattcccgagaccagctcccgttacggcaactttgacattttaagagatgaactagaagtcgttttgaaagatgtccttcaagaacccaaaactgaagatatagtagcagtgcagaaagcaaaagcattgtacaggtcttgtataaatgaatctgctattgatagcagaggtggagaacctctactcaaactgttaccagacatatatgggtggccagtagcaacagaaaactgggagcaaaaatatggtgcttcttggacagctgaaaaagctattgcacaactgaattctaaatatgggaaaaaagtccttattaatttgtttgttggcactgatgataagaattctgtgaatcatgtaattcatattgaccaacctcgacttggcctcccttctagagattactatgaatgcactggaatctataaagaggcttgtacagcatatgtggattttatgatttctgtggccagattgattcgtcaggaagaaagattgcccatcgatgaaaaccagcttgctttggaaatgaataaagttatggaattggaaaaagaaattgccaatgctacggctaaacctgaagatcgaaatgatccaatgcttctgtataacaagatgacattggcccagatccaaaataacttttcactagagatcaatgggaagccattcagctggttgaatttcacaaatgaaatcatgtcaactgtgaatattagtattacaaatgaggaagatgtggttgtttatgctccagaatatttaaccaaacttaagcccattcttaccaaatattctgccagagatcttcaaaatttaatgtcctggagattcataatggatcttgtaagcagcctcagccgaacctacaaggagtccagaaatgctttccgcaaggccctttatggtacaacctcagaaacagcaacttggagacgttgtgcaaactatgtcaatgggaatatggaaaatgctgtggggaggctttatgtggaagcagcatttgctggagagagtaaacatgtggtcgaggatttgattgcacagatccgagaagtttttattcagactttagatgacctcacttggatggatgccgagacaaaaaagagagctgaagaaaaggccttagcaattaaagaaaggatcggctatcctgatgacattgtttcaaatgataacaaactgaataatgagtacctcgagttgaactacaaagaagatgaatacttcgagaacataattcaaaatttgaaattcagccaaagtaaacaactgaagaagctccgagaaaaggtggacaaagatgagtggataagtggagcagctgtagtcaatgcattttactcttcaggaagaaatcagatagtcttcccagccggcattctgcagccccccttctttagtgcccagcagtccaactcattgaactatgggggcatcggcatggtcataggacacgaaatcacccatggcttcgatgacaatggcagaaactttaacaaagatggagacctcgttgactggtggactcaacagtctgcaagtaactttaaggagcaatcccagtgcatggtgtatcagtatggaaacttttcctgggacctggcaggtggacagcaccttaatggaattaatacactgggagaaaacattgctgataatggaggtcttggtcaagcatacagagcctatcagaattatattaaaaagaatggcgaagaaaaattacttcctggacttgacctaaatcacaaacaactatttttcttgaactttgcacaggtgtggtgtggaacctataggccagagtatgcggttaactccattaaaacagatgtgcacagtccaggcaatttcaggattattgggactttgcagaactctgcagagttttcagaagcctttcactgccgcaagaattcatacatgaatccagaaaagaagtgccgggtttggtgatcttcaaaagaagcattgcagcccttggctagacttgccaacaccacagaaatggggaattctctaatcgaaagaaaatgggccctaggggtcactgtactgacttgagggtgattaacagagagggcaccatcacaatacagataacattaggttgtcctagaaagggtgtggagggaggaagggggtctaaggtctatcaagtcaatcatttctcactgtgtacataatgcttaatttctaaagataatattactgtttatttctgtttctcatatggtctaccagtttgctgatgtccctagaaaacaatgcaaaacctttgaggtagaccaggatttctaatcaaaagggaaaagaagatgttgaagaatacagttaggcaccagaagaacagtaggtgacactatagtttaaaacacattgcctaactactagtttttacttttatttgcaacatttacagtccttcaaaatccttccaaagaattcttatacacattggggccttggagcttacatagttttaaactcatttttgccatacatcagttattcattctgtgatcatttattttaagcactcttaaagcaaaaaatgaatgtctaaaattgttttttgttgtacctgctttgactgatgctgagattcttcaggcttcctgcaattttctaagcaatttcttgctctatctctcaaaacttggtatttttcagagatttatataaatgtaaaaataataatttttatatttaattattaactacatttatgagtaactattattataggtaatcaatgaatattgaagtttcagcttaaaataaacagttgtgaaccaagatctataaagcgatatacagatgaaaatttgagactatttaaacttataaatcatattgatgaaaagatttaagcacaaactttagggtaaaaattgccattggacagttgtctagagatatatatacttgtggttttcaaattggactttcaaaattaaatctgtccctgagagtgtctctgataaaagggcaaatctgcacctatgtagctctgcatctcctgtcttttcaggtttgtcatcagatggaaatattttgataataaattgaaattgtgaactcattgctccctaagactgtgacaactgtctaactttagaagtgcatttctgaatagaaatgggaggcctctgatggaccttctagaattataagtcacaaagagttctggaaaagaactgtttactgcttgataggaattcatcttttgaggcttctgttcctctcttttcctgttgtattgactattttcgttcattacttgattaagattttacaaaagaggagcacttccaaaattcttatttttcctaacaaaagatgaaagcagggaatttctatctaaatgatgagtattagttccctgtctcttgaaaaatgcccatttgcctttaaaaaaaaaagttacagaaatactataacatatgtacataaattgcataaagcataagtatacagttcaataaacttaactttaactgaacaatggccctgtagccagcacctgtaagaaacagagcagtaccagcgctctaaaagcacctccttgtcactttattactcccagaacaacaactatcctgacttctaatatcattcactagctttgcctggttttgtcttttatgtagatagaatcaatcagtatgtattcttttgtgcctggcttctttctctcagccttacatttgtgagattcctctgtattgtgctgattgtggatcttttcattctcattgcagaataatgttctattgtgggacttattacaatttgttcatcctattgttgatgggcacttgagaactttccattttggcgctattacaaatagtgcaactatgaatgtactgcatgttaccatcttacttgagcctttaatggacttatttcttcaaatccttccaaaaattattataagcattgaaattatagtttcaagccaactgtggatacccttaccctttcctcctttatcacaaccaccgttacaagtatacttatatttccctaaaatacatttaaaacttacctaagtgacatttgtagttggagtaataggagcttccagctctaataaaacagctgtctctaacttattttatttccatcatgtcagagcaggtgaagagccagaagtgaagagtgactagtacaaattataaaaagccactagactcttcactgttagctttttaaaacattaggctcccatccctatggaggaacaactctccagtgcctggatcccctctgtctacaaatataagattttctgggcctaaaggatagatcaaagtcaaaaatagcaatgcctccctatccctcacacatccagacatcatgaattttacatggtactcttgttgagttctatagagccttctgatgtctctaaagcactaccgattctttggagttgtcacatcagataagacatatctctaattccatccataaatccagttctactatggctgagttctggtcaaagaaagaaagtttagaagctgagacacaaagggttgggagctgatgaaactcacaaatgatggtaggaagaagctctcgacaatacccgttggcaaggagtctgcctccatgctgcagtgttcgagtggattgtaggtgcaagatggaaaggattgtaggtgcaagctgtccagagaaaagagtccttgttccagccctattctgccactcctgacagggtgaccttgggtatttgcaatattcctttgggcctctgcttctctcacctaaaaaaagagaattagattatattggtggttctcagcaagagaaggagtatgtgtccaatgctgccttcccatgaatctgtctcccagttatgaatcagtgggcaggataaactgaaaactcccatttaagtgtctgaatcgagtgagacaaaattttagtccaaataacaagtaccaaagttttatcaagtttgggtctgtgctgctgttactgttaaccatttaagtggggcaaaaccttgctaattttctcaaaagcatttatcattcttgttgccacagctggagctctcaaactaaaagacatttgttattttggaaagaagaaagactctattctcaaagtttcctaatcagaaatttttatcagtttccagtctcaaaaatacaaaataaaaacaaacgtttttaatacta

SEQ ID NO: 373970 - DNA, 5822 bp, Homo sapiens
gctgagggagaaaggtccaaagggcgcgagcgcccagggcgctgggagcccgtgggacgggcacggggagggcagagccagccgaggggagcggctgccgggaggtgcgctgagcagggtccgcagctaaggtccagcgcgatccgagcgcccaggaccctgcggccgtggaggaggcgtgccctgggaaggagccgctactgggacctgaagaattttaggtgatgggcaagtcagaaagtcagatggatataactgatatcaacactccaaagccaaagaagaaacagcgatggactccactggagatcagcctctcggtccttgtcctgctcctcaccatcatagctgtgacaatgatcgcactctatgcaacctacgatgatggtatttgcaagtcatcagactgcataaaatcagctgctcgactgatccaaaacatggatgccaccactgagccttgtacagactttttcaaatatgcttgcggaggctggttgaaacgtaatgtcattcccgagaccagctcccgttacggcaactttgacattttaagagatgaactagaagtcgttttgaaagatgtccttcaagaacccaaaactgaagatatagtagcagtgcagaaagcaaaagcattgtacaggtcttgtataaatgaatctgctattgatagcagaggtggagaacctctactcaaactgttaccagacatatatgggtggccagtagcaacagaaaactgggagcaaaaatatggtgcttcttggacagctgaaaaagctattgcacaactgaattctaaatatgggaaaaaagtccttattaatttgtttgttggcactgatgataagaattctgtgaatcatgtaattcatattgaccaacctcgacttggcctcccttctagagattactatgaatgcactggaatctataaagaggcttgtacagcatatgtggattttatgatttctgtggccagattgattcgtcaggaagaaagattgcccatcgatgaaaaccagcttgctttggaaatgaataaagttatggaattggaaaaagaaattgccaatgctacggctaaacctgaagatcgaaatgatccaatgcttctgtataacaagatgacattggcccagatccaaaataacttttcactagagatcaatgggaagccattcagctggttgaatttcacaaatgaaatcatgtcaactgtgaatattagtattacaaatgaggaagatgtggttgtttatgctccagaatatttaaccaaacttaagcccattcttaccaaatattctgccagagatcttcaaaatttaatgtcctggagattcataatggatcttgtaagcagcctcagccgaacctacaaggagtccagaaatgctttccgcaaggccctttatggtacaacctcagaaacagcaacttggagacgttgtgcaaactatgtcaatgggaatatggaaaatgctgtggggaggctttatgtggaagcagcatttgctggagagagtaaacatgtggtcgaggatttgattgcacagatccgagaagtttttattcagactttagatgacctcacttggatggatgccgagacaaaaaagagagctgaagaaaaggccttagcaattaaagaaaggatcggctatcctgatgacattgtttcaaatgataacaaactgaataatgagtacctcgagttgaactacaaagaagatgaatacttcgagaacataattcaaaatttgaaattcagccaaagtaaacaactgaagaagctccgagaaaaggtggacaaagatgagtggataagtggagcagctgtagtcaatgcattttactcttcaggaagaaatcagatagtcttcccagccggcattctgcagccccccttctttagtgcccagcagtccaactcattgaactatgggggcatcggcatggtcataggacacgaaatcacccatggcttcgatgacaatggcagaaactttaacaaagatggagacctcgttgactggtggactcaacagtctgcaagtaactttaaggagcaatcccagtgcatggtgtatcagtatggaaacttttcctgggacctggcaggtggacagcaccttaatggaattaatacactgggagaaaacattgctgataatggaggtcttggtcaagcatacagagcctatcagaattatattaaaaagaatggcgaagaaaaattacttcctggacttgacctaaatcacaaacaactatttttcttgaactttgcacaggtgtggtgtggaacctataggccagagtatgcggttaactccattaaaacagatgtgcacagtccaggcaatttcaggattattgggactttgcagaactctgcagagttttcagaagcctttcactgccgcaagaattcatacatgaatccagaaaagaagtgccgggtttggtgatcttcaaaagaagcattgcagcccttggctagacttgccaacaccacagaaatggggaattctctaatcgaaagaaaatgggccctaggggtcactgtactgacttgagggtgattaacagagagggcaccatcacaatacagataacattaggttgtcctagaaagggtgtggagggaggaagggggtctaaggtctatcaagtcaatcatttctcactgtgtacataatgcttaatttctaaagataatattactgtttatttctgtttctcatatggtctaccagtttgctgatgtccctagaaaacaatgcaaaacctttgaggtagaccaggatttctaatcaaaagggaaaagaagatgttgaagaatacagttaggcaccagaagaacagtaggtgacactatagtttaaaacacattgcctaactactagtttttacttttatttgcaacatttacagtccttcaaaatccttccaaagaattcttatacacattggggccttggagcttacatagttttaaactcatttttgccatacatcagttattcattctgtgatcatttattttaagcactcttaaagcaaaaaatgaatgtctaaaattgttttttgttgtacctgctttgactgatgctgagattcttcaggcttcctgcaattttctaagcaatttcttgctctatctctcaaaacttggtatttttcagagatttatataaatgtaaaaataataatttttatatttaattattaactacatttatgagtaactattattataggtaatcaatgaatattgaagtttcagcttaaaataaacagttgtgaaccaagatctataaagcgatatacagatgaaaatttgagactatttaaacttataaatcatattgatgaaaagatttaagcacaaactttagggtaaaaattgccattggacagttgtctagagatatatatacttgtggttttcaaattggactttcaaaattaaatctgtccctgagagtgtctctgataaaagggcaaatctgcacctatgtagctctgcatctcctgtcttttcaggtttgtcatcagatggaaatattttgataataaattgaaattgtgaactcattgctccctaagactgtgacaactgtctaactttagaagtgcatttctgaatagaaatgggaggcctctgatggaccttctagaattataagtcacaaagagttctggaaaagaactgtttactgcttgataggaattcatcttttgaggcttctgttcctctcttttcctgttgtattgactattttcgttcattacttgattaagattttacaaaagaggagcacttccaaaattcttatttttcctaacaaaagatgaaagcagggaatttctatctaaatgatgagtattagttccctgtctcttgaaaaatgcccatttgcctttaaaaaaaaaagttacagaaatactataacatatgtacataaattgcataaagcataagtatacagttcaataaacttaactttaactgaacaatggccctgtagccagcacctgtaagaaacagagcagtaccagcgctctaaaagcacctccttgtcactttattactcccagaacaacaactatcctgacttctaatatcattcactagctttgcctggttttgtcttttatgtagatagaatcaatcagtatgtattcttttgtgcctggcttctttctctcagccttacatttgtgagattcctctgtattgtgctgattgtggatcttttcattctcattgcagaataatgttctattgtgggacttattacaatttgttcatcctattgttgatgggcacttgagaactttccattttggcgctattacaaatagtgcaactatgaatgtactgcatgttaccatcttacttgagcctttaatggacttatttcttcaaatccttccaaaaattattataagcattgaaattatagtttcaagccaactgtggatacccttaccctttcctcctttatcacaaccaccgttacaagtatacttatatttccctaaaatacatttaaaacttacctaagtgacatttgtagttggagtaataggagcttccagctctaataaaacagctgtctctaacttattttatttccatcatgtcagagcaggtgaagagccagaagtgaagagtgactagtacaaattataaaaagccactagactcttcactgttagctttttaaaacattaggctcccatccctatggaggaacaactctccagtgcctggatcccctctgtctacaaatataagattttctgggcctaaaggatagatcaaagtcaaaaatagcaatgcctccctatccctcacacatccagacatcatgaattttacatggtactcttgttgagttctatagagccttctgatgtctctaaagcactaccgattctttggagttgtcacatcagataagacatatctctaattccatccataaatccagttctactatggctgagttctggtcaaagaaagaaagtttagaagctgagacacaaagggttgggagctgatgaaactcacaaatgatggtaggaagaagctctcgacaatacccgttggcaaggagtctgcctccatgctgcagtgttcgagtggattgtaggtgcaagatggaaaggattgtaggtgcaagctgtccagagaaaagagtccttgttccagccctattctgccactcctgacagggtgaccttgggtatttgcaatattcctttgggcctctgcttctctcacctaaaaaaagagaattagattatattggtggttctcagcaagagaaggagtatgtgtccaatgctgccttcccatgaatctgtctcccagttatgaatcagtgggcaggataaactgaaaactcccatttaagtgtctgaatcgagtgagacaaaattttagtccaaataacaagtaccaaagttttatcaagtttgggtctgtgctgctgttactgttaaccatttaagtggggcaaaaccttgctaattttctcaaaagcatttatcattcttgttgccacagctggagctctcaaactaaaagacatttgttattttggaaagaagaaagactctattctcaaagtttcctaatcagaaatttttatcagtttccagtctcaaaaatacaaaataaaaacaaacgtttttaatactattgcttttatgcctagtcaactctgttccaaactgccaactcctgtgtaaatctctaccccatttatttcttgaaaaatattaagattaaatggagcttt

SEQ ID NO: 373971 - DNA, 3086 bp, Homo sapiens
ggctaggtacgaggcgggtgttgaatcggccgaggatccgtcaagtcaatcatttctcactgtgtacataatgcttaatttctaaagataatattactgtttatttctgtttctcatatggtctaccagtttgctgatgtccctagaaaacaatgcaaaacctttgaggtagaccaggatttctaatcaaaagggaaaagaagatgttgaagaatacagttaggcaccagaagaacagtaggtgacactatagtttaaaacacattgcctaactactagtttttacttttatttgcaacatttacagtccttcaaaatccttccaaagaattcttatacacattggggccttggagcttacatagttttaaactcatttttgccatacatcagttattcattctgtgatcatttattttaagcactcttaaagcaaaaaatgaatgtctaaaattgttttttgttgtacctgctttgactgatgctgagattcttcaggcttcctgcaattttctaagcaatttcttgctctatctctcaaaacttggtatttttcagagatttatataaatgtaaaaataataatttttatatttaattattaactacatttatgagtaactattattataggtaatcaatgaatattgaagtttcagcttaaaataaacagttgtgaaccaagatctataaagcgatatacagatgaaaatttgagactatttaaacttataaatcatattgatgaaaagatttaagcacaaactttagggtaaaaattgccattggacagttgtctagagatatatatacttgtggttttcaaattggactttcaaaattaaatctgtccctgagagtgtctctgataaaagggcaaatctgcacctatgtagctctgcatctcctgtcttttcaggtttgtcatcagatggaaatattttgataataaattgaaattgtgaactcattgctccctaagactgtgacaactgtctaactttagaagtgcatttctgaatagaaatgggaggcctctgatggaccttctagaattataagtcacaaagagttctggaaaagaactgtttactgcttgataggaattcatcttttgaggcttctgttcctctcttttcctgttgtattgactattttcgttcattacttgattaagattttacaaaagaggagcacttccaaaattcttatttttcctaacaaaagatgaaagcagggaatttctatctaaatgatgagtattagttccctgtctcttgaaaaatgcccatttgcctttaaaaaaaaaagttacagaaatactataacatatgtacataaattgcataaagcataagtatacagttcaataaacttaactttaactgaacaatggccctgtagccagcacctgtaagaaacagagcagtaccagcgctctaaaagcacctccttgtcactttattactcccagaacaacaactatcctgacttctaatatcattcactagctttgcctggttttgtcttttatgtagatagaatcaatcagtatgtattcttttgtgcctggcttctttctctcagccttacatttgtgagattcctctgtattgtgctgattgtggatcttttcattctcattgcagaataatgttctattgtgggacttattacaatttgttcatcctattgttgatgggcacttgagaactttccattttggcgctattacaaatagtgcaactatgaatgtactgcatgttaccatcttacttgagcctttaatggacttatttcttcaaatccttccaaaaattattataagcattgaaattatagtttcaagccaactgtggatacccttaccctttcctcctttatcacaaccaccgttacaagtatacttatatttccctaaaatacatttaaaacttacctaagtgacatttgtagttggagtaataggagcttccagctctaataaaacagctgtctctaacttattttatttccatcatgtcagagcaggtgaagagccagaagtgaagagtgactagtacaaattataaaaagccactagactcttcactgttagctttttaaaacattaggctcccatccctatggaggaacaactctccagtgcctggatcccctctgtctacaaatataagattttctgggcctaaaggatagatcaaagtcaaaaatagcaatgcctccctatccctcacacatccagacatcatgaattttacatggtactcttgttgagttctatagagccttctgatgtctctaaagcactaccgattctttggagttgtcacatcagataagacatatctctaattccatccataaatccagttctactatggctgagttctggtcaaagaaagaaagtttagaagctgagacacaaagggttgggagctgatgaaactcacaaatgatggtaggaagaagctctcgacaatacccgttggcaaggagtctgcctccatgctgcagtgttcgagtggattgtaggtgcaagatggaaaggattgtaggtgcaagctgtccagagaaaagagtccttgttccagccctattctgccactcctgacagggtgaccttgggtatttgcaatattcctttgggcctctgcttctctcacctaaaaaaagagaattagattatattggtggttctcagcaagagaaggagtatgtgtccaatgctgccttcccatgaatctgtctcccagttatgaatcagtgggcaggataaactgaaaactcccatttaagtgtctgaatcgagtgagacaaaattttagtccaaataacaagtaccaaagttttatcaagtttgggtctgtgctgctgttactgttaaccatttaagtggggcaaaaccttgctaattttctcaaaagcatttatcattcttgttgccacagctggagctctcaaactaaaagacatttgttattttggaaagaagaaagactctattctcaaagtttcctaatcagaaatttttatcagtttccagtctcaaaaatacaaaataaaaacaaacgtttttaatacta

SEQ ID NO: 373972 - DNA, 2901 bp, Homo sapiens
aaaaaaaaacccccttgcgggtgggccggaattttttttaaaaaaacaacaattggccccttaaacctttaagcctttaaaggggtgtgttttttttttacttttatttgcaacatttacagtccttcaaaatccttccaaagaattcttatacacattggggccttggagcttacatagttttaaactcatttttgccatacatcagttattcattctgtgatcatttattttaagcactcttaaagcaaaaaatgaatgtctaaaattgttttttgttgtacctgctttgactgatgctgagattcttcaggcttcctgcaattttctaagcaatttcttgctctatctctcaaaacttggtatttttcagagatttatataaatgtaaaaataataatttttatatttaattattaactacatttatgagtaactattattataggtaatcaatgaatattgaagtttcagcttaaaataaacagttgtgaaccaagatctataaagcgatatacagatgaaaatttgagactatttaaacttataaatcatattgatgaaaagatttaagcacaaactttagggtaaaaattgccattggacagttgtctagagatatatatacttgtggttttcaaattggactttcaaaattaaatctgtccctgagagtgtctctgataaaagggcaaatctgcacctatgtagctctgcatctcctgtcttttcaggtttgtcatcagatggaaatattttgataataaattgaaattgtgaactcattgctccctaagactgtgacaactgtctaactttagaagtgcatttctgaatagaaatgggaggcctctgatggaccttctagaattataagtcacaaagagttctggaaaagaactgtttactgcttgataggaattcatcttttgaggcttctgttcctctcttttcctgttgtattgactattttcgttcattacttgattaagattttacaaaagaggagcacttccaaaattcttatttttcctaacaaaagatgaaagcagggaatttctatctaaatgatgagtattagttccctgtctcttgaaaaatgcccatttgcctttaaaaaaaaaagttacagaaatactataacatatgtacataaattgcataaagcataagtatacagttcaataaacttaactttaactgaacaatggccctgtagccagcacctgtaagaaacagagcagtaccagcgctctaaaagcacctccttgtcactttattactcccagaacaacaactatcctgacttctaatatcattcactagctttgcctggttttgtcttttatgtagatagaatcaatcagtatgtattcttttgtgcctggcttctttctctcagccttacatttgtgagattcctctgtattgtgctgattgtggatcttttcattctcattgcagaataatgttctattgtgggacttattacaatttgttcatcctattgttgatgggcacttgagaactttccattttggcgctattacaaatagtgcaactatgaatgtactgcatgttaccatcttacttgagcctttaatggacttatttcttcaaatccttccaaaaattattataagcattgaaattatagtttcaagccaactgtggatacccttaccctttcctcctttatcacaaccaccgttacaagtatacttatatttccctaaaatacatttaaaacttacctaagtgacatttgtagttggagtaataggagcttccagctctaataaaacagctgtctctaacttattttatttccatcatgtcagagcaggtgaagagccagaagtgaagagtgactagtacaaattataaaaagccactagactcttcactgttagctttttaaaacattaggctcccatccctatggaggaacaactctccagtgcctggatcccctctgtctacaaatataagattttctgggcctaaaggatagatcaaagtcaaaaatagcaatgcctccctatccctcacacatccagacatcatgaattttacatggtactcttgttgagttctatagagccttctgatgtctctaaagcactaccgattctttggagttgtcacatcagataagacatatctctaattccatccataaatccagttctactatggctgagttctggtcaaagaaagaaagtttagaagctgagacacaaagggttgggagctgatgaaactcacaaatgatggtaggaagaagctctcgacaatacccgttggcaaggagtctgcctccatgctgcagtgttcgagtggattgtaggtgcaagatggaaaggattgtaggtgcaagctgtccagagaaaagagtccttgttccagccctattctgccactcctgacagggtgaccttgggtatttgcaatattcctttgggcctctgcttctctcacctaaaaaaagagaattagattatattggtggttctcagcaagagaaggagtatgtgtccaatgctgccttcccatgaatctgtctcccagttatgaatcagtgggcaggataaactgaaaactcccatttaagtgtctgaatcgagtgagacaaaattttagtccaaataacaagtaccaaagttttatcaagtttgggtctgtgctgctgttactgttaaccatttaagtggggcaaaaccttgctaattttctcaaaagcatttatcattcttgttgccacagctggagctctcaaactaaaagacatttgttattttggaaagaagaaagactctattctcaaagtttcctaatcagaaatttttatcagtttccagtctcaaaaatacaaaataaaaacaaacgtttttaatacta

SEQ ID NO: 373973 - DNA, 3606 bp, Homo sapiens
gctgagggagaaaggtccaaagggcgcgagcgcccagggcgctgggagcccgtgggacgggcacggggagggcagagccagccgaggggagcggctgccgggaggtgcgctgagcagggtccgcagctaaggtccagcgcgatccgagcgcccaggaccctgcggccgtggaggaggcgtgccctgggaaggagccgctactgggacctgaagaattttaggtgatgggcaagtcagaaagtcagatggatataactgatatcaacactccaaagccaaagaagaaacagcgatggactccactggagatcagcctctcggtccttgtcctgctcctcaccatcatagctgtgacaatgatcgcactctatgcaacctacgatgatggtatttgcaagtcatcagactgcataaaatcagctgctcgactgatccaaaacatggatgccaccactgagccttgtacagactttttcaaatatgcttgcggaggctggttgaaacgtaatgtcattcccgagaccagctcccgttacggcaactttgacattttaagagatgaactagaagtcgttttgaaagatgtccttcaagaacccaaaactgaagatatagtagcagtgcagaaagcaaaagcattgtacaggtcttgtataaatgaatctgctattgatagcagaggtggagaacctctactcaaactgttaccagacatatatgggtggccagtagcaacagaaaactgggagcaaaaatatggtgcttcttggacagctgaaaaagctattgcacaactgaattctaaatatgggaaaaaagtccttattaatttgtttgttggcactgatgataagaattctgtgaatcatgtaattcatattgaccaacctcgacttggcctcccttctagagattactatgaatgcactggaatctataaagaggcttgtacagcatatgtggattttatgatttctgtggccagattgattcgtcaggaagaaagattgcccatcgatgaaaaccagcttgctttggaaatgaataaagttatggaattggaaaaagaaattgccaatgctacggctaaacctgaagatcgaaatgatccaatgcttctgtataacaagatgacattggcccagatccaaaataacttttcactagagatcaatgggaagccattcagctggttgaatttcacaaatgaaatcatgtcaactgtgaatattagtattacaaatgaggaagatgtggttgtttatgctccagaatatttaaccaaacttaagcccattcttaccaaatattctgccagagatcttcaaaatttaatgtcctggagattcataatggatcttgtaagcagcctcagccgaacctacaaggagtccagaaatgctttccgcaaggccctttatggtacaacctcagaaacagcaacttggagacgttgtgcaaactatgtcaatgggaatatggaaaatgctgtggggaggctttatgtggaagcagcatttgctggagagagtaaacatgtggtcgaggatttgattgcacagatccgagaagtttttattcagactttagatgacctcacttggatggatgccgagacaaaaaagagagctgaagaaaaggccttagcaattaaagaaaggatcggctatcctgatgacattgtttcaaatgataacaaactgaataatgagtacctcgagttgaactacaaagaagatgaatacttcgagaacataattcaaaatttgaaattcagccaaagtaaacaactgaagaagctccgagaaaaggtggacaaagatgagtggataagtggagcagctgtagtcaatgcattttactcttcaggaagaaatcagatagtcttcccagccggcattctgcagccccccttctttagtgcccagcagtccaactcattgaactatgggggcatcggcatggtcataggacacgaaatcacccatggcttcgatgacaatggcagaaactttaacaaagatggagacctcgttgactggtggactcaacagtctgcaagtaactttaaggagcaatcccagtgcatggtgtatcagtatggaaacttttcctgggacctggcaggtggacagcaccttaatggaattaatacactgggagaaaacattgctgataatggaggtcttggtcaagcatacagagcctatcagaattatattaaaaagaatggcgaagaaaaattacttcctggacttgacctaaatcacaaacaactatttttcttgaactttgcacaggtgtggtgtggaacctataggccagagtatgcggttaactccattaaaacagatgtgcacagtccaggcaatttcaggattattgggactttgcagaactctgcagagttttcagaagcctttcactgccgcaagaattcatacatgaatccagaaaagaagtgccgggtttggtgatcttcaaaagaagcattgcagcccttggctagacttgccaacaccacagaaatggggaattctctaatcgaaagaaaatgggccctaggggtcactgtactgacttgagggtgattaacagagagggcaccatcacaatacagataacattaggttgtcctagaaagggtgtggagggaggaagggggtctaaggtctatcaagtcaatcatttctcactgtgtacataatgcttaatttctaaagataatattactgtttatttctgtttctcatatggtctaccagtttgctgatgtccctagaaaacaatgcaaaacctttgaggtagaccaggatttctaatcaaaagggaaaagaagatgttgaagaatacagttaggcaccagaagaacagtaggtgacactatagtttaaaacacattgcctaactactagtttttacttttatttgcaacatttacagtccttcaaaatccttccaaagaattcttatacacattggggccttggagcttacatagttttaaactcatttttgccatacatcagttattcattctgtgatcatttattttaagcactcttaaagcaaaaaatgaatgtctaaaattgttttttgttgtacctgctttgactgatgctgagattcttcaggcttcctgcaattttctaagcaatttcttgctctatctctcaaaacttggtatttttcagagatttatataaatgtaaaaataataatttttatatttaattattaactacatttatgagtaactattattataggtaatcaatgaatattgaagtttcagcttaaaataaacagttgtgaaccaagatctataaagcgatatacagatgaaaatttgagactatttaaacttataaatcatattgatgaaaagatttaagcacaaactttagggtaaaaattgccattggacagttgtctagagatatatatacttgtggttttcaaattggactttcaaaattaaatctgtccctgagagtgtctctgataaaagggcaaatctgcacctatgtagctctgcatctcctgtcttttcaggtttgtcatcagatggaaatattttgataataaattgaaattgtgaactca

SEQ ID NO: 373974 - DNA, 1303 bp, Homo sapiens
cgaagaggggccggggcgccgaagccctccaaaaattattataagcattgaaattatagtttcaagccaactgtggatacccttaccctttcctcctttatcacaaccaccgttacaagtatacttatatttccctaaaatacatttaaaacttacctaagtgacatttgtagttggagtaataggagcttccagctctaataaaacagctgtctctaacttattttatttccatcatgtcagagcaggtgaagagccagaagtgaagagtgactagtacaaattataaaaagccactagactcttcactgttagctttttaaaacattaggctcccatccctatggaggaacaactctccagtgcctggatcccctctgtctacaaatataagattttctgggcctaaaggatagatcaaagtcaaaaatagcaatgcctccctatccctcacacatccagacatcatgaattttacatggtactcttgttgagttctatagagccttctgatgtctctaaagcactaccgattctttggagttgtcacatcagataagacatatctctaattccatccataaatccagttctactatggctgagttctggtcaaagaaagaaagtttagaagctgagacacaaagggttgggagctgatgaaactcacaaatgatggtaggaagaagctctcgacaatacccgttggcaaggagtctgcctccatgctgcagtgttcgagtggattgtaggtgcaagatggaaaggattgtaggtgcaagctgtccagagaaaagagtccttgttccagccctattctgccactcctgacagggtgaccttgggtatttgcaatattcctttgggcctctgcttctctcacctaaaaaaagagaattagattatattggtggttctcagcaagagaaggagtatgtgtccaatgctgccttcccatgaatctgtctcccagttatgaatcagtgggcaggataaactgaaaactcccatttaagtgtctgaatcgagtgagacaaaattttagtccaaataacaagtaccaaagttttatcaagtttgggtctgtgctgctgttactgttaaccatttaagtggggcaaaaccttgctaattttctcaaaagcatttatcattcttgttgccacagctggagctctcaaactaaaagacatttgttattttggaaagaagaaagactctattctcaaagtttcctaatcagaaatttttatcagtttccagtctcaaaaatacaaaataaaaacaaacgtttttaatacta

SEQ ID NO: 373975 - DNA, 1066 bp, Homo sapiens
tgttatttcatgacgggacgggatttgattgatgtttattgcacttggcctgacaatcacacaactcttcactgttagctttttaaaacattaggctcccatccctatggaggaacaactctccagtgcctggatcccctctgtctacaaatataagattttctgggcctaaaggatagatcaaagtcaaaaatagcaatgcctccctatccctcacacatccagacatcatgaattttacatggtactcttgttgagttctatagagccttctgatgtctctaaagcactaccgattctttggagttgtcacatcagataagacatatctctaattccatccataaatccagttctactatggctgagttctggtcaaagaaagaaagtttagaagctgagacacaaagggttgggagctgatgaaactcacaaatgatggtaggaagaagctctcgacaatacccgttggcaaggagtctgcctccatgctgcagtgttcgagtggattgtaggtgcaagatggaaaggattgtaggtgcaagctgtccagagaaaagagtccttgttccagccctattctgccactcctgacagggtgaccttgggtatttgcaatattcctttgggcctctgcttctctcacctaaaaaaagagaattagattatattggtggttctcagcaagagaaggagtatgtgtccaatgctgccttcccatgaatctgtctcccagttatgaatcagtgggcaggataaactgaaaactcccatttaagtgtctgaatcgagtgagacaaaattttagtccaaataacaagtaccaaagttttatcaagtttgggtctgtgctgctgttactgttaaccatttaagtggggcaaaaccttgctaattttctcaaaagcatttatcattcttgttgccacagctggagctctcaaactaaaagacatttgttattttggaaagaagaaagactctattctcaaagtttcctaatcagaaatttttatcagtttccagtctcaaaaatacaaaataaaaacaaacgtttttaatacta

SEQ ID NO: 373976 - DNA, 2166 bp, Homo sapiens
gcggagatgtgcaagtggcgaagcttgaccgagagcaggctggagcagccgcccaactcctggcgcgggatctgctgaggggtcacgattttaggtgatgggcaagtcagaaagtcagatggatataactgatatcaacactccaaagccaaagaagaaacagcgatggactccactggagatcagcctctcggtccttgtcctgctcctcaccatcatagctgtgacaatgatcgcactctatgcaacctacgatgatggtatttgcaagtcatcagactgcataaaatcagctgctcgactgatccaaaacatggatgccaccactgagccttgtacagactttttcaaatatgcttgcggaggctggttgaaacgtaatgtcattcccgagaccagctcccgttacggcaactttgacattttaagagatgaactagaagtcgttttgaaagatgtccttcaagaacccaaaactgaagatatagtagcagtgcagaaagcaaaagcattgtacaggtcttgtataaatgaatctgctattgatagcagaggtggagaacctctactcaaactgttaccagacatatatgggtggccagtagcaacagaaaactgggagcaaaaatatggtgcttcttggacagctgaaaaagctattgcacaactgaattctaaatatgggaaaaaagtccttattaatttgtttgttggcactgatgataagaattctgtgaatcatgtaattcatattgaccaacctcgacttggcctcccttctagagattactatgaatgcactggaatctataaagaggcttgtacagcatatgtggattttatgatttctgtggccagattgattcgtcaggaagaaagattgcccatcgatgaaaaccagcttgctttggaaatgaataaagttatggaattggaaaaagaaattgccaatgctacggctaaacctgaagatcgaaatgatccaatgcttctgtataacaagatgacattggcccagatccaaaataacttttcactagagatcaatgggaagccattcagctggttgaatttcacaaatgaaatcatgtcaactgtgaatattagtattacaaatgaggaagatgtggttgtttatgctccagaatatttaaccaaacttaagcccattcttaccaaatattctgccagagatcttcaaaatttaatgtcctggagattcataatggatcttgtaagcagcctcagccgaacctacaaggagtccagaaatgctttccgcaaggccctttatggtacaacctcagaaacagcaacttggagacgttgtgcaaactatgtcaatgggaatatggaaaatgctgtggggaggctttatgtggaagcagcatttgctggagagagtaaacatgtggtcgaggatttgattgcacagatccgagaagtttttattcagactttagatgacctcacttggatggatgccgagacaaaaaagagagctgaagaaaaggccttagcaattaaagaaaggatcggctatcctgatgacattgtttcaaatgataacaaactgaataatgagtacctcgagttgaactacaaagaagatgaatacttcgagaacataattcaaaatttgaaattcagccaaagtaaacaactgaagaagctccgagaaaaggtggacaaagatgagtggataagtggagcagctgtagtcaatgcattttactcttcaggaagaaatcagatagtcttcccagccggcattctgcagccccccttctttagtgcccagcagtccaactcattgaactatgggggcatcggcatggtcataggacacgaaatcacccatggcttcgatgacaatggcagaaactttaacaaagatggagacctcgttgactggtggactcaacagtctgcaagtaactttaaggagcaatcccagtgcatggtgtatcagtatggaaacttttcctgggacctggcaggtggacagcaccttaatggaattaatacactgggagaaaacattgctgataatggaggtcttggtcaagcatacagagtaagtaaaaaagattttctttccattttagtgatttagagtgtttctcatatttaataattcatttaaaaccttttgcaaaaaaagaa

SEQ ID NO: 373977 - DNA, 467 bp, Homo sapiens
cgaagaaaaattacttcctggacttgacctaaatcacaaacaactatttttcttgaactttgcacaggtattgtgtctttcttgattgatagatatgaaaaccattttgagttataatttcacagtaagttagatgtcacatgctgagttcccttgttttacagagcatttgacttgattcactttcattgtttataatagactgttggatcatattaatgataaataactatgttcctggttgcctttcattgaacattatttgaagagcgaatggttgaggaatgcagaattccaatttaatttttctccttcccctcaacttgctcaaacaaataatccttgattgaacctgagtacatgctttgcttttcctattcctatctctaggtgtggtgtggaacctataggccagagtatgcggttaactccattaaaacagatgtgcacagtccaggcaatttcag

SEQ ID NO: 373978 - DNA, 5595 bp, Homo sapiens
gcggagatgtgcaagtggcgaagcttgaccgagagcaggctggagcagccgcccaactcctggcgcgggatctgctgaggggtcacgattttaggtgatgggcaagtcagaaagtcagatggatataactgatatcaacactccaaagccaaagaagaaacagcgatggactccactggagatcagcctctcggtccttgtcctgctcctcaccatcatagctgtgacaatgatcgcactctatgcaacctacgatgatggtatttgcaagtcatcagactgcataaaatcagctgctcgactgatccaaaacatggatgccaccactgagccttgtacagactttttcaaatatgcttgcggaggctggttgaaacgtaatgtcattcccgagaccagctcccgttacggcaactttgacattttaagagatgaactagaagtcgttttgaaagatgtccttcaagaacccaaaactgaagatatagtagcagtgcagaaagcaaaagcattgtacaggtcttgtataaatgaatctgctattgatagcagaggtggagaacctctactcaaactgttaccagacatatatgggtggccagtagcaacagaaaactgggagcaaaaatatggtgcttcttggacagctgaaaaagctattgcacaactgaattctaaatatgggaaaaaagtccttattaatttgtttgttggcactgatgataagaattctgtgaatcatgtaattcatattgaccaacctcgacttggcctcccttctagagattactatgaatgcactggaatctataaagaggcttgtacagcatatgtggattttatgatttctgtggccagattgattcgtcaggaagaaagattgcccatcgatgaaaaccagcttgctttggaaatgaataaagttatggaattggaaaaagaaattgccaatgctacggctaaacctgaagatcgaaatgatccaatgcttctgtataacaagatgacattggcccagatccaaaataacttttcactagagatcaatgggaagccattcagctggttgaatttcacaaatgaaatcatgtcaactgtgaatattagtattacaaatgaggaagatgtggttgtttatgctccagaatatttaaccaaacttaagcccattcttaccaaatattctgccagagatcttcaaaatttaatgtcctggagattcataatggatcttgtaagcagcctcagccgaacctacaaggagtccagaaatgctttccgcaaggccctttatggtacaacctcagaaacagcaacttggagacgttgtgcaaactatgtcaatgggaatatggaaaatgctgtggggaggctttatgtggaagcagcatttgctggagagagtaaacatgtggtcgaggatttgattgcacagatccgagaagtttttattcagactttagatgacctcacttggatggatgccgagacaaaaaagagagctgaagaaaaggccttagcaattaaagaaaggatcggctatcctgatgacattgtttcaaatgataacaaactgaataatgagtacctcgagttgaactacaaagaagatgaatacttcgagaacataattcaaaatttgaaattcagccaaagtaaacaactgaagaagctccgagaaaaggtggacaaagatgagtggataagtggagcagctgtagtcaatgcattttactcttcaggaagaaatcagatagtcttcccagccggcattctgcagccccccttctttagtgcccagcagtccaactcattgaactatgggggcatcggcatggtcataggacacgaaatcacccatggcttcgatgacaatggcagaaactttaacaaagatggagacctcgttgactggtggactcaacagtctgcaagtaactttaaggagcaatcccagtgcatggtgtatcagtatggaaacttttcctgggacctggcaggtggacagcaccttaatggaattaatacactgggagaaaacattgctgataatggaggtcttggtcaagcatacagagcctatcagaattatattaaaaagaatggcgaagaaaaattacttcctggacttgacctaaatcacaaacaactatttttcttgaactttgcacaggtgtggtgtggaacctataggccagagtatgcggttaactccattaaaacagatgtgcacagtccaggcaatttcaggattattgggactttgcagaactctgcagagttttcagaagcctttcactgccgcaagaattcatacatgaatccagaaaagaagtgccgggtttggtgatcttcaaaagaagcattgcagcccttggctagacttgccaacaccacagaaatggggaattctctaatcgaaagaaaatgggccctaggggtcactgtactgacttgagggtgattaacagagagggcaccatcacaatacagataacattaggttgtcctagaaagggtgtggagggaggaagggggtctaaggtctatcaagtcaatcatttctcactgtgtacataatgcttaatttctaaagataatattactgtttatttctgtttctcatatggtctaccagtttgctgatgtccctagaaaacaatgcaaaacctttgaggtagaccaggatttctaatcaaaagggaaaagaagatgttgaagaatacagttaggcaccagaagaacagtaggtgacactatagtttaaaacacattgcctaactactagtttttacttttatttgcaacatttacagtccttcaaaatccttccaaagaattcttatacacattggggccttggagcttacatagttttaaactcatttttgccatacatcagttattcattctgtgatcatttattttaagcactcttaaagcaaaaaatgaatgtctaaaattgttttttgttgtacctgctttgactgatgctgagattcttcaggcttcctgcaattttctaagcaatttcttgctctatctctcaaaacttggtatttttcagagatttatataaatgtaaaaataataatttttatatttaattattaactacatttatgagtaactattattataggtaatcaatgaatattgaagtttcagcttaaaataaacagttgtgaaccaagatctataaagcgatatacagatgaaaatttgagactatttaaacttataaatcatattgatgaaaagatttaagcacaaactttagggtaaaaattgccattggacagttgtctagagatatatatacttgtggttttcaaattggactttcaaaattaaatctgtccctgagagtgtctctgataaaagggcaaatctgcacctatgtagctctgcatctcctgtcttttcaggtttgtcatcagatggaaatattttgataataaattgaaattgtgaactcattgctccctaagactgtgacaactgtctaactttagaagtgcatttctgaatagaaatgggaggcctctgatggaccttctagaattataagtcacaaagagttctggaaaagaactgtttactgcttgataggaattcatcttttgaggcttctgttcctctcttttcctgttgtattgactattttcgttcattacttgattaagattttacaaaagaggagcacttccaaaattcttatttttcctaacaaaagatgaaagcagggaatttctatctaaatgatgagtattagttccctgtctcttgaaaaatgcccatttgcctttaaaaaaaaaagttacagaaatactataacatatgtacataaattgcataaagcataagtatacagttcaataaacttaactttaactgaacaatggccctgtagccagcacctgtaagaaacagagcagtaccagcgctctaaaagcacctccttgtcactttattactcccagaacaacaactatcctgacttctaatatcattcactagctttgcctggttttgtcttttatgtagatagaatcaatcagtatgtattcttttgtgcctggcttctttctctcagccttacatttgtgagattcctctgtattgtgctgattgtggatcttttcattctcattgcagaataatgttctattgtgggacttattacaatttgttcatcctattgttgatgggcacttgagaactttccattttggcgctattacaaatagtgcaactatgaatgtactgcatgttaccatcttacttgagcctttaatggacttatttcttcaaatccttccaaaaattattataagcattgaaattatagtttcaagccaactgtggatacccttaccctttcctcctttatcacaaccaccgttacaagtatacttatatttccctaaaatacatttaaaacttacctaagtgacatttgtagttggagtaataggagcttccagctctaataaaacagctgtctctaacttattttatttccatcatgtcagagcaggtgaagagccagaagtgaagagtgactagtacaaattataaaaagccactagactcttcactgttagctttttaaaacattaggctcccatccctatggaggaacaactctccagtgcctggatcccctctgtctacaaatataagattttctgggcctaaaggatagatcaaagtcaaaaatagcaatgcctccctatccctcacacatccagacatcatgaattttacatggtactcttgttgagttctatagagccttctgatgtctctaaagcactaccgattctttggagttgtcacatcagataagacatatctctaattccatccataaatccagttctactatggctgagttctggtcaaagaaagaaagtttagaagctgagacacaaagggttgggagctgatgaaactcacaaatgatggtaggaagaagctctcgacaatacccgttggcaaggagtctgcctccatgctgcagtgttcgagtggattgtaggtgcaagatggaaaggattgtaggtgcaagctgtccagagaaaagagtccttgttccagccctattctgccactcctgacagggtgaccttgggtatttgcaatattcctttgggcctctgcttctctcacctaaaaaaagagaattagattatattggtggttctcagcaagagaaggagtatgtgtccaatgctgccttcccatgaatctgtctcccagttatgaatcagtgggcaggataaactgaaaactcccatttaagtgtctgaatcgagtgagacaaaattttagtccaaataacaagtaccaaagttttatcaagtttgggtctgtgctgctgttactgttaaccatttaagtggggcaaaaccttgctaattttctcaaaagcatttatcattcttgttgccacagctggagctctcaaactaaaagacatttgttattttggaaagaagaaagactctattctcaaagtttcctaatcagaaatttttatcagtttccagtctcaaaaatacaaaataaaaacaaacgtttttaatacta

SEQ ID NO: 373979 - DNA, 5537 bp, Homo sapiens
gaggagagcgagctgagggagaaagcaagattttaggtgatgggcaagtcagaaagtcagatggatataactgatatcaacactccaaagccaaagaagaaacagcgatggactccactggagatcagcctctcggtccttgtcctgctcctcaccatcatagctgtgacaatgatcgcactctatgcaacctacgatgatggtatttgcaagtcatcagactgcataaaatcagctgctcgactgatccaaaacatggatgccaccactgagccttgtacagactttttcaaatatgcttgcggaggctggttgaaacgtaatgtcattcccgagaccagctcccgttacggcaactttgacattttaagagatgaactagaagtcgttttgaaagatgtccttcaagaacccaaaactgaagatatagtagcagtgcagaaagcaaaagcattgtacaggtcttgtataaatgaatctgctattgatagcagaggtggagaacctctactcaaactgttaccagacatatatgggtggccagtagcaacagaaaactgggagcaaaaatatggtgcttcttggacagctgaaaaagctattgcacaactgaattctaaatatgggaaaaaagtccttattaatttgtttgttggcactgatgataagaattctgtgaatcatgtaattcatattgaccaacctcgacttggcctcccttctagagattactatgaatgcactggaatctataaagaggcttgtacagcatatgtggattttatgatttctgtggccagattgattcgtcaggaagaaagattgcccatcgatgaaaaccagcttgctttggaaatgaataaagttatggaattggaaaaagaaattgccaatgctacggctaaacctgaagatcgaaatgatccaatgcttctgtataacaagatgacattggcccagatccaaaataacttttcactagagatcaatgggaagccattcagctggttgaatttcacaaatgaaatcatgtcaactgtgaatattagtattacaaatgaggaagatgtggttgtttatgctccagaatatttaaccaaacttaagcccattcttaccaaatattctgccagagatcttcaaaatttaatgtcctggagattcataatggatcttgtaagcagcctcagccgaacctacaaggagtccagaaatgctttccgcaaggccctttatggtacaacctcagaaacagcaacttggagacgttgtgcaaactatgtcaatgggaatatggaaaatgctgtggggaggctttatgtggaagcagcatttgctggagagagtaaacatgtggtcgaggatttgattgcacagatccgagaagtttttattcagactttagatgacctcacttggatggatgccgagacaaaaaagagagctgaagaaaaggccttagcaattaaagaaaggatcggctatcctgatgacattgtttcaaatgataacaaactgaataatgagtacctcgagttgaactacaaagaagatgaatacttcgagaacataattcaaaatttgaaattcagccaaagtaaacaactgaagaagctccgagaaaaggtggacaaagatgagtggataagtggagcagctgtagtcaatgcattttactcttcaggaagaaatcagatagtcttcccagccggcattctgcagccccccttctttagtgcccagcagtccaactcattgaactatgggggcatcggcatggtcataggacacgaaatcacccatggcttcgatgacaatggcagaaactttaacaaagatggagacctcgttgactggtggactcaacagtctgcaagtaactttaaggagcaatcccagtgcatggtgtatcagtatggaaacttttcctgggacctggcaggtggacagcaccttaatggaattaatacactgggagaaaacattgctgataatggaggtcttggtcaagcatacagagcctatcagaattatattaaaaagaatggcgaagaaaaattacttcctggacttgacctaaatcacaaacaactatttttcttgaactttgcacaggtgtggtgtggaacctataggccagagtatgcggttaactccattaaaacagatgtgcacagtccaggcaatttcaggattattgggactttgcagaactctgcagagttttcagaagcctttcactgccgcaagaattcatacatgaatccagaaaagaagtgccgggtttggtgatcttcaaaagaagcattgcagcccttggctagacttgccaacaccacagaaatggggaattctctaatcgaaagaaaatgggccctaggggtcactgtactgacttgagggtgattaacagagagggcaccatcacaatacagataacattaggttgtcctagaaagggtgtggagggaggaagggggtctaaggtctatcaagtcaatcatttctcactgtgtacataatgcttaatttctaaagataatattactgtttatttctgtttctcatatggtctaccagtttgctgatgtccctagaaaacaatgcaaaacctttgaggtagaccaggatttctaatcaaaagggaaaagaagatgttgaagaatacagttaggcaccagaagaacagtaggtgacactatagtttaaaacacattgcctaactactagtttttacttttatttgcaacatttacagtccttcaaaatccttccaaagaattcttatacacattggggccttggagcttacatagttttaaactcatttttgccatacatcagttattcattctgtgatcatttattttaagcactcttaaagcaaaaaatgaatgtctaaaattgttttttgttgtacctgctttgactgatgctgagattcttcaggcttcctgcaattttctaagcaatttcttgctctatctctcaaaacttggtatttttcagagatttatataaatgtaaaaataataatttttatatttaattattaactacatttatgagtaactattattataggtaatcaatgaatattgaagtttcagcttaaaataaacagttgtgaaccaagatctataaagcgatatacagatgaaaatttgagactatttaaacttataaatcatattgatgaaaagatttaagcacaaactttagggtaaaaattgccattggacagttgtctagagatatatatacttgtggttttcaaattggactttcaaaattaaatctgtccctgagagtgtctctgataaaagggcaaatctgcacctatgtagctctgcatctcctgtcttttcaggtttgtcatcagatggaaatattttgataataaattgaaattgtgaactcattgctccctaagactgtgacaactgtctaactttagaagtgcatttctgaatagaaatgggaggcctctgatggaccttctagaattataagtcacaaagagttctggaaaagaactgtttactgcttgataggaattcatcttttgaggcttctgttcctctcttttcctgttgtattgactattttcgttcattacttgattaagattttacaaaagaggagcacttccaaaattcttatttttcctaacaaaagatgaaagcagggaatttctatctaaatgatgagtattagttccctgtctcttgaaaaatgcccatttgcctttaaaaaaaaaagttacagaaatactataacatatgtacataaattgcataaagcataagtatacagttcaataaacttaactttaactgaacaatggccctgtagccagcacctgtaagaaacagagcagtaccagcgctctaaaagcacctccttgtcactttattactcccagaacaacaactatcctgacttctaatatcattcactagctttgcctggttttgtcttttatgtagatagaatcaatcagtatgtattcttttgtgcctggcttctttctctcagccttacatttgtgagattcctctgtattgtgctgattgtggatcttttcattctcattgcagaataatgttctattgtgggacttattacaatttgttcatcctattgttgatgggcacttgagaactttccattttggcgctattacaaatagtgcaactatgaatgtactgcatgttaccatcttacttgagcctttaatggacttatttcttcaaatccttccaaaaattattataagcattgaaattatagtttcaagccaactgtggatacccttaccctttcctcctttatcacaaccaccgttacaagtatacttatatttccctaaaatacatttaaaacttacctaagtgacatttgtagttggagtaataggagcttccagctctaataaaacagctgtctctaacttattttatttccatcatgtcagagcaggtgaagagccagaagtgaagagtgactagtacaaattataaaaagccactagactcttcactgttagctttttaaaacattaggctcccatccctatggaggaacaactctccagtgcctggatcccctctgtctacaaatataagattttctgggcctaaaggatagatcaaagtcaaaaatagcaatgcctccctatccctcacacatccagacatcatgaattttacatggtactcttgttgagttctatagagccttctgatgtctctaaagcactaccgattctttggagttgtcacatcagataagacatatctctaattccatccataaatccagttctactatggctgagttctggtcaaagaaagaaagtttagaagctgagacacaaagggttgggagctgatgaaactcacaaatgatggtaggaagaagctctcgacaatacccgttggcaaggagtctgcctccatgctgcagtgttcgagtggattgtaggtgcaagatggaaaggattgtaggtgcaagctgtccagagaaaagagtccttgttccagccctattctgccactcctgacagggtgaccttgggtatttgcaatattcctttgggcctctgcttctctcacctaaaaaaagagaattagattatattggtggttctcagcaagagaaggagtatgtgtccaatgctgccttcccatgaatctgtctcccagttatgaatcagtgggcaggataaactgaaaactcccatttaagtgtctgaatcgagtgagacaaaattttagtccaaataacaagtaccaaagttttatcaagtttgggtctgtgctgctgttactgttaaccatttaagtggggcaaaaccttgctaattttctcaaaagcatttatcattcttgttgccacagctggagctctcaaactaaaagacatttgttattttggaaagaagaaagactctattctcaaagtttcctaatcagaaatttttatcagtttccagtctcaaaaatacaaaataaaaacaaacgtttttaatacta

SEQ ID NO: 373980 - DNA, 817 bp, Homo sapiens
gctgagggagaaaggtccaaagggcgcgagcgcccagggcgctgggagcccgtgggacgggcacggggagggcagagccagccgaggggagcggctgccgggaggtgcgctgagcagggtccgcagctaaggtccagcgcgatccgagcgcccaggaccctgcggccgtggaggaggcgtgccctgggaaggagccgctactgggacctgaagagtgaggggagggagaggggcccagagggtgacctggaggagggctctggaagtcacgtcaggttggctcttcaggttcatttccatagttccctgcggcctctgccttggggagttatgttttgttaccgagatccgcgctaccagattgcaccggggctgatttgggggctgggaatttgccattctgctgtacagacactgatttttttttcttctttttaaaaagcaaggtttgattttaggtgatgggcaagtcagaaagtcagatggatataactgatatcaacactccaaagccaaagaagaaacagcgatggactccactggagatcagcctctcggtccttgtcctgctcctcaccatcatagctgtgacaatgatcgcactctatgcaacctacgatgatggtatttgcaagtcatcagactgcataaaatcaggcatggtagcacgcgcctataatcccagagggaggagaattgcttgaacccaggaggcagaggttgaagcgagccaagattgcacgactgcactccagcctggaagacagcgcaagactctatctccaaaaaaaagaaaaagacaacagagaattgaggg

SEQ ID NO: 373981 - DNA, 773 bp, Homo sapiens
gcagcactaaccaggggagtaatatggttggcacttcgtgtccagaactccgtatttcaggctgggaaacacctaattaatgtctgggaaacaagaagatgatttatcctgagtacctctgtcctcagcttctgcagacacagtttaaatatggaaactgtttctccttcttcctgtgcctcagtttccatagaacaaactgtaattgcatagcacagcttcaggaacctgcagatataagttaatgttataatgtgcagtgaagatgaaaactgcttagctaagtctaagtctattttaggtgatgggcaagtcagaaagtcagatggatataactgatatcaacactccaaagccaaagaagaaacagcgatggactccactggagatcagcctctcggtccttgtcctgctcctcaccatcatagctgtgacaatgatcgcactctatgcaacctacgatgatggtatttgcaagtcatcagactgcataaaatcagctgctcgactgatccaaaacatggatgccaccactgagccttgtacagactttttcaaatatgcttgcggaggctggttgaaacgtaatgtcattcccgagaccagctcccgttacggcaactttgacattttaagagatgaactagaagtcgttttgaaagatgttcctttcagaaccaaaatgagatatagtagcgggggaaagaaagcttgtgagggcttggttaaggatctggtatggaagggtgggaacttttaggtccgcattttgg

SEQ ID NO: 373982 - DNA, 5783 bp, Homo sapiens
gctgagggagaaaggtccaaagggcgcgagcgcccagggcgctgggagcccgtgggacgggcacggggagggcagagccagccgaggggagcggctgccgggaggtgcgctgagcagggtccgcagctaaggtccagcgcgatccgagcgcccaggaccctgcggccgtggaggaggcgtgccctgggaaggagccgctactgggacctgaagagtgaggggagggagaggggcccagagggtgacctggaggagggctctggaagtcacgtcagattttaggtgatgggcaagtcagaaagtcagatggatataactgatatcaacactccaaagccaaagaagaaacagcgatggactccactggagatcagcctctcggtccttgtcctgctcctcaccatcatagctgtgacaatgatcgcactctatgcaacctacgatgatggtatttgcaagtcatcagactgcataaaatcagctgctcgactgatccaaaacatggatgccaccactgagccttgtacagactttttcaaatatgcttgcggaggctggttgaaacgtaatgtcattcccgagaccagctcccgttacggcaactttgacattttaagagatgaactagaagtcgttttgaaagatgtccttcaagaacccaaaactgaagatatagtagcagtgcagaaagcaaaagcattgtacaggtcttgtataaatgaatctgctattgatagcagaggtggagaacctctactcaaactgttaccagacatatatgggtggccagtagcaacagaaaactgggagcaaaaatatggtgcttcttggacagctgaaaaagctattgcacaactgaattctaaatatgggaaaaaagtccttattaatttgtttgttggcactgatgataagaattctgtgaatcatgtaattcatattgaccaacctcgacttggcctcccttctagagattactatgaatgcactggaatctataaagaggcttgtacagcatatgtggattttatgatttctgtggccagattgattcgtcaggaagaaagattgcccatcgatgaaaaccagcttgctttggaaatgaataaagttatggaattggaaaaagaaattgccaatgctacggctaaacctgaagatcgaaatgatccaatgcttctgtataacaagatgacattggcccagatccaaaataacttttcactagagatcaatgggaagccattcagctggttgaatttcacaaatgaaatcatgtcaactgtgaatattagtattacaaatgaggaagatgtggttgtttatgctccagaatatttaaccaaacttaagcccattcttaccaaatattctgccagagatcttcaaaatttaatgtcctggagattcataatggatcttgtaagcagcctcagccgaacctacaaggagtccagaaatgctttccgcaaggccctttatggtacaacctcagaaacagcaacttggagacgttgtgcaaactatgtcaatgggaatatggaaaatgctgtggggaggctttatgtggaagcagcatttgctggagagagtaaacatgtggtcgaggatttgattgcacagatccgagaagtttttattcagactttagatgacctcacttggatggatgccgagacaaaaaagagagctgaagaaaaggccttagcaattaaagaaaggatcggctatcctgatgacattgtttcaaatgataacaaactgaataatgagtacctcgagttgaactacaaagaagatgaatacttcgagaacataattcaaaatttgaaattcagccaaagtaaacaactgaagaagctccgagaaaaggtggacaaagatgagtggataagtggagcagctgtagtcaatgcattttactcttcaggaagaaatcagatagtcttcccagccggcattctgcagccccccttctttagtgcccagcagtccaactcattgaactatgggggcatcggcatggtcataggacacgaaatcacccatggcttcgatgacaatggcagaaactttaacaaagatggagacctcgttgactggtggactcaacagtctgcaagtaactttaaggagcaatcccagtgcatggtgtatcagtatggaaacttttcctgggacctggcaggtggacagcaccttaatggaattaatacactgggagaaaacattgctgataatggaggtcttggtcaagcatacagagcctatcagaattatattaaaaagaatggcgaagaaaaattacttcctggacttgacctaaatcacaaacaactatttttcttgaactttgcacaggtgtggtgtggaacctataggccagagtatgcggttaactccattaaaacagatgtgcacagtccaggcaatttcaggattattgggactttgcagaactctgcagagttttcagaagcctttcactgccgcaagaattcatacatgaatccagaaaagaagtgccgggtttggtgatcttcaaaagaagcattgcagcccttggctagacttgccaacaccacagaaatggggaattctctaatcgaaagaaaatgggccctaggggtcactgtactgacttgagggtgattaacagagagggcaccatcacaatacagataacattaggttgtcctagaaagggtgtggagggaggaagggggtctaaggtctatcaagtcaatcatttctcactgtgtacataatgcttaatttctaaagataatattactgtttatttctgtttctcatatggtctaccagtttgctgatgtccctagaaaacaatgcaaaacctttgaggtagaccaggatttctaatcaaaagggaaaagaagatgttgaagaatacagttaggcaccagaagaacagtaggtgacactatagtttaaaacacattgcctaactactagtttttacttttatttgcaacatttacagtccttcaaaatccttccaaagaattcttatacacattggggccttggagcttacatagttttaaactcatttttgccatacatcagttattcattctgtgatcatttattttaagcactcttaaagcaaaaaatgaatgtctaaaattgttttttgttgtacctgctttgactgatgctgagattcttcaggcttcctgcaattttctaagcaatttcttgctctatctctcaaaacttggtatttttcagagatttatataaatgtaaaaataataatttttatatttaattattaactacatttatgagtaactattattataggtaatcaatgaatattgaagtttcagcttaaaataaacagttgtgaaccaagatctataaagcgatatacagatgaaaatttgagactatttaaacttataaatcatattgatgaaaagatttaagcacaaactttagggtaaaaattgccattggacagttgtctagagatatatatacttgtggttttcaaattggactttcaaaattaaatctgtccctgagagtgtctctgataaaagggcaaatctgcacctatgtagctctgcatctcctgtcttttcaggtttgtcatcagatggaaatattttgataataaattgaaattgtgaactcattgctccctaagactgtgacaactgtctaactttagaagtgcatttctgaatagaaatgggaggcctctgatggaccttctagaattataagtcacaaagagttctggaaaagaactgtttactgcttgataggaattcatcttttgaggcttctgttcctctcttttcctgttgtattgactattttcgttcattacttgattaagattttacaaaagaggagcacttccaaaattcttatttttcctaacaaaagatgaaagcagggaatttctatctaaatgatgagtattagttccctgtctcttgaaaaatgcccatttgcctttaaaaaaaaaagttacagaaatactataacatatgtacataaattgcataaagcataagtatacagttcaataaacttaactttaactgaacaatggccctgtagccagcacctgtaagaaacagagcagtaccagcgctctaaaagcacctccttgtcactttattactcccagaacaacaactatcctgacttctaatatcattcactagctttgcctggttttgtcttttatgtagatagaatcaatcagtatgtattcttttgtgcctggcttctttctctcagccttacatttgtgagattcctctgtattgtgctgattgtggatcttttcattctcattgcagaataatgttctattgtgggacttattacaatttgttcatcctattgttgatgggcacttgagaactttccattttggcgctattacaaatagtgcaactatgaatgtactgcatgttaccatcttacttgagcctttaatggacttatttcttcaaatccttccaaaaattattataagcattgaaattatagtttcaagccaactgtggatacccttaccctttcctcctttatcacaaccaccgttacaagtatacttatatttccctaaaatacatttaaaacttacctaagtgacatttgtagttggagtaataggagcttccagctctaataaaacagctgtctctaacttattttatttccatcatgtcagagcaggtgaagagccagaagtgaagagtgactagtacaaattataaaaagccactagactcttcactgttagctttttaaaacattaggctcccatccctatggaggaacaactctccagtgcctggatcccctctgtctacaaatataagattttctgggcctaaaggatagatcaaagtcaaaaatagcaatgcctccctatccctcacacatccagacatcatgaattttacatggtactcttgttgagttctatagagccttctgatgtctctaaagcactaccgattctttggagttgtcacatcagataagacatatctctaattccatccataaatccagttctactatggctgagttctggtcaaagaaagaaagtttagaagctgagacacaaagggttgggagctgatgaaactcacaaatgatggtaggaagaagctctcgacaatacccgttggcaaggagtctgcctccatgctgcagtgttcgagtggattgtaggtgcaagatggaaaggattgtaggtgcaagctgtccagagaaaagagtccttgttccagccctattctgccactcctgacagggtgaccttgggtatttgcaatattcctttgggcctctgcttctctcacctaaaaaaagagaattagattatattggtggttctcagcaagagaaggagtatgtgtccaatgctgccttcccatgaatctgtctcccagttatgaatcagtgggcaggataaactgaaaactcccatttaagtgtctgaatcgagtgagacaaaattttagtccaaataacaagtaccaaagttttatcaagtttgggtctgtgctgctgttactgttaaccatttaagtggggcaaaaccttgctaattttctcaaaagcatttatcattcttgttgccacagctggagctctcaaactaaaagacatttgttattttggaaagaagaaagactctattctcaaagtttcctaatcagaaatttttatcagtttccagtctcaaaaatacaaaataaaaacaaacgtttttaatacta

SEQ ID NO: 373983 - DNA, 5668 bp, Homo sapiens
gctgagggagaaaggtccaaagggcgcgagcgcccagggcgctgggagcccgtgggacgggcacggggagggcagagccagccgaggggagcggctgccgggaggtgcgctgagcagggtccgcagctaaggtccagcgcgatccgagcgcccaggaccctgcggccgtggaggaggcgtgccctgggaaggagccgctactgggacctgaagaattttaggtgatgggcaagtcagaaagtcagatggatataactgatatcaacactccaaagccaaagaagaaacagcgatggactccactggagatcagcctctcggtccttgtcctgctcctcaccatcatagctgtgacaatgatcgcactctatgcaacctacgatgatggtatttgcaagtcatcagactgcataaaatcagctgctcgactgatccaaaacatggatgccaccactgagccttgtacagactttttcaaatatgcttgcggaggctggttgaaacgtaatgtcattcccgagaccagctcccgttacggcaactttgacattttaagagatgaactagaagtcgttttgaaagatgtccttcaagaacccaaaactgaagatatagtagcagtgcagaaagcaaaagcattgtacaggtcttgtataaatgaatctgctattgatagcagaggtggagaacctctactcaaactgttaccagacatatatgggtggccagtagcaacagaaaactgggagcaaaaatatggtgcttcttggacagctgaaaaagctattgcacaactgaattctaaatatgggaaaaaagtccttattaatttgtttgttggcactgatgataagaattctgtgaatcatgtaattcatattgaccaacctcgacttggcctcccttctagagattactatgaatgcactggaatctataaagaggcttgtacagcatatgtggattttatgatttctgtggccagattgattcgtcaggaagaaagattgcccatcgatgaaaaccagcttgctttggaaatgaataaagttatggaattggaaaaagaaattgccaatgctacggctaaacctgaagatcgaaatgatccaatgcttctgtataacaagatgacattggcccagatccaaaataacttttcactagagatcaatgggaagccattcagctggttgaatttcacaaatgaaatcatgtcaactgtgaatattagtattacaaatgaggaagatgtggttgtttatgctccagaatatttaaccaaacttaagcccattcttaccaaatattctgccagagatcttcaaaatttaatgtcctggagattcataatggatcttgtaagcagcctcagccgaacctacaaggagtccagaaatgctttccgcaaggccctttatggtacaacctcagaaacagcaacttggagacgttgtgcaaactatgtcaatgggaatatggaaaatgctgtggggaggctttatgtggaagcagcatttgctggagagagtaaacatgtggtcgaggatttgattgcacagatccgagaagtttttattcagactttagatgacctcacttggatggatgccgagacaaaaaagagagctgaagaaaaggccttagcaattaaagaaaggatcggctatcctgatgacattgtttcaaatgataacaaactgaataatgagtacctcgagttgaactacaaagaagatgaatacttcgagaacataattcaaaatttgaaattcagccaaagtaaacaactgaagaagctccgagaaaaggtggacaaagatgagtggataagtggagcagctgtagtcaatgcattttactcttcaggaagaaatcagatagtcttcccagccggcattctgcagccccccttctttagtgcccagcagtccaactcattgaactatgggggcatcggcatggtcataggacacgaaatcacccatggcttcgatgacaatggcagaaactttaacaaagatggagacctcgttgactggtggactcaacagtctgcaagtaactttaaggagcaatcccagtgcatggtgtatcagtatggaaacttttcctgggacctggcaggtggacagcaccttaatggaattaatacactgggagaaaacattgctgataatggaggtcttggtcaagcatacagagcctatcagaattatattaaaaagaatggcgaagaaaaattacttcctggacttgacctaaatcacaaacaactatttttcttgaactttgcacaggtgtggtgtggaacctataggccagagtatgcggttaactccattaaaacagatgtgcacagtccaggcaatttcaggattattgggactttgcagaactctgcagagttttcagaagcctttcactgccgcaagaattcatacatgaatccagaaaagaagtgccgggtttggtgatcttcaaaagaagcattgcagcccttggctagacttgccaacaccacagaaatggggaattctctaatcgaaagaaaatgggccctaggggtcactgtactgacttgagggtgattaacagagagggcaccatcacaatacagataacattaggttgtcctagaaagggtgtggagggaggaagggggtctaaggtctatcaagtcaatcatttctcactgtgtacataatgcttaatttctaaagataatattactgtttatttctgtttctcatatggtctaccagtttgctgatgtccctagaaaacaatgcaaaacctttgaggtagaccaggatttctaatcaaaagggaaaagaagatgttgaagaatacagttaggcaccagaagaacagtaggtgacactatagtttaaaacacattgcctaactactagtttttacttttatttgcaacatttacagtccttcaaaatccttccaaagaattcttatacacattggggccttggagcttacatagttttaaactcatttttgccatacatcagttattcattctgtgatcatttattttaagcactcttaaagcaaaaaatgaatgtctaaaattgttttttgttgtacctgctttgactgatgctgagattcttcaggcttcctgcaattttctaagcaatttcttgctctatctctcaaaacttggtatttttcagagatttatataaatgtaaaaataataatttttatatttaattattaactacatttatgagtaactattattataggtaatcaatgaatattgaagtttcagcttaaaataaacagttgtgaaccaagatctataaagcgatatacagatgaaaatttgagactatttaaacttataaatcatattgatgaaaagatttaagcacaaactttagggtaaaaattgccattggacagttgtctagagatatatatacttgtggttttcaaattggactttcaaaattaaatctgtccctgagagtgtctctgattcatcagatggaaatattttgataataaattgaaattgtgaactcattgctccctaagactgtgacaactgtctaactttagaagtgcatttctgaatagaaatgggaggcctctgatggaccttctagaattataagtcacaaagagttctggaaaagaactgtttactgcttgataggaattcatcttttgaggcttctgttcctctcttttcctgttgtattgactattttcgttcattacttgattaagattttacaaaagaggagcacttccaaaattcttatttttcctaacaaaagatgaaagcagggaatttctatctaaatgatgagtattagttccctgtctcttgaaaaatgcccatttgcctttaaaaaaaaaagttacagaaatactataacatatgtacataaattgcataaagcataagtatacagttcaataaacttaactttaactgaacaatggccctgtagccagcacctgtaagaaacagagcagtaccagcgctctaaaagcacctccttgtcactttattactcccagaacaacaactatcctgacttctaatatcattcactagctttgcctggttttgtcttttatgtagatagaatcaatcagtatgtattcttttgtgcctggcttctttctctcagccttacatttgtgagattcctctgtattgtgctgattgtggatcttttcattctcattgcagaataatgttctattgtgggacttattacaatttgttcatcctattgttgatgggcacttgagaactttccattttggcgctattacaaatagtgcaactatgaatgtactgcatgttaccatcttacttgagcctttaatggacttatttcttcaaatccttccaaaaattattataagcattgaaattatagtttcaagccaactgtggatacccttaccctttcctcctttatcacaaccaccgttacaagtatacttatatttccctaaaatacatttaaaacttacctaagtgacatttgtagttggagtaataggagcttccagctctaataaaacagctgtctctaacttattttatttccatcatgtcagagcaggtgaagagccagaagtgaagagtgactagtacaaattataaaaagccactagactcttcactgttagctttttaaaacattaggctcccatccctatggaggaacaactctccagtgcctggatcccctctgtctacaaatataagattttctgggcctaaaggatagatcaaagtcaaaaatagcaatgcctccctatccctcacacatccagacatcatgaattttacatggtactcttgttgagttctatagagccttctgatgtctctaaagcactaccgattctttggagttgtcacatcagataagacatatctctaattccatccataaatccagttctactatggctgagttctggtcaaagaaagaaagtttagaagctgagacacaaagggttgggagctgatgaaactcacaaatgatggtaggaagaagctctcgacaatacccgttggcaaggagtctgcctccatgctgcagtgttcgagtggattgtaggtgcaagatggaaaggattgtaggtgcaagctgtccagagaaaagagtccttgttccagccctattctgccactcctgacagggtgaccttgggtatttgcaatattcctttgggcctctgcttctctcacctaaaaaaagagaattagattatattggtggttctcagcaagagaaggagtatgtgtccaatgctgccttcccatgaatctgtctcccagttatgaatcagtgggcaggataaactgaaaactcccatttaagtgtctgaatcgagtgagacaaaattttagtccaaataacaagtaccaaagttttatcaagtttgggtctgtgctgctgttactgttaaccatttaagtggggcaaaaccttgctaattttctcaaaagcatttatcattcttgttgccacagctggagctctcaaactaaaagacatttgttattttggaaagaagaaagactctattctcaaagtttcctaatcagaaatttttatcagtttccagtctcaaaaatacaaaataaaaacaaacgtttttaatacta

SEQ ID NO: 373984 - DNA, 2748 bp, Homo sapiens
  misc_feature (2694)..(2694): n is a, c, g, or t
gctgagggagaaaggtccaaagggcgcgagcgcccagggcgctgggagcccgtgggacgggcacggggagggcagagccagccgaggggagcggctgccgggaggtgcgctgagcagggtccgcagctaaggtccagcgcgatccgagcgcccaggaccctgcggccgtggaggaggcgtgccctgggaaggagccgctactgggacctgaagaattttaggtgatgggcaagtcagaaagtcagatggatataactgatatcaacactccaaagccaaagaagaaacagcgatggactccactggagatcagcctctcggtccttgtcctgctcctcaccatcatagctgtgacaatgatcgcactctatgcaacctacgatgatggtatttgcaagtcatcagactgcataaaatcagctgctcgactgatccaaaacatggatgccaccactgagccttgtacagactttttcaaatatgcttgcggaggctggttgaaacgtaatgtcattcccgagaccagctcccgttacggcaactttgacattttaagagatgaactagaagtcgttttgaaagatgtccttcaagaacccaaaactgaagatatagtagcagtgcagaaagcaaaagcattgtacaggtcttgtataaatgaatctgctattgatagcagaggtggagaacctctactcaaactgttaccagacatatatgggtggccagtagcaacagaaaactgggagcaaaaatatggtgcttcttggacagctgaaaaagctattgcacaactgaattctaaatatgggaaaaaagtccttattaatttgtttgttggcactgatgataagaattctgtgaatcatgtaattcatattgaccaacctcgacttggcctcccttctagagattactatgaatgcactggaatctataaagaggcttgtacagcatatgtggattttatgatttctgtggccagattgattcgtcaggaagaaagattgcccatcgatgaaaaccagcttgctttggaaatgaataaagttatggaattggaaaaagaaattgccaatgctacggctaaacctgaagatcgaaatgatccaatgcttctgtataacaagatgacattggcccagatccaaaataacttttcactagagatcaatgggaagccattcagctggttgaatttcacaaatgaaatcatgtcaactgtgaatattagtattacaaatgaggaagatgtggttgtttatgctccagaatatttaaccaaacttaagcccattcttaccaaatattctgccagagatcttcaaaatttaatgtcctggagattcataatggatcttgtaagcagcctcagccgaacctacaaggagtccagaaatgctttccgcaaggccctttatggtacaacctcagaaacagcaacttggagacgttgtgcaaactatgtcaatgggaatatggaaaatgctgtggggaggctttatgtggaagcagcatttgctggagagagtaaacatgtggtcgaggatttgattgcacagatccgagaagtttttattcagactttagatgacctcacttggatggatgccgagacaaaaaagagagctgaagaaaaggccttagcaattaaagaaaggatcggctatcctgatgacattgtttcaaatgataacaaactgaataatgagtacctcgagttgaactacaaagaagatgaatacttcgagaacataattcaaaatttgaaattcagccaaagtaaacaactgaagaagctccgagaaaaggtggacaaagatgagtggataagtggagcagctgtagtcaatgcattttactcttcaggaagaaatcagatagtcttcccagccggcattctgcagccccccttctttagtgcccagcagtccaactcattgaactatgggggcatcggcatggtcataggacacgaaatcacccatggcttcgatgacaatggcagaaactttaacaaagatggagacctcgttgactggtggactcaacagtctgcaagtaactttaaggagcaatcccagtgcatggtgtatcagtatggaaacttttcctgggacctggcaggtggacagcaccttaatggaattaatacactgggagaaaacattgctgataatggaggtcttggtcaagcatacagagcctatcagaattatattaaaaagaatggcgaagaaaaattacttcctggacttgacctaaatcacaaacaactatttttcttgaactttgcacaggtgtggtgtggaacctataggccagagtatgcggttaactccattaaaacagatgtgcacagtccaggcaatttcaggattattgggactttgcagaactctgcagagttttcagaagcctttcactgccgcaagaattcatacatgaatccagaaaagaagtgccgggtttggtgatcttcaaaagaagcattgcagcccttggctagacttgccaacaccacagaaatggggaattctctaatcgaaagaaaatgggccctaggggtcactgtactgacttgagggtgattaacagagagggcaccatcacaatacagataacattaggttgtcctagaaagggtgtggagggaggaagggggtctaaggtctaaggttagttgtggcaatnaaaatgattaaggatactaatataagagatcaggttcgtcctcatgtcatacct

SEQ ID NO: 373985 - DNA, 324 bp, Homo sapiens
acattttctgtggctattattcagcctctttttttcagcaagccctactcctgtttcattggctcataaacaaagtggctaaggtggtagggatgaaagttatccatcgattcagcaaaagggtcttccattcaccaaaaccgatcaggttacaaccgctgctgagtgccctatctcccaacggcagaggccaacactgaaccctgaatacggttcaattccctggggaaatcagcccaccatctggtggcatgttgattacatgagaccacttctatcatgaaaggggcaatgatttgttgtcactgaagtagacatttactc

SEQ ID NO: 373986 - DNA, 482 bp, Homo sapiens
aggcctagcccagcatcacaggccaatgaagaaatatatccagcctgagcagctccaccaggagttgttcctgatgggacttcacctgctgagctcacagctgcgctcagggcagcctgtgcaccgtctcctggtctcagcagcccctccctgccccctgctcccaggtcagggctcagacaccacagggcagaggtactggcacctattcatgccttcctcagtgagggcctattctgggacgaacatcgggccccgactctggggctgggagatgggattttcccatgtgccagggaggaaatcaagggagtgtgatgaggtcaggctcagaggctcactcctgtggtcccagcactttgggaggccaaagcaggaggatcgctccagcccaggaggtcaaggctgtagtgagccatggtcaggcagttgcactccagcttgagtgactgagcaagaccccatctttaaaaataaaaaaa

SEQ ID NO: 373987 - DNA, 1353 bp, Homo sapiens
aatgaactttgggggacacattcaaaccacagcaccttccacaaaataaaagtaagtattgccacaactctttatttttaaccaaatctctgtaatgtcactctattcatagattaagatttgtacctccaagtccagtttgctcagattgggcagatgtcattaattagtcattaatcatctagaataatacatcttgtccacccaagatttcacatggtttttaatttgtaaacagtaaaatgtaacatgaagaagactattttaagtgctataataaaattaggttttgctaataggacaatgtgtttctcctcttaggtaacattttcacattaacagaggtcttctgggagacagtacctttactccaaaatttctggaaactatgttccacagaacactagtacttaatcctacttgaaggaaatgattttgtgaaacatgtatgagagctctgtgtactatatttcttgggggaaaaagtcacattatgtgcctatcaatatgaaagaaaatggagttttattttatttaactcagtgtaattcagacttcaccatagaactcccattcccaatacctattgcagatgtgattctactttggcagatgctgcgataaccaaaaggacttcgaagatgaaaatgtcagcattatggcagatgtatgattactggtatggtgaggaaagcaactcccatcatgctttgtaaccagctgcttgctttttttgaatgatacttttcaatagaatagaaagcccactagtcctatcttttatatatacattatatgtatttaaactttcttattgatcaatatttaggtgataagcattttctcactgtgaaaaataccttattgaataggtctgtgtttattactgtacataagcaagagtttctctaaggtatttatcaaaagtaggattgctcagtcatagttaatatttactttcaacctcactagatactgtcatagaagtagagagcatcagtatgctcccagtgcacaatcccttcaaccagtgaaatatgttttccttatttccttatatccttacttctggtatgcatagtaatattttcctggttaatagtgaattgggcatattttcacatctgaatattggctaaacgctgtaacttgccaatttatgtctttgcctgtgttcctttaaaaaagcttttaaaatataagaattataagattcttaaaaaataaaattctagatagtagtcctttgttataaatggacttaccttctcccatattgtatttatgttgatattgtcatatgaatacgttaaatgtggatacaatcatagctttcattattacctaataatc

SEQ ID NO: 373988 - DNA, 1706 bp, Homo sapiens
tggatcgtgttgcgttcggcttcgtactgtggctggtgctgttcgcgtggtgctcgtggtccgcttgcagcgcggtcgctgcactgttgctcttccccttcggtcgctgtggttgcgcgtgcgtcgtgcggttctgtgcggtcgtcttgtgtggttgtgcggttgtttgacttctctgcgcccggcgaattagataaagcggcgggagatttttgcgcggcgatagcgcgggtgccctgtgtctgggtgtttgtctcgggggtattgttctgggtgtgtgtccctttgtgcccccccggtgggggttctttcctaggtgtcgtcggtgggtggttctcgctctgcgtgtgtgtttgtggcgcgctgttttggtttttggctctcttattggcccctttttcatagaatgtgggtgtgcgctttgtgtgtccccctgggtggttttttgtgcgcccccccctctgtgttgttgtgtgttttgtgtttgtttgtggttgtttgggtgtgttgttgtttttttttttttttttttttttttgttttgttctcaaaaaacctgctttattcttagaggcagaaagtaacacttcacattcagatgattcagcatccagcagttctgaggaaagtgaggaaagagacactaagaaaaccaaaaggaaaaagagagagaaaaaagcccatacctctgtagccaacaatgaaatacaggagaggacaaacaaacgcacaaattggaaagtagctacagatgaaaggtctgctgagagctcagaggatgactaaatgggaaacacttttgttttccacatgactgtggatatttacagttcttactccttgtggttttgccagtgactcttgttcagcacggggcctgaggtcagagctgtcttgtgccatctgtatgttctgacagacgtcttgtcttctattttggcgttaagcttgatccccttttcttgttaaaagggaatctggtattttgttatgaaggtttcttgaagagatttttttttttgcaattaattacgtttagtgtagagtgcatatacagcaaattaaaggacccagaaagctggatccaatagtgacctgggtacaccaatcggaatattgaatttggggaagtcaagggctgggatcaagaggtggattggaactaatgccatgtaggatggtatgacaaggcaacactgtattgctctctgtttatatagcaggtgtcacaactaacttgtctttagccttggtgctttgatccttctatattttgaccccacaggtgtggtccggtttacttaatcaggacatgggcctaagaacaaaccttttcccttcatgataacatccatagacaacttattagaagggactagagtttttgcaaatttccctgctggatggggcctatagctatacttagtatatgcctaaacatggtaattggatagtaaatggttttctagttccattgctgtatatttgcctaaatggacttgtgttcaaattatttcttcaattgtcatagataatcctgtaccaaatggggaagaattaggaaataatcatgttgtctaatggtactctggattcagggcagcaactgccatttaaatgttgtcttgttcatttctaaatctgttcatgaagtttaggttttccctgaaactaagttgaattatttccaaaatgaaacaggcttc

SEQ ID NO: 373989 - DNA, 1901 bp, Homo sapiens
ccctggaccacttcttcccccctaccccccgccacgcgaggcgtgcggcgcacgcaagatgccgtgatttcctcaggatcaagggattgaagaatgtcccggattccactggggaaggtcctcctgaggaatgtcatccggcacacagatgctcacaataaggtgggagattcaggaggaatcagatatgtggaaaataagagaactggaaaaacagatggaagatgcttaccgggggaccaaaaggaaaatgctacccagcagttcaagccggatgcgcagtgatggttttgatgaagaaagtcaaagatactattggaggccaaagaatgaaatttctgggacactggaagatgattttcttaaggctaaatcctggaataaaaagttctatgattatgaagcaaacatgccagacagatggggtcacagtggttataaagagttataccctgaagaatttgaaacagacagtagtgatcagcaagatattaccaacgggaagaaaacatctccccaggtaaagtcatctacccatgaatcccgcaaacacaagaagtcaaagaaatcccacaaaaaaaagcagaaaaaaaggtcacacaaaaaacagaagaaaagcaaaaaggaagccacagatataacagcagattcctcgagtgagttctcagaagaaactggggcttctggtacaaggaaagggaaacaaccacataaacgcaagaaaaaatccaggaaaaagttctcaaaaaacctgctttattcttagaggcagaaagtaacacttcacattcagatgattcagcatccagcagttctgaggaaagtgaggaaagagacactaagaaaaccaaaaggaaaaagagagagaaaaaagcccatacctctgtagccaacaatgaaatacaggagaggacaaacaaacgcacaaattggaaagtagctacagatgaaaggtctgctgagagctcagaggatgactaaatgggaaacacttttgttttccacatgactgtggatatttacagttcttactccttgtggttttgccagtgactcttgttcagcacggggcctgaggtcagagctgtcttgtgccatctgtatgttctgacagacgtcttgtcttctattttggcgttaagcttgatccccttttcttgttaaaagggaatctggtattttgttatgaaggtttcttgaagagatttttttttttgcaattaattacgtttagtgtagagtgcatatacagcaaattaaaggacccagaaagctggatccaatagtgacctgggtacaccaatcggaatattgaatttggggaagtcaagggctgggatcaagaggtggattggaactaatgccatgtaggatggtatgacaaggcaacactgtattgctctctgtttatatagcaggtgtcacaactaacttgtctttagccttggtgctttgatccttctatattttgaccccacaggtgtggtccggtttacttaatcaggacatgggcctaagaacaaaccttttcccttcatgataacatccatagacaacttattagaagggactagagtttttgcaaatttccctgctggatggggcctatagctatacttagtatatgcctaaacatggtaattggatagtaaatggttttctagttccattgctgtatatttgcctaaatggacttgtgttcaaattatttcttcaattgtcatagataatcctgtaccaaatggggaagaattaggaaataatcatgttgtctaatggtactctggattcagggcagcaactgccatttaaatgttgtcttgttcatttctaaatctgttcatgaagtttaggttttccctgaaactaagttgaattatttccaaaatgaaacaggcttc

SEQ ID NO: 373990 - DNA, 1298 bp, Homo sapiens
ccagttagtacactgaaattcaaagtcatgctcataactgttaatgaaagcagattcaaagcaacaccaccaccactgaagtatttttagttatataagattggaactaccaagcatgtggctcctggtcagtgtaattctaatctcacggatatcctctgttgggggagaagcaacattttgtgattttccaaaaataaaccatggaattctatatgatgaagaaaaatataagccattttcccaggttcctacaggggaagttttctattactcctgtgaatataattttgtgtctccttcaaaatcattttggactcgcataacatgcacagaagaaggatggtcaccaacaccaaagtgtctcagactgtgtttctttccttttgtggaaaatggtcattctgaatcttcaggacaaacacatctggaaggtgatactgtgcaaattatttgcaacacaggatacagacttcaaaacaatgagaacaacatttcatgtgtagaacggggctggtccacccctcccaaatgcaggtccactgacacttcctgtgtgaatccgcccacagtacaaaatgctcatatactgtcgagacagatgagtaaatatccatctggtgagagagtacgttatgaatgtaggagcccttatgaaatgtttggggatgaagaagtgatgtgtttaaatggaaactggacagaaccacctcaatgcaaagattctacgggaaaatgtgggccccctccacctattgacaatggggacattacttcattcccgttgtcagtatatgctccagcttcatcagttgagtaccaatgccagaacttgtatcaacttgagggtaacaagcgaataacatgtagaaatggacaatggtcagaaccaccaaaatgcttacatccgtgtgtaatatcccgagaaattatggaaaattataacatagcattaaggtggacagccaaacagaagctttattcgagaacaggtgaatcagttgaatttgtgtgtaaacggggatatcgtctttcatcacgttctcacacattgcgaacaacatgttgggatgggaaactggagtatccaacttgtgcaaaaagatagaatcaatcataaagtgcacacctttattcagaactttagtattaaatcagttctcaatttcatttttatgtattgttttactcctttttattcatacgtaaaattttggattaatttgtgaaaatgtaattataagctgagaccggtggctctcttcttaaaagcaccatattaaatcctggaaaactaa

SEQ ID NO: 373991 - DNA, 673 bp, Homo sapiens
  misc_feature (15)..(15): n is a, c, g, or t
  misc_feature (77)..(77): n is a, c, g, or t
ctcatgtcctgtccnatggcagacccagtcaatgaaagtgcgagcagagagtaataccttggtagaaatgaaactgncggacccacctcaatcagagattctacgggaaaatgtgggccccctccacctattgacaatggggacattacttcattcccgttgtcagtatatgctccagcttcatcagttgagtaccaatgccagaacttgtatcaacttgagggtaacaagcgaataacatgtagaaatggacaatggtcagaaccaccaaaatgcttacatccgtgtgtaatatcccgagaaattatggaaaattataacatagcattaaggtggacagccaaacagaagctttattcgagaacaggtgaatcagttgaatttgtgtgtaaacggggatatcgtctttcatcacgttctcacacattgcgaacaacatgttgggatgggaaactggagtatccaacttgtgcaaaaagatagaatcaatcataaagtgcacacctttattcagaactttagtattaaatcagttctcaatttcatttttatgtattgttttactcctttttattcatacgtaaaattttggattaatttgtgaaaatgtaattataagctgagaccggtggctctcttcttaaaagcaccatattaaatcctggaaaactaa

SEQ ID NO: 373992 - DNA, 1311 bp, Homo sapiens
cacacttggtaactaatgaatgaaagatttcaaaccccaaacagtgcaactgaaacttttgtattagcatactactgagaatatctaacatgttgttactaatcaatgtcattctgaccttgtgggtttcctgtgctaatggacaagtgaaaccttgtgattttccagacattaaacatggaggtctatttcatgagaatatgcgtagaccatactttccagtagctgtaggaaaatattactcctattactgtgatgaacattttgagactccttcaggaagttactgggattacattcattgcacacaaaatgggtggtcaccagcagtaccatgtctcagaaaatgttattttccttatttggaaaatggatataatcaaaattatggaagaaagtttgtacagggtaactctacagaagttgcctgccatcctggctacggtcttccaaaagcgcagaccacagttacatgtacggagaaaggctggtctcctactcccagatgcatccgtgtcagaacatgctcaaaatcagatatagaaattgaaaatggattcatttctgaatcttcctctatttatattttaaataaagaaatacaatataaatgtaaaccaggatatgcaacagcagatggaaattcttcaggatcaattacatgtttgcaaaatggatggtcagcacaaccaatttgcattaattcttcagaaaagtgtgggcctcctccacctattagcaatggtgataccacctcctttctactaaaagtgtatgtgccacagtcaagagtcgagtaccaatgccagccctactatgaacttcagggttctaattatgtaacatgtagtaatggagagtggtcggaaccacctagatgcatacatccatgtataataactgaagaaaacatgaataaaaataacataaagttaaaaggaagaagtgacagaaaatattatgcaaaaacaggggataccattgaatttatgtgtaaattgggatataatgcaaatacatcaattctatcatttcaagcagtgtgtcgggaagggatagtggaataccccagatgcgaataaggcagcattgttaccctaaatgtatgtccaacttccacttttccacttctcactcttatggtctcaaagcttgcaaagatagcttctgatattgttgtaatttctactttatttcaaagaaaattaatataatagtttcaatttgcaacttaatatattctcaaaaatatattaaaacaaactaaattattgcttatgcttgtactaaaataataaaaactactcttat

SEQ ID NO: 373993 - DNA, 583 bp, Homo sapiens
ttgaaatgctaacgtcagtatgtagcacaagttaataactattaactatttggattattttataattttattttatcctaaactactcattaggatgcattttatttgctcatgaaagagaaaattatgattgttaattgtttttttctgctttcagatccatgtataataactgaagaaaacatgaataaaaataacataaagttaaaaggaagaagtgacagaaaatattatgcaaaaacaggggataccattgaatttatgtgtaaattgggatataatgcaaatacatcaattctatcatttcaagcagtgtgtcgggaagggatagtggaataccccagatgcgaataaggcagcattgttaccctaaatgtatgtccaacttccacttttccacttctcactcttatggtctcaaagcttgcaaagatagcttctgatattgttgtaatttctactttatttcaaagaaaattaatataatagtttcaatttgcaacttaatatattctcaaaaatatattaaaacaaactaaattattgcttatgcttgtactaaaataataaaaactactcttat

SEQ ID NO: 373994 - DNA, 725 bp, Homo sapiens
caggattcggcacgaggacaagtgaaaccttgtgattttccagacattaaacatggaggtctatttcatgagaatatgcgtagaccatactttccagtagctgtaggaaaatattactcctattactgtgatgaacattttgagactccttcaggaagttactgggattacattcattgcacacaaaatgggtggtcaccagcagtaccatgtctcagaaaatgttattttccttatttggaaaatggatataatcaaaattatggaagaaagtttgtacagggtaactctacagaagttgcctgccatcctggctacggtcttccaaaagcgcagaccacagttacatgtacggagaaaggctggtctcctactcccagatgcatccgtgtcagaacatgctcaaaatcagatatagaaattgaaaatggattcatttctgaatcttcctctatttatattttaaataaagaaatacaatataaatgtaaaccaggatatgcaacagcagatggaaattcttcaggatcaattacatgtttgcaaaatggatggtcagcacaaccaatttgcattactgcttgtattgcattccgtgctcacgctcagaaaaagttgtacatgtcgggggagaaatgagtgcttaattctgaatttctgctagcgtcaggagaatcagaccttaataatttgtatcaatgatgctactgaggatatccaatcaa

SEQ ID NO: 373995 - DNA, 785 bp, Homo sapiens
  misc_feature (544)..(544): n is a, c, g, or t
  misc_feature (551)..(552): n is a, c, g, or t
  misc_feature (638)..(638): n is a, c, g, or t
ttgaaatgctaacgtcagtatgtagcacaagttaataactattaactatttggattattttataattttattttatcctaaactactcattaggatgcattttatttgctcatgaaagagaaaattatgattgttaattgtttttttctgctttcagatccatgtataataactgaagaaaacatgaataaaaataacataaagttaaaaggaagaagtgacagaaaatattatgcaaaaacaggggataccattgaatttatgtgtaaattgggatataatgcaaatacatcaattctatcatttcaagcagtgtgtcgggaagggatagtggaataccccagatgcgaataaggcagcattgttaccctaaatgtatgtccaacttccacttttccacttctcactcttatggtctcaaagcttgcaaagatagcttctgatattgttgtaatttctactttatttcaaagaaaattaatataatagtttcaatttgcaacttaatatattctcaaaaatatattaaaacaaactaaattgnaaagatnnaagaaaaactcgaggaggggaccggtacccaattcgcactatagagagtcggattacaattcacatggcgtggatatacaaacgtntagactgtgaccctggggttacccaacattaattgccttgcagtacattcgcctttcgccagatggtgtaataacgaataggcccggaccgaacggattttcaacagtgagcaagctgaatgtgcaatggcatttgtgcgtttttgt

SEQ ID NO: 373996 - DNA, 311 bp, Homo sapiens
gcacgagcgctctctctctctctctctctctctctctctctctctctctctctctctctctctctctctctctctctctctctctctctctggactttatttcaaagaaaattaatataatagtttcaatttgcaacttaatatattctcaaaaatatattaaaacaaactaaattattgcttatgcttgtactaaaataataaaaactactcttatattggacttcttatcaatgaattagtaagtatagagacagacagctgaatggctttctgcatattgtatagtatacctagacatagaaacaaaa

SEQ ID NO: 373997 - DNA, 1295 bp, Homo sapiens
aagcagtggtatcaacgagagtggccattacggctggggaatgaaagcagattcaaagcaacaccaccaccactgaagtatttttagttatataagattggaactaccaagcatgtggctcctggtcagtgtaattctaatctcacggatatcctctgttgggggagaagcaacattttgtgattttccaaaaataaaccatggaattctatatgatgaagaaaaatataagccattttcccaggttcctacaggggaagttttctattactcctgtgaatataattttgtgtctccttcaaaatcattttggactcgcataacatgcacagaagaaggatggtcaccaacaccaaagtgtctcagactgtgtttctttccttttgtggaaaatggtcattctgaatcttcaggacaaacacatctggaaggtgatactgtgcaaattatttgcaacacaggatacagacttcaaaacaatgagaacaacatttcatgtgtagaacggggctggtccacccctcccaaatgcaggtccactgacacttcctgtgtgaatccgcccacagtacaaaatgctcatatactgtcgagacagatgagtaaatatccatctggtgagagagtacgttatgaatgtaggagcccttatgaaatgtttggggatgaagaagtgatgtgtttaaatggaaactggacagaaccacctcaatgcaaagattctacgggaaaatgtgggccccctccacctattgacaatggggacattacttcattcccgttgtcagtatatgctccagcttcatcagttgagtaccaatgccagaacttgtatcaacttgagggtaacaagcgaataacatgtagaaatggacaatggtcagaaccaccaaaatgcttacatccgtgtgtaatatcccgagaaattatggaaaattataacatagcattaaggtggacagccaaacagaagctttattcgagaacaggtgaatcagttgaatttgtgtgtaaacggggatatcgtctttcatcacgttctcacacattgcgaacaacatgttgggatgggaaactggagtatccaacttgtgcaaaaagatagaatcaatcataaagtgcacacctttattcagaactttagtattaaatcagttctcaatttcatttttatgtattgttttactcctttttattcatacgtaaaattttggattaatttgtgaaaatgtaattataagctgagaccggtggctctcttcttaaaagcaccatattaaatcctggaaaactaa

SEQ ID NO: 373998 - DNA, 1652 bp, Homo sapiens
tttgtaaccagaaaatattcaaaatgatattaataaacaaaaaacaaaactacatatccaacatctttactgcaccagaaaaaaaaataggacagagtttctggcagagacacctatggcagtcaatgagaatagagaaaataagtaaattgagagctaagaacaaccctatcacttttctactgtatactatgtagatcaggaagatttgctactcttacactctgtcttcattcttaaattgttgtgtgtgggttttattcttgaagacaatgcaggagagttcatatttcatatcactccaaaatataaattttatattcattaacaattacctcctcaaatagtcatgtactcctagttagtgatgcttttcattcctaatttgtacactggaaagcatttaagctaaaggcatttaagctaaatgaaagaaaaacactataagtgagatgattaaaatataatctagtgatttatttatgtaacttattatgtaattcttcagttttatgttattttcccagcaacattttgtgattttccaaaaataaaccatggaattctatatgatgaagaaaaatataagccattttcccaggttcctacaggggaagttttctattactcctgtgaatataattttgtgtctccttcaaaatcattttggactcgcataacatgcacagaagaaggatggtcaccaacaccaaagtgtctcagactgtgtttctttccttttgtggaaaatggtcattctgaatcttcaggacaaacacatctggaaggtgatactgtgcaaattatttgcaacacaggatacagacttcaaaacaatgagaacaacatttcatgtgtagaacggggctggtccacccctcccaaatgcaggtccactgacacttcctgtgtgaatccgcccacagtacaaaatgctcatatactgtcgagacagatgagtaaatatccatctggtgagagagtacgttatgaatgtaggagcccttatgaaatgtttggggatgaagaagtgatgtgtttaaatggaaactggacagaaccacctcaatgcaaagattctacgggaaaatgtgggccccctccacctattgacaatggggacattacttcattcccgttgtcagtatatgctccagcttcatcagttgagtaccaatgccagaacttgtatcaacttgagggtaacaagcgaataacatgtagaaatggacaatggtcagaaccaccaaaatgcttacatccgtgtgtaatatcccgagaaattatggaaaattataacatagcattaaggtggacagccaaacagaagctttattcgagaacaggtgaatcagttgaatttgtgtgtaaacggggatatcgtctttcatcacgttctcacacattgcgaacaacatgttgggatgggaaactggagtatccaacttgtgcaaaaagatagaatcaatcataaagtgcacacctttattcagaactttagtattaaatcagttctcaatttcatttttatgtattgttttactcctttttattcatacgtaaaattttggattaatttgtgaaaatgtaattataagctgagaccggtggctctcttcttaaaagcaccatattaaatcctggaaaactaa

SEQ ID NO: 373999 - DNA, 1314 bp, Homo sapiens
aagcagtggtatcaacgagagtggccattacggctggggaatgaaagcagattcaaagcaacaccaccaccactgaagtatttttagttatataagattggaactaccaagcatgtggctcctggtcagtgtaattctaatctcacggatatcctctgttgggggagaagttttatgttattttcccagcaacattttgtgattttccaaaaataaaccatggaattctatatgatgaagaaaaatataagccattttcccaggttcctacaggggaagttttctattactcctgtgaatataattttgtgtctccttcaaaatcattttggactcgcataacatgcacagaagaaggatggtcaccaacaccaaagtgtctcagactgtgtttctttccttttgtggaaaatggtcattctgaatcttcaggacaaacacatctggaaggtgatactgtgcaaattatttgcaacacaggatacagacttcaaaacaatgagaacaacatttcatgtgtagaacggggctggtccacccctcccaaatgcaggtccactgacacttcctgtgtgaatccgcccacagtacaaaatgctcatatactgtcgagacagatgagtaaatatccatctggtgagagagtacgttatgaatgtaggagcccttatgaaatgtttggggatgaagaagtgatgtgtttaaatggaaactggacagaaccacctcaatgcaaagattctacgggaaaatgtgggccccctccacctattgacaatggggacattacttcattcccgttgtcagtatatgctccagcttcatcagttgagtaccaatgccagaacttgtatcaacttgagggtaacaagcgaataacatgtagaaatggacaatggtcagaaccaccaaaatgcttacatccgtgtgtaatatcccgagaaattatggaaaattataacatagcattaaggtggacagccaaacagaagctttattcgagaacaggtgaatcagttgaatttgtgtgtaaacggggatatcgtctttcatcacgttctcacacattgcgaacaacatgttgggatgggaaactggagtatccaacttgtgcaaaaagatagaatcaatcataaagtgcacacctttattcagaactttagtattaaatcagttctcaatttcatttttatgtattgttttactcctttttattcatacgtaaaattttggattaatttgtgaaaatgtaattataagctgagaccggtggctctcttcttaaaagcaccatattaaatcctggaaaactaa

SEQ ID NO: 374000 - DNA, 1221 bp, Homo sapiens
aagcagtggtatcaacgagagtggccattacggctggggaatgaaagcagattcaaagcaacaccaccaccactgaagtatttttagttatataagattggaactaccaagcatgtggctcctggtcagtgtaattctaatctcacggatatcctctgttgggggagaaggttcctacaggggaagttttctattactcctgtgaatataattttgtgtctccttcaaaatcattttggactcgcataacatgcacagaagaaggatggtcaccaacaccaaagtgtctcagactgtgtttctttccttttgtggaaaatggtcattctgaatcttcaggacaaacacatctggaaggtgatactgtgcaaattatttgcaacacaggatacagacttcaaaacaatgagaacaacatttcatgtgtagaacggggctggtccacccctcccaaatgcaggtccactgacacttcctgtgtgaatccgcccacagtacaaaatgctcatatactgtcgagacagatgagtaaatatccatctggtgagagagtacgttatgaatgtaggagcccttatgaaatgtttggggatgaagaagtgatgtgtttaaatggaaactggacagaaccacctcaatgcaaagattctacgggaaaatgtgggccccctccacctattgacaatggggacattacttcattcccgttgtcagtatatgctccagcttcatcagttgagtaccaatgccagaacttgtatcaacttgagggtaacaagcgaataacatgtagaaatggacaatggtcagaaccaccaaaatgcttacatccgtgtgtaatatcccgagaaattatggaaaattataacatagcattaaggtggacagccaaacagaagctttattcgagaacaggtgaatcagttgaatttgtgtgtaaacggggatatcgtctttcatcacgttctcacacattgcgaacaacatgttgggatgggaaactggagtatccaacttgtgcaaaaagatagaatcaatcataaagtgcacacctttattcagaactttagtattaaatcagttctcaatttcatttttatgtattgttttactcctttttattcatacgtaaaattttggattaatttgtgaaaatgtaattataagctgagaccggtggctctcttcttaaaagcaccatattaaatcctggaaaactaa

SEQ ID NO: 374001 - DNA, 1136 bp, Homo sapiens
ccagttagtacactgaaattcaaagtcatgctcataactgttaatgaaagcagattcaaagcaacaccaccaccactgaagtatttttagttatataagattggaactaccaagcatgtggctcctggtcagtgtaattctaatctcacggatatcctctgttgggggagaagaagaaggatggtcaccaacaccaaagtgtctcagactgtgtttctttccttttgtggaaaatggtcattctgaatcttcaggacaaacacatctggaaggtgatactgtgcaaattatttgcaacacaggatacagacttcaaaacaatgagaacaacatttcatgtgtagaacggggctggtccacccctcccaaatgcaggtccactgacacttcctgtgtgaatccgcccacagtacaaaatgctcatatactgtcgagacagatgagtaaatatccatctggtgagagagtacgttatgaatgtaggagcccttatgaaatgtttggggatgaagaagtgatgtgtttaaatggaaactggacagaaccacctcaatgcaaagattctacgggaaaatgtgggccccctccacctattgacaatggggacattacttcattcccgttgtcagtatatgctccagcttcatcagttgagtaccaatgccagaacttgtatcaacttgagggtaacaagcgaataacatgtagaaatggacaatggtcagaaccaccaaaatgcttacatccgtgtgtaatatcccgagaaattatggaaaattataacatagcattaaggtggacagccaaacagaagctttattcgagaacaggtgaatcagttgaatttgtgtgtaaacggggatatcgtctttcatcacgttctcacacattgcgaacaacatgttgggatgggaaactggagtatccaacttgtgcaaaaagatagaatcaatcataaagtgcacacctttattcagaactttagtattaaatcagttctcaatttcatttttatgtattgttttactcctttttattcatacgtaaaattttggattaatttgtgaaaatgtaattataagctgagaccggtggctctcttcttaaaagcaccatattaaatcctggaaaactaa

SEQ ID NO: 374002 - DNA, 1225 bp, Homo sapiens
ccagttagtacactgaaattcaaagtcatgctcataactgttaatgaaagcagattcaaagcaacaccaccaccactgaagtatttttagttatataagattggaactaccaagcatgtggctcctggtcagtgtaattctaatctcacggatatcctctgttgggggagaagcaacattttgtgattttccaaaaataaaccatggaattctatatgatgaagaaaaatataagccattttcccaggttcctacaggggaagttttctattactcctgtgaatataattttgtgtctccttcaaaatcattttggactcgcataacatgcacagaagaaggatggtcaccaacaccaaagtgtctcatgtgcaaattatttgcaacacaggatacagacttcaaaacaatgagaacaacatttcatgtgtagaacggggctggtccacccctcccaaatgcaggtccactgacacttcctgtgtgaatccgcccacagtacaaaatgctcatatactgtcgagacagatgagtaaatatccatctggtgagagagtacgttatgaatgtaggagcccttatgaaatgtttggggatgaagaagtgatgtgtttaaatggaaactggacagaaccacctcaatgcaaagattctacgggaaaatgtgggccccctccacctattgacaatggggacattacttcattcccgttgtcagtatatgctccagcttcatcagttgagtaccaatgccagaacttgtatcaacttgagggtaacaagcgaataacatgtagaaatggacaatggtcagaaccaccaaaatgcttacatccgtgtgtaatatcccgagaaattatggaaaattataacatagcattaaggtggacagccaaacagaagctttattcgagaacaggtgaatcagttgaatttgtgtgtaaacggggatatcgtctttcatcacgttctcacacattgcgaacaacatgttgggatgggaaactggagtatccaacttgtgcaaaaagatagaatcaatcataaagtgcacacctttattcagaactttagtattaaatcagttctcaatttcatttttatgtattgttttactcctttttattcatacgtaaaattttggattaatttgtgaaaatgtaattataagctgagaccggtggctctcttcttaaaagcaccatattaaatcctggaaaactaa

SEQ ID NO: 374003 - DNA, 1330 bp, Homo sapiens
ccagttagtacactgaaattcaaagtcatgctcataactgttaatgaaagcagattcaaagcaacaccaccaccactgaagtatttttagttatataagattggaactaccaagcatgtggctcctggtcagtgtaattctaatctcacggatatcctctgttgggggagaagcaacattttgtgattttccaaaaataaaccatggaattctatatgatgaagaaaaatataagccattttcccaggttcctacaggggaagttttctattactcctgtgaatataattttgtgtctccttcaaaatcattttggactcgcataacatgcacagaagaaggatggtcaccaacaccaaagtgtctcagactgtgtttctttccttttgtggaaaatggtcattctgaatcttcaggacaaacacatctggaaggtgatactgtgcaaattatttgcaacacaggatacagacttcaaaacaatgagaacaacatttcatgtgtagaacggggctggtccacccctcccaaatgcaggtccactgacacttcctgtgtgaatccgcccacagtacaaaatgctcatatactgtcgagacagatgagtaaatatccatctggtgagagagtacgttatgaatgtaggagcccttatgaaatgtttggggatgaagaagtgatgtgtttaaatggaaactggacagaaccacctcaatgcaaagattctacgggaaaatgtgggccccctccacctattgacaatggggacattacttcattcccgttgtcagtatatgctccagcttcatcagttgagtaccaatgccagaacttgtatcaacttgagggtaacaagcgaataacatgtagaaatggacaatggtcagaaccaccaaaatgcttacatccgtgtgtaatatcccgagaaattatggaaaattataacatagcattaaggtggacagccaaacagaagctttattcgagaacaggtgaatcagttgaatttgtgtgtaaacggggatatcgtctttcatcacgttctcacacattgcgaacaacatgttgggatgggaaactggagtatccaacttgtgcaaaaagatagaatcaatcataaagtgcacacctttattcagaactttagtattaaatcagttctcaatttcatttttatgtattgttttactcctttttattcatacgtaaaattttggattaatttgtgaaaatgtaattataagctgagaccggtggctctcttcttaaaagcaccatattaaatcctggaaaactaactgttgtgtccagttcataaaatgtttgtggc

SEQ ID NO: 374004 - DNA, 1248 bp, Homo sapiens
ccagttagtacactgaaattcaaagtcatgctcataactgttaatgaaagcagattcaaagcaacaccaccaccactgaagtatttttagttatataagattggaactaccaagcatgtggctcctggtcagtgtaattctaatctcacggatatcctctgttgggggagaagcaacattttgtgattttccaaaaataaaccatggaattctatatgatgaagaaaaatataagccattttcccaggttcctacaggggaagttttctattactcctgtgaatataattttgtgtctccttcaaaatcattttggactcgcataacatgcacagaagaaggatggtcaccaacaccaaagtgtctcagactgtgtttctttccttttgtggaaaatggtcattctgaatcttcaggacaaacacatctggaaggtgatactgtgcaaattatttgcaacacaggatacagacttcaaaacaatgagaacaacatttcatgtgtagaacggggctggtccacccctcccaaatgcaggtccactgacacttcctgtgtgaatccgcccacagtacaaaatgctcatatactgtcgagacagatgagtaaatatccatctggtgagagagtacgttatgaatgtaggagcccttatgaaatgtttggggatgaagaagtgatgtgtttaaatggaaactggacagaaccacctcaatgcaaagattctacgggaaaatgtgggccccctccacctattgacaatggggacattacttcattcccgttgtcagtatatgctccagcttcatcagttgagtaccaatgccagaacttgtatcaacttgagggtaacaagcgaataacatgtagaaatggacaatggtcagaaccaccaaaatgcttacatccgtgtgtaatatcccgagaaattatggaaaataggtgaatcagttgaatttgtgtgtaaacggggatatcgtctttcatcacgttctcacacattgcgaacaacatgttgggatgggaaactggagtatccaacttgtgcaaaaagatagaatcaatcataaagtgcacacctttattcagaactttagtattaaatcagttctcaatttcatttttatgtattgttttactcctttttattcatacgtaaaattttggattaatttgtgaaaatgtaattataagctgagaccggtggctctcttcttaaaagcaccatattaaatcctggaaaactaa

SEQ ID NO: 374005 - DNA, 989 bp, Homo sapiens
  misc_feature (873)..(873): n is a, c, g, or t
  misc_feature (892)..(892): n is a, c, g, or t
  misc_feature (971)..(971): n is a, c, g, or t
ccagttagtacactgaaattcaaagtcatgctcataactgttaatgaaagcagattcaaagcaacaccaccaccactgaagtatttttagttatataagattggaactaccaagcatgtggctcctggtcagtgtaattctaatctcacggatatcctctgttgggggagaagcaacattttgtgattttccaaaaataaaccatggaattctatatgatgaagaaaaatataagccattttcccaggttcctacaggggaagttttctattactcctgtgaatataattttgtgtctccttcaaaatcattttggactcgcataacatgcacagaagaaggatggtcaccaacaccaaagtgtctcagactgtgtttctttccttttgtggaaaatggtcattctgaatcttcaggacaaacacatctggaaggtgatactgtgcaaattatttgcaacacaggatacagacttcaaaacaatgagaacaacatttcatgtgtagaacggggctggtccacccctcccaaatgcaggtccactgacacttcctgtgtgaatccgcccacagtacaaaatgctcatatactgtcgagacagatgagtaaatatccatctggtgagagagtacgttatgaatgtaggagcccttatgaaatgtttggggatgaagaagtgatgtgtttaaatggaaactggacagaaccacctcaatgcaaagattcccgttgtcagtatatgctccagcttcatcagttgagtaccaatgccagaacttgtatcaacttgagggtaacaagcgaataacatgtagaaatggacaatggtcagaaccaccaaaatgcttacggtggcagcaacagaacttattnggacagtgatcactgattnggtgaacgggattcgcttcatacgtctaccattggacacatgtggatggaactgagttcactgtcggatgacatctaantgccactatagactgttt

SEQ ID NO: 374006 - DNA, 988 bp, Homo sapiens
taagtattttattcaagtattttttattagaattaaataaaataataaatagacacctacatatgtatatgtacacatatgtgtgtacatatatgtacatatatatgtagtcctcctatgagtgtgaattatcttgagacttaaaaagaaaaaacaacgttgaaaatgcagatgtcttcctaagaaatcaaataagatacagttaagagtatataaaaagctttatttagaaagtttccaataagactattgatttttccccacatataaagtattttttttcagattcttcagaaaagtgtgggcctcctccacctattagcaatggtgataccacctcctttctactaaaagtgtatgtgccacagtcaagagtcgagtaccaatgccagccctactatgaacttcagggttctaattatgtaacatgtagtaatggagagtggtcggaaccacctagatgcatacatccatgtataataactgaagaaaacatgaataaaaataacataaagttaaaaggaagaagtgacagaaaatattatgcaaaaacaggggataccattgaatttatgtgtaaattgggatataatgcaaatacatcaattctatcatttcaagcagtgtgtcgggaagggatagtggaataccccagatgcgaataaggcagcattgttaccctaaatgtatgtccaacttccacttttccacttctcactcttatggtctcaaagcttgcaaagatagcttctgatattgttgtaatttctactttatttcaaagaaaattaatataatagtttcaatttgcaacttaatatattctcaaaaatatattaaaacaaactaaattattgcttatgcttgtactaaaataataaaaactactcttatattggacttcttatcaatgaattagtaagtatagagacagacagctgaatggctttctgcatattgtatagtatacctagacatagaaacaaaa

SEQ ID NO: 374007 - DNA, 694 bp, Homo sapiens
atgaatgaaagatttcaaaccccaaacagtgcaactgaaacttttgtattagcatactactgagaatatctaacatgttgttactaatcaatgtcattctgaccttgtgggtttcctgtgctaatggacaaggtaagttaaaagagatctaaacactcagcttccctcttaaatgtaacttcatgtaatatctagctttgtatgtctataattattttatgaatcaaagaggatttattcactatgctagtagaagtgacatattttgtgagagtataacagaaattaattttataaaaaattatctcattttaacttaaagaaaaaatgaataatgttttatttgttttctaagttctacagtgtaaaaggcatttaatattgattatggagatatgtgaatatactcatgaaactttaagtaggaaacatgtcattagacagattctaagcttaaaatgttcagaattttcctatacgtaatacaaggggaacattgggagtgactgatgttttcataatcttacatatggtgatttttatagatttatatatcaaaaaatcaaataatacattttaaattatgcagtttcttatatttctattatagcttaagaaagctgctaaaactaattaacattaatatcaacttactacgtcaacaaaattagcaacatacatatataatgaaaaa

SEQ ID NO: 374008 - DNA, 561 bp, Homo sapiens
atttcatctcttacaactcaatctgcctttacataaaagcaatcttatcatgtacagactagttagggagctgcatgagagtatcagcaaaatatgttagttgccaataaaaactttgttgtcttccctttctttgtatttcaaaattatcagctgcttgtattgcattccgtgctcacgctcagaaaaagttgtacatgtcgggggagaaatgagtgcttaattctgaatttctgctagcgtcaggagaatcagaccttaataatttgtatcaatgatgctactgaggatatccaatcaaaaaattatctctaccctattgtttactacagagaaaacaagtaaaggaaaagggtaagtgggtgggctgaatgtttacaaacctcatacttgccaatggattctttacatgtaaagttctctgaacgtgctcgacctttacttagtatgataaagagaatgcataatgaacaaaggaaatctttcagtggcaaaagttgattttttttctttcctctttatatattcacaaagagttttaaagataaattgctgaatgta

SEQ ID NO: 374009 - DNA, 805 bp, Homo sapiens
  misc_feature (711)..(711): n is a, c, g, or t
  misc_feature (725)..(725): n is a, c, g, or t
  misc_feature (743)..(743): n is a, c, g, or t
  misc_feature (785)..(785): n is a, c, g, or t
cacacttggtaactaatgaatgaaagatttcaaaccccaaacagtgcaactgaaacttttgtattagcatactactgagaatatctaacatgttgttactaatcaatgtcattctgaccttgtgggtttcctgtgctaatggacaagtgaaaccttgtgattttccagacattaaacatggaggtctatttcatgagaatatgcgtagaccatactttccagtagctgtaggaaaatattactcctattactgtgatgaacattttgagactccttcaggaagttactgggattacattcattgcacacaaaatgggtggtcaccagcagtaccatgtctcagaaaatgttattttccttatttggaaaatggatataatcaaaattatggaagaaagtttgtacagggtaactctacagaagttgcctgccatcctggctacggtcttccaaaagcgcagaccacagttacatgtacggagaaaggctggtctcctactcccagatgcatccgtgtcagaacatgctcaaaatcagatatagaaattgaaaatggattcatttctgaatcttcctctatttatattttaaataaagaaatacaatataaatgtaaaccaggatatgcaacagcagatggaaattcttcaggatcaattacatgtttgcaaaatggatggtcagcacaaccaatttgcattaatactgttngatgattcgtgtangctagaagtgacatgcgngagaatgatcgtatctattctgtacgtagaatcgactatatngatatgagtctgggatcatc

SEQ ID NO: 374010 - DNA, 832 bp, Homo sapiens
gccaagcgtggactgactctcttaactaccaccgctacacgaacatgctcaaaatcagatatagaaattgaaaatggattcatttctgaatcttcctctatttatattttaaataaagaaatacaatataaatgtaaaccaggatatgcaacagcagatggaaattcttcaggatcaattacatgtttgcaaaatggatggtcagcacaaccaatttgcattaattcttcagaaaagtgtgggcctcctccacctattagcaatggtgataccacctcctttctactaaaagtgtatgtgccacagtcaagagtcgagtaccaatgccagccctactatgaacttcagggttctaattatgtaacatgtagtaatggagagtggtcggaaccacctagatgcatacatccatgtataataactgaagaaaacatgaataaaaataacataaagttaaaaggaagaagtgacagaaaatattatgcaaaaacaggggataccattgaatttatgtgtaaattgggatataatgcaaatacatcaattctatcatttcaagcagtgtgtcgggaagggatagtggaataccccagatgcgaataaggcagcattgttaccctaaatgtatgtccaacttccacttttccacttctcactcttatggtctcaaagcttgcaaagatagcttctgatattgttgtaatttctactttatttcaaagaaaattaatataatagtttcaatttgcaacttaatatattctcaaaaatatattaaaacaaactaaattattgcttatgcttgtactaaaataataaaaactactcttat

SEQ ID NO: 374011 - DNA, 1238 bp, Homo sapiens
ccagttagtacactgaaattcaaagtcatgctcataactgttaatgaaagcagattcaaagcaacaccaccaccactgaagtatttttagttatataagattggaactaccaagcatgtggctcctggtcagtgtaattctaatctcacggatatcctctgttgggggagaagcaacattttgtgattttccaaaaataaaccatggaattctatatgatgaagaaaaatataagccattttcccaggttcctacaggggaagttttctattactcctgtgaatataattttgtgtctccttcaaaatcattttggactcgcataacatgcacagaagaaggatggtcaccaacaccaaagtgtctcagactgtgtttctttccttttgtggaaaatggtcattctgaatcttcaggacaaacacatctggaaggtgatactgtgcaaattatttgcaacacaggatacagacttcaaaacaatgacacttcctgtgtgaatccgcccacagtacaaaatgctcatatactgtcgagacagatgagtaaatatccatctggtgagagagtacgttatgaatgtaggagcccttatgaaatgtttggggatgaagaagtgatgtgtttaaatggaaactggacagaaccacctcaatgcaaagattctacgggaaaatgtgggccccctccacctattgacaatggggacattacttcattcccgttgtcagtatatgctccagcttcatcagttgagtaccaatgccagaacttgtatcaacttgagggtaacaagcgaataacatgtagaaatggacaatggtcagaaccaccaaaatgcttacatccgtgtgtaatatcccgagaaattatggaaaattataacatagcattaaggtggacagccaaacagaagctttattcgagaacaggtgaatcagttgaatttgtgtgtaaacggggatatcgtctttcatcacgttctcacacattgcgaacaacatgttgggatgggaaactggagtatccaacttgtgcaaaaagatagaatcaatcataaagtgcacacctttattcagaactttagtattaaatcagttctcaatttcatttttatgtattgttttactcctttttattcatacgtaaaattttggattaatttgtgaaaatgtaattataagctgagaccggtggctctcttcttaaaagcaccatattaaatcctggaaaactaa

SEQ ID NO: 374012 - DNA, 1103 bp, Homo sapiens
ccagttagtacactgaaattcaaagtcatgctcataactgttaatgaaagcagattcaaagcaacaccaccaccactgaagtatttttagttatataagattggaactaccaagcatgtggctcctggtcagtgtaattctaatctcacggatatcctctgttgggggagaaggactgtgtttctttccttttgtggaaaatggtcattctgaatcttcaggacaaacacatctggaaggtgatactgtgcaaattatttgcaacacaggatacagacttcaaaacaatgagaacaacatttcatgtgtagaacggggctggtccacccctcccaaatgcaggtccactgacacttcctgtgtgaatccgcccacagtacaaaatgctcatatactgtcgagacagatgagtaaatatccatctggtgagagagtacgttatgaatgtaggagcccttatgaaatgtttggggatgaagaagtgatgtgtttaaatggaaactggacagaaccacctcaatgcaaagattctacgggaaaatgtgggccccctccacctattgacaatggggacattacttcattcccgttgtcagtatatgctccagcttcatcagttgagtaccaatgccagaacttgtatcaacttgagggtaacaagcgaataacatgtagaaatggacaatggtcagaaccaccaaaatgcttacatccgtgtgtaatatcccgagaaattatggaaaattataacatagcattaaggtggacagccaaacagaagctttattcgagaacaggtgaatcagttgaatttgtgtgtaaacggggatatcgtctttcatcacgttctcacacattgcgaacaacatgttgggatgggaaactggagtatccaacttgtgcaaaaagatagaatcaatcataaagtgcacacctttattcagaactttagtattaaatcagttctcaatttcatttttatgtattgttttactcctttttattcatacgtaaaattttggattaatttgtgaaaatgtaattataagctgagaccggtggctctcttcttaaaagcaccatattaaatcctggaaaactaa

SEQ ID NO: 374013 - DNA, 1095 bp, Homo sapiens
cacacttggtaactaatgaatgaaagatttcaaaccccaaacagtgcaactgaaacttttgtattagcatactactgagaatatctaacatgttgttactaatcaatgtcattctgaccttgtgggtttcctgtgctaatggacaagtgaaaccttgtgattttccagacattaaacatggaggtctatttcatgagaatatgcgtagaccatactttccagtagctgtaggaaaatattactcctattactgtgatgaacattttgagactccttcaggaagttactgggattacattcattgcacacaaaatgggtggtcaccagcagtaccatgtctcaacacttcctgtgtgaatccgcccacagtacaaaatgctcatatactgtcgagacagatgagtaaatatccatctggtgagagagtacgttatgaatgtaggagcccttatgaaatgtttggggatgaagaagtgatgtgtttaaatggaaactggacagaaccacctcaatgcaaagattctacgggaaaatgtgggccccctccacctattgacaatggggacattacttcattcccgttgtcagtatatgctccagcttcatcagttgagtaccaatgccagaacttgtatcaacttgagggtaacaagcgaataacatgtagaaatggacaatggtcagaaccaccaaaatgcttacatccgtgtgtaatatcccgagaaattatggaaaattataacatagcattaaggtggacagccaaacagaagctttattcgagaacaggtgaatcagttgaatttgtgtgtaaacggggatatcgtctttcatcacgttctcacacattgcgaacaacatgttgggatgggaaactggagtatccaacttgtgcaaaaagatagaatcaatcataaagtgcacacctttattcagaactttagtattaaatcagttctcaatttcatttttatgtattgttttactcctttttattcatacgtaaaattttggattaatttgtgaaaatgtaattataagctgagaccggtggctctcttcttaaaagcaccatattaaatcctggaaaactaa

SEQ ID NO: 374014 - DNA, 1243 bp, Homo sapiens
ccagttagtacactgaaattcaaagtcatgctcataactgttaatgaaagcagattcaaagcaacaccaccaccactgaagtatttttagttatataagattggaactaccaagcatgtggctcctggtcagtgtaattctaatctcacggatatcctctgttgggggagaagcaacattttgtgattttccaaaaataaaccatggaattctatatgatgaagaaaaatataagccattttcccaggttcctacaggggaagttttctattactcctgtgaatataattttgtgtctccttcaaaatcattttggactcgcataacatgcacagaagaaggatggtcaccaacaccaaagtgtctcagactgtgtttctttccttttgtggaaaatggtcattctgaatcttcaggacaaacacatctggaaggtgatactgtgcaaattatttgcaacacaggatacagacttcaaaacaatgagaacaacatttcatgtgtagaacggggctggtccacccctcccaaatgcaggtccactgacacttcctgtgtgaatccgcccacagtacaaaatgctcatatactgtcgagacagatgagtaaatatccatctggtgagagagtacgttatgaatgtaggagcccttatgaaatgtttggggatgaagaagtgatgtgtttaaatggaaactggacagaaccacctcaatgcaaagattcccgttgtcagtatatgctccagcttcatcagttgagtaccaatgccagaacttgtatcaacttgagggtaacaagcgaataacatgtagaaatggacaatggtcagaaccaccaaaatgcttacatccgtgtgtaatatcccgagaaattatggaaaattataacatagcattaaggtggacagccaaacagaagctttattcgagaacaggtgaatcagttgaatttgtgtgtaaacggggatatcgtctttcatcacgttctcacacattgcgaacaacatgttgggatgggaaactggagtatccaacttgtgcaaaaagatagaatcaatcataaagtgcacacctttattcagaactttagtattaaatcagttctcaatttcatttttatgtattgttttactcctttttattcatacgtaaaattttggattaatttgtgaaaatgtaattataagctgagaccggtggctctcttcttaaaagcaccatattaaatcctggaaaactaa

SEQ ID NO: 374015 - DNA, 1820 bp, Homo sapiens
ccagttagtacactgaaattcaaagtcatgctcataactgttaatgaaagcagattcaaagcaacaccaccaccactgaagtatttttagttatataagattggaactaccaagcatgtggctcctggtcagtgtaattctaatctcacggatatcctctgttgggggagaagcaacattttgtgattttccaaaaataaaccatggaattctatatgatgaagaaaaatataagccattttcccaggttcctacaggggaagttttctattactcctgtgaatataattttgtgtctccttcaaaatcattttggactcgcataacatgcacagaagaaggatggtcaccaacaccaaagtgtctcagactgtgtttctttccttttgtggaaaatggtcattctgaatcttcaggacaaacacatctggaaggtgatactgtgcaaattatttgcaacacaggatacagacttcaaaacaatgagaacaacatttcatgtgtagaacggggctggtccacccctcccaaatgcaggtccactgacacttcctgtgtgaatccgcccacagtacaaaatgctcatatactgtcgagacagatgagtaaatatccatctggtgagagagtacgttatgaatgtaggagcccttatgaaatgtttggggatgaagaagtgatgtgtttaaatggaaactggacagaaccacctcaatgcaaagattctacgggaaaatgtgggccccctccacctattgacaatggggacattacttcattcccgttgtcagtatatgctccagcttcatcagttgagtaccaatgccagaacttgtatcaacttgagggtaacaagcgaataacatgtagaaatggacaatggtcagaaccaccaaaatgcttacatccgtgtgtaatatcccgagaaattatggaaaattataacatagcattaaggtggacagccaaacagaagctttattcgagaacaggtgaatcagttgaatttgtgtgtaaacggggatatcgtctttcatcacgttctcacacattgcgaacaacatgttgggatgggaaactggagtatccaacttgtgcaaaaagatagaatcaatcataaagtgcacacctttattcagaactttagtattaaatcagttctcaatttcatttttatgtattgttttactcctttttattcatacgtaaaattttggattaatttgtgaaaatgtaattataagctgagaccggtggctctcttcttaaaagcaccatattaaatcctggaaaactaaaaaaaaaaaaaaaaaaaaaaaaaaaaaaaaaaaaaaaaaaaaaaaaaaaaaaaaaaaaaaaaaaaaaaaaaaaaaacaccttgtcgcccgcctggcccaagctaattttagattcgggcaggtttatccttgcggccaaatttcgggctaattggcccatttccccttatggggggccgttttacaattaatgggccggcgtttaacaaggcggggccgggaaaacccctggggtaccccaacttaatcccttggaagaaaatccccttttggccagttggggaaatagcaaaaggccccgccccgatggcctttccaaaaagtgtgccaccctgaaggcgaaagggaaattgaaagcgttaatatttttgtaaaatccgggaaaattttggtaaaccgccaaatttttaaaccaaagggccgaaatcggagaaaccttttaaaaaaaaatagcccccgattgggtgggggttctccatttggaccagacccccttttaaaagggggccccacgcaaaaggg

SEQ ID NO: 374016 - DNA, 1218 bp, Homo sapiens
  misc_feature (1169)..(1170): n is a, c, g, or t
  misc_feature (1178)..(1178): n is a, c, g, or t
  misc_feature (1188)..(1188): n is a, c, g, or t
ccagttagtacactgaaattcaaagtcatgctcataactgttaatgaaagcagattcaaagcaacaccaccaccactgaagtatttttagttatataagattggaactaccaagcatgtggctcctggtcagtgtaattctaatctcacggatatcctctgttgggggagaagcaacattttgtgattttccaaaaataaaccatggaattctatatgatgaagaaaaatataagccattttcccaggttcctacaggggaagttttctattactcctgtgaatataattttgtgtctccttcaaaatcattttggactcgcataacatgcacagaagaaggatggtcaccaacaccaaagtgtctcagactgtgtttctttccttttgtggaaaatggtcattctgaatcttcaggacaaacacatctggaaggtgatactgtgcaaattatttgcaacacaggatacagacttcaaaacaatgagaacaacatttcatgtgtagaacggggctggtccacccctcccaaatgcaggtccactgacacttcctgtgtgaatccgcccacagtacaaaatgctcatatactgtcgagacagatgagtaaatatccatctggtgagagagtacgttatgaatgtaggagcccttatgaaatgtttggggatgaagaagtgatgtgtttaaatggaaactggacagaaccacctcaatgcaaagattctacgggaaaatgtgggccccctccacctattgacaatggggacattacttcattcccgttgtcagtatatgctccagcttcatcagttgagtaccaatgccagaacttgtatcaacttgagggtaacaagcgaataacatgtagaaatggacaatggtcagaaccaccaaaatgcttacatccgtgtgtaatatcccgagaaattatggaaaattataacatagcattaaggtggacagccaaacagaagctttattcgagaacaggtgaatcagttgaatttgtgtgtaaacggggatatcgtctttcatcacgttctcacacattgcgaacaacatgttgggatgggaaactggagtatccaacttgtgcaaaaagatagaatcaatcataaagtgcacacctttattcagaactttagtattaaatcagttctcaatctnngggcatgnggtgcctcancgaacgaagtatatgtgacagtaggaaata

SEQ ID NO: 374017 - DNA, 1263 bp, Homo sapiens
ccagttagtacactgaaattcaaagtcatgctcataactgttaatgaaagcagattcaaagcaacaccaccaccactgaagtatttttagttatataagattggaactaccaagcatgtggctcctggtcagtgtaattctaatctcacggatatcctctgttgggggagaagcaacattttgtgattttccaaaaataaaccatggaattctatatgatgaagaaaaatataagccattttcccaggttcctacaggggaagttttctattactcctgtgaatataattttgtgtctccttcaaaatcattttggactcgcataacatgcacagaagaaggatggtcaccaacaccaaagtgtctcagactgtgtttctttccttttgtggaaaatggtcattctgaatcttcaggacaaacacatctggaaggtgatactgtgcaaattatttgcaacacaggatacagacttcaaaacaatgagaacaacatttcatgtgtagaacggggctggtccacccctcccaaatgcaggtccactgacacttcctgtgtgaatccgcccacagtacaaaatgctcatatactgtcgagacagatgagtaaatatccatctggtgagagagtacgttatgaatgtaggagcccttatgaaatgtttggggatgaagaagtgatgtgtttaaatggaaactggacagaaccacctcaatgcaaagattctacgggaaaatgtgggccccctccacctattgacaatggggacattacttcattcccgttgtcagtatatgctccagcttcatcagttgagtaccaatgccagaacttgtatcaacttgagggtaacaagcgaataacatgtagaaatggacaatggtcagaaccaccaaaatgcttactataacatagcattaaggtggacagccaaacagaagctttattcgagaacaggtgaatcagttgaatttgtgtgtaaacggggatatcgtctttcatcacgttctcacacattgcgaacaacatgttgggatgggaaactggagtatccaacttgtgcaaaaagatagaatcaatcataaagtgcacacctttattcagaactttagtattaaatcagttctcaatttcatttttatgtattgttttactcctttttattcatacgtaaaattttggattaatttgtgaaaatgtaattataagctgagaccggtggctctcttcttaaaagcaccatattaaatcctggaaaactaa

SEQ ID NO: 374018 - DNA, 12588 bp, Homo sapiens
cgcgccggggcctggtgctcggtcggcgggtgctgccgctttaagcgggggcgggactgcgcgcggccgagcggttgcgacgagggctcggctgggggtcgccggggtcgcgggccgggcctgcaggagccgggccgccgaggtcggggctggttgaactcatggacctgatacttttctcttgagaagcaaaccagcccaaaagaaaaatggcgtttgttgcaacacagggggccacggtggttgaccagaccactttgatgaaaaagtaccttcagtttgtggcagctctcacagatgtgaatacacctgatgaaacaaagttgaaaatgatgcaagaagttagtgaaaattttgagaatgtcacgtcatctcctcagtattctacattcctagaacatatcatccctcgattccttacatttctccaagatggagaagttcagtttcttcaggagaaaccagcacagcaactgcggaagctcgtacttgaaataattcatagaataccaaccaacgaacatcttcgtcctcacacaaaaaatgttttgtctgtgatgtttcgctttttagagacggaaaatgaagaaaatgttcttatttgtctaagaataattattgagctacacaaacagttcaggccaccgatcacacaagaaattcatcattttctggattttgtgaaacagatttacaaggagcttccaaaagtagtgaaccgctactttgagaaccctcaagtgatccccgagaacacagtgcctcccccagaaatggttggtatgataacaacgattgctgtgaaagtcaacccggagcgtgaggacagtgagactcgaacacattccatcattccgaggggatcactttctctgaaagtgttggcagaattgcccattattgttgttttaatgtatcagctctacaaactgaacatccacaatgttgttgctgagtttgtgcccttgatcatgaacaccattgccattcaggtgtctgcacaagcgaggcaacataagctttacaacaaggagttgtatgctgacttcattgctgctcagattaaaacattgtcatttttagcttacattatcaggatttaccaggagttggtgactaagtattctcagcagatggtgaaaggaatgctccagttactttcaaattgtccagcagagactgcacacctcagaaaggagcttctgattgctgccaaacacatcctcaccacagagctgagaaaccagttcattccttgcatggacaagctgtttgatgaatccatactaattggctcaggatatactgccagagagactctaaggcccctcgcctacagcacgctggccgacctcgtgcaccatgtccgccagcacctgcccctcagcgacctctccctcgccgtccagctcttcgccaagaacatcgacgatgagtccctgcccagcagcatccagaccatgtcctgcaagctcctgctgaacctggtggactgcatccgttccaagagcgagcaggagagtggcaatgggagagacgtcctgatgcggatgctggaggttttcgttctcaaattccacacaattgctcggtaccagctctctgccatttttaagaagtgtaagcctcagtcagaacttggagccgtggaagcagctctgcctggggtgcccactgcccctgcagctcctggccctgctccctccccagcccctgtccctgccccacctccacccccgcccccacccccacctgccacccctgtgaccccggcccccgtgcctcccttcgagaagcaaggagaaaaggacaaggaagacaagcagacattccaagtcacagactgtcgaagtttggtcaaaaccttggtgtgtggtgtcaagacaatcacgtggggcataacatcatgcaaagcacctggtgaagctcagttcattcccaacaagcagttacaacccaaagagacacagatttacatcaaacttgtgaaatatgcaatgcaagctttagatatttatcaggtccagatagcaggaaatggacagacatacatccgtgtggccaactgccagactgtgagaatgaaagaggagaaggaggtattggagcatttcgctggtgtgttcacaatgatgaaccccttaacgttcaaagaaatcttccaaactacggtcccttatatggtggagagaatctcaaaaaattatgctcttcagattgttgccaattccttcttggcaaatcctactacctctgctctgtttgctacgattctggtggaatatctccttgatcgcctgccagaaatgggctccaacgtggagctctccaacctgtacctcaagctgttcaagctggtctttggctctgtctccctctttgcagctgaaaatgaacaaatgctgaagcctcacttgcacaagattgtgaacagctctatggagctcgcgcagactgccaaggaaccctacaactacttcttgctgctacgggcgctgtttcgctctattggtggaggtagccacgatctcttgtatcaggagttcttgcctctccttccaaacctcctgcaagggctgaacatgcttcagagtggcctgcacaagcagcacatgaaggacctctttgtggagctgtgtctcaccgtccctgtgcggctgagctcgcttttgccgtacctgcccatgcttatggatcccttggtgtctgcactcaatgggtctcagacattggtcagccaaggcctcaggacgctggagctgtgtgtggacaacctgcagcccgacttcctctacgaccacatccagccggtgcgcgcagagctcatgcaggctctgtggcgcaccttacgcaaccctgctgacagcatctcccacgtggcctaccgtgtgctcggtaagtttggcggcagtaacaggaagatgctgaaggagtcgcagaagctgcactacgttgtgaccgaggttcagggccccagcatcactgtggagttttccgactgcaaagcttctctccagctccccatggagaaggccattgaaactgctctggactgcctgaaaagcgccaacactgagccctactaccggaggcaggcgtgggaagtgatcaaatgcttcctggtggccatgatgagcctggaggacaacaagcacgcactctaccagctcctggcacaccccaactttacagaaaagaccatccccaatgttatcatctcacatcgctacaaagcccaggacactccagcccggaagacttttgagcaggccctgacaggcgccttcatgtctgctgtcattaaggacctgcggcccagcgccctgccctttgtcgccagcttgatccgccactatacgatggtggcagtcgcccagcagtgtggccctttcttgctgccttgctaccaggtgggcagccagcccagcacagccatgtttcacagtgaagaaaatggctcgaaaggaatggatcctttggttctcattgatgcaattgctatttgtatggcatatgaagaaaaggagctttgcaaaatcggggaggtggccctagctgtgatatttgatgttgcaagtatcatcctgggctccaaggagagggcctgccagctgcccctgttttcttacatcgtggagcgcctgtgtgcatgttgttatgaacaggcgtggtatgcaaagctggggggtgtggtgtctattaagtttctcatggagcggctgcctctcacttgggttctccagaaccagcagacattcctgaaagcacttctctttgtcatgatggacttaactggagaggtttccaatggggcagtcgctatggcaaagaccacgctggagcagcttctgatgcggtgcgcaacgcctttaaaagacgaggagagagccgaagagatcgtggccgcccaggaaaagtctttccaccatgtgacacacgacttggttcgagaagtcacctctccaaactccactgtgaggaagcaggccatgcattcgctgcaggtgttggcccaggtcactgggaagagtgtcacggtgatcatggaaccccacaaagaggtcctgcaggatatggtcccccctaagaagcacctgctccgacaccagcctgccaacgcacagattggcctgatggaggggaacacgttctgtaccacgttgcagcccaggctcttcacaatggaccttaacgtggtggagcataaggtgttctacacagagctgttgaatttgtgtgaggctgaagattcagctttaacaaagctgccctgttataaaagccttccgtcactcgtacctttacgaattgcggcattaaatgcacttgctgcctgcaattaccttcctcagtccagggagaaaatcatcgctgcactcttcaaagccctgaattccaccaatagtgagctccaagaggccggagaagcctgtatgagaaagtttttagaaggtgctaccatagaagtcgatcaaatccacacacatatgcgacctttgctgatgatgctgggagattaccggagcttgacgctgaatgttgtgaatcgcctgacttcggtcacgaggctcttcccaaattccttcaatgataaattttgtgatcagatgatgcaacatctgcgcaagtggatggaagtggtggtgatcacccacaaagggggccagaggagcgacggaaacgaaatgaagatttgctcagcaattataaacctttttcatctgatcccggctgctcctcagacactggtgaagcctttgctagaggttgtcatgaaaacggagcgggcgatgctgatcgaggcggggagtccattccgagagcccctgatcaagttcctgactcgacatccctcgcagacagtggagctgttcatgatggaagccacactgaacgatccccagtggagcagaatgtttatgagttttttaaaacacaaagacgccagacctctgcgggatgtgctggctgccaaccccaacaggttcatcaccctgctgctgccggggggtgcccagacggctgtgcgccccggttcgcccagcaccagcaccatgcgcctggacctccagttccaggccatcaagatcataagcattatagtgaaaaacgatgactcctggctggccagccagcactctctggtgagccagttgcgacgtgtgtgggtgagtgagaacttccaagagaggcaccgcaaggagaacatggcagccaccaactggaaggagcccaagctgctggcctactgcctgctgaactactgcaaaaggaattacggagatatagaattgctgttccagctgctccgagcctttactggtcgttttctctgcaacatgacattcttaaaagagtatatggaggaagagattcccaaaaattacagcatcgctcagaaacgtgccctgttctttcgctttgtagacttcaacgaccccaacttcggagatgaattaaaagctaaagttctgcagcatatcttgaatcctgctttcttgtacagctttgagaagggggaaggagagcagctcttgggacctcccaatccagaaggagataacccagaaagcatcaccagtgtgtttattaccaaggtcctggaccccgagaagcaggcggacatgctggactcgctgcggatctacctgctgcagtacgccacgctgctggtggagcacgccccccaccacatccatgacaacaacaagaaccgcaacagcaagctgcgccgcctcatgaccttcgcctggccctgcctgctctccaaggcctgcgtggacccagcctgcaagtacagcggacacttgctcctggcgcacattatcgccaaattcgccatacacaagaagatcgtcctgcaggtttttcatagtctcctcaaggctcacgcaatggaagctcgagcgatcgtcagacaggcgatggccattctgaccccggcggtgccggccaggatggaggacgggcaccagatgctgacccactggacccggaagatcattgtggaggaggggcacaccgtcccgcagctggtccacattctgcacctgatagtgcaacacttcaaggtgtactacccggtacggcaccacttggtgcagcacatggtgagcgccatgcagaggctgggcttcacgcccagtgtcaccatcgagcagaggcggctggccgtggacctgtctgaagtcgtcatcaagtgggagctgcagaggatcaaggaccagcagccggattcagatatggacccaaattccagtggagaaggagtcaattctgtctcatcctccattaagagaggcctgtccgtggattctgcccaggaagtgaaacgctttaggacggccaccggagccatcagtgcagtctttgggaggagccagtcgctacctggagcagactctctcctcgccaagcccattgacaagcagcacacagacactgtggtgaacttccttatccgcgtggcctgtcaggttaatgacaacaccaacacagcggggtcccctggggaggtgctctctcgccggtgtgtgaaccttctgaagactgcgttgcggccagacatgtggcccaagtccgaactcaagctgcagtggttcgacaagctgctgatgactgtggagcagccaaaccaagtgaactatgggaatatctgcacgggcctagaagtgctgagcttcctgctaactgtcctccagtccccagccatcctcagtagcttcaaacctctgcagcgtggaattgccgcctgcatgacatgtggaaacaccaaggtgttgcgagccgtccacagccttctctcgcgcctgatgagcattttcccaacagagccgagtacttccagtgtggcctccaaatatgaagagctggagtgcctctacgcagccgtcggaaaggtcatctatgaagggctcaccaactacgagaaggccaccaatgccaatccctcccagctcttcgggacccttatgatcctcaagtctgcctgcagcaacaaccccagctacatagacaggctgatctccgtctttatgcgctccctgcagaagatggtccgggagcatttaaaccctcaggcagcgtcaggaagcaccgaagccacctcaggtacaagcgagctggtgatgctgagtctggagctggtgaagacgcgcctggcagtgatgagcatggagatgcggaagaacttcatccaggccatcctgacatccctcatcgaaaaatcaccagatgccaaaatcctccgggctgtggtcaaaatcgtggaagaatgggtcaagaataactccccaatggcagccaatcagacacctacactccgggagaagtccattttgcttgtgaagatgatgacttacatagaaaaacgctttccggaagaccttgaattaaatgcccagtttttagatcttgttaactatgtctacagggatgagaccctctctggcagcgagctgacggcgaaacttgagcctgcctttctctctgggctgcgctgtgcccagccactcatcagggcaaagtttttcgaggtttttgacaactccatgaaacgtcgtgtctacgagcgcttgctctatgtgacctgttcgcagaactgggaagccatggggaaccacttctggatcaagcagtgcattgagctgcttctggccgtgtgtgagaagagcacccccattggcaccagctgccaaggagccatgctcccgtccatcaccaacgtcatcaacctggccgatagccacgaccgtgccgccttcgccatggtcacacatgtcaagcaggagccccgggagcgggagaacagcgagtccaaagaggaggatgtagagatagacatcgaactagctcctggggatcagaccagcacgcccaaaaccaaagaactttcagaaaaggacattggaaaccagctgcacatgctaaccaacaggcacgacaagtttctggacactctccgagaggtgaagactggagcgctgctcagcgctttcgttcagctgtgccacatttccacgacgctggcagagaagacgtgggtccagcttttccccagattgtggaagatcctctctgacagacagcagcatgcactcgcgggtgagataagtccatttctgtgcagcggcagtcaccaggtgcagcgggactgccagcccagcgcgctgaactgctttgtggaagccatgtcccagtgcgtgccgccaatccccatccgaccctgcgtcctgaagtacctggggaagacacacaacctctggttccggtccacgctgatgttggagcaccaggcttttgaaaagggtctgagtcttcagattaagccgaagcaaacaacggagttttatgagcaggagagcatcaccccgccgcagcaggagatactggattcccttgcggagctttactccctgttacaagaggaagatatgtgggctggtctgtggcagaagcggtgcaagtactcggagacagcgactgcgattgcttacgagcagcacgggttctttgagcaggcacaagaatcctatgaaaaggcaatggataaagccaaaaaagaacatgagaggagtaacgcctcccctgctattttccctgaataccagctctgggaagaccactggattcgatgctccaaggaattgaaccagtgggaagccctgacggagtacggtcagtccaaaggccacatcaacccctacctcgtcctggagtgcgcctggcgggtgtccaactggactgccatgaaggaggcgctggtgcaggtggaagtgagctgtccgaaggagatggcctggaaggtgaacatgtaccgcggatacctggccatctgccaccccgaggagcagcagctcagcttcatcgagcgcctggtggagatggccagcagcctggccatccgcgagtggcggcggctgccccacgtagtgtcccacgtgcacacgcctctcctacaggcagcccagcaaatcatcgaactccaggaagctgcacaaatcaacgcaggcttacagccaaccaacctgggaaggaacaacagcctgcacgacatgaagacggtggtgaagacctggaggaaccgactgcccatcgtgtctgacgacttgtcccactggagcagcatcttcatgtggaggcagcatcattaccaggcgattgtaactgcctatgagaatagctctcagcatgatcccagttcaaataacgctatgcttggggttcatgcatcagcttcagcgatcatccagtatggaaaaatcgcccggaaacaaggactggtcaatgtagctctggatatattaagtcggattcatactattccaactgttcctatcgtggattgcttccagaagattcgacagcaagttaaatgctacctccagctggcaggcgtcatgggcaaaaacgagtgcatgcagggccttgaagttattgaatctacaaatttaaaatacttcacaaaagagatgacagccgaattttatgcactgaagggaatgttcttggctcagatcaacaagtccgaggaggcaaacaaagccttctctgcagctgtgcagatgcacgatgtgctggtgaaagcctgggccatgtggggcgactacctggagaacatctttgtgaaggagcggcagctgcacctgggcgtgtctgccatcacctgctacctgcacgcctgccggcatcagaacgagagcaaatcgaggaaatacttagccaaggtgctgtggcttttgagttttgatgatgacaaaaacactttggcagatgccgtcgacaagtactgcattggtgtgccacccatccagtggctggcctggatcccacagctgctcacctgcctggttggctcggagggaaagctgctcttgaacctcattagccaggttggacgcgtgtatccccaagcggtctactttcccatccggaccctgtacctgaccctgaaaatagaacagcgggaacgctacaagagcgatccagggcccataagagcaacagcacccatgtggcgctgcagccgaatcatgcacatgcagcgagagctccaccccacccttctgtcttccctggaaggcatcgtcgatcagatggtctggttcagagaaaattggcatgaagaggttctcaggcagctccaacagggcctggcgaaatgttactccgtggcgtttgagaaaagtggagcggtgtccgatgctaaaatcaccccccacactctcaattttgtgaagaagttggtgagcacgtttggggtgggcctggagaatgtgtccaacgtctcgaccatgttctccagcgcagcctctgagtctctggcccggcgggcgcaggccactgcacaagaccctgtctttcagaagctgaaaggccagttcacgacggattttgacttcagcgttccaggatccatgaagcttcataatcttatttctaagttgaaaaagtggatcaaaatcttggaggccaagaccaagcaactccccaaattcttcctcatagaggaaaagtgccggttcttgagcaatttctcggcacagacagctgaagtggaaattcctggggagtttctgatgccaaagccaacgcattattacatcaagattgcacggttcatgccccgggtagagattgtgcagaagcacaacaccgcagcccggcggctgtacatccggggacacaatggcaagatctacccatacctcgtcatgaacgacgcctgcctcacagagtcacggcgagaggagcgtgtgttgcagctgctgcgtctgctgaacccctgtttggagaagagaaaggagaccaccaagaggcacttgtttttcacagtgccccgggttgtggcagtttccccacagatgcgcctcgtggaggacaacccctcttcactttcccttgtggagatctacaagcagcgctgcgccaagaagggcatcgagcatgacaaccccatctcccgttactatgaccggctggctacggtgcaggcgcggggaacccaagccagccaccaggtcctccgcgacatcctcaaggaggttcagagtaacatggtgccgcgcagcatgctcaaggagtgggcgctgcacaccttccccaatgccacggactactggacgttccggaagatgttcaccatccagctggctctgataggcttcgcggaattcgtcctgcatttaaatagactcaaccccgagatgttacagatcgctcaggacactggcaaactgaatgttgcctactttcgatttgacataaacgacgcgactggagacctggatgccaaccgtcctgtcccatttcgactcacgcccaacatttctgagtttctgaccaccatcggggtctccggcccgttgacagcgtccatgattgcggtcgcccggtgcttcgcccagccaaactttaaggtggatggcattctgaaaacggttctccgggacgagatcattgcttggcacaaaaaaacacaagaggacacgtcctctcctctctcggccgccgggcagccagagaacatggacagccagcaactggtgtccctggttcagaaagccgtcaccgccatcatgacccgcctgcacaacctcgcccagttcgaaggcggggaaagcaaggtgaacaccctggtggccgcggcaaacagcctggacaatctgtgccgcatggaccccgcctggcacccctggctgtgactgtggccgccacggccacccggaatgtgaagggcgctccgggctctgagcccgcagcttttacgacttctccctgcctcgttccttatattcacagaagccccatagtttcactgggttgcggttattttcctggtagtttgcgtgtaagaaagggagaatatagttttagaggaagctgaactatgacgatgctgggcgaagcggttggaaatggcagagctgaaacttattccaagctttcaaaataatcttttaagaagccaggattctccggtctggaatttctgagtgagtcctttttttatggtgtcctccctctgtgaatgtacaggcggaactgtacgaacagctcccttccatccatttttaactctttcggaaataacacctcacagcagcttcgtgcttttgtacagacctttgtaacaagtgtacagaaaactcattttgtttgagaaacaggagttgatgaacccatcatgctggtttttctctgagcacaaagttttaggctgtacacagccagccttgggaatctcgttgagcgttcggcgtggatccacggggccaggccaccctgcgggagcgccacacgcatccacttcggattcagtgggtgaagacagaactctgagagtctgcaggcggctcctgtgctttttatttctggctcttcggatgtcttctagacatttactatcactgcacctgaagaaaaaatcacttttaccttcctaatttaaaaagacaaaacagaaatgtacgttccttcgctagctttagtctttctgttcccatttttataaatctgagcattgataatgttctatctaaatttgtacagtgtgatttttttttttagaataaatattttataaaaggg

SEQ ID NO: 374019 - DNA, 12675 bp, Homo sapiens
cgcgccggggcctggtgctcggtcggcgggtgctgccgctttaagcgggggcgggactgcgcgcggccgagcggttgcgacgagggctcggctgggggtcgccggggtcgcgggccgggcctgcaggagccgggccgccgaggtcggggctggttgaactcatggacctgatacttttctcttgagaagcaaaccagcccaaaagaaaaatggcgtttgttgcaacacagggggccacggtggttgaccagaccactttgatgaaaaagtaccttcagtttgtggcagctctcacagatgtgaatacacctgatgaaacaaagttgaaaatgatgcaagaagttagtgaaaattttgagaatgtcacgtcatctcctcagtattctacattcctagaacatatcatccctcgattccttacatttctccaagatggagaagttcagtttcttcaggagaaaccagcacagcaactgcggaagctcgtacttgaaataattcatagaataccaaccaacgaacatcttcgtcctcacacaaaaaatgttttgtctgtgatgtttcgctttttagagacggaaaatgaagaaaatgttcttatttgtctaagaataattattgagctacacaaacagttcaggccaccgatcacacaagaaattcatcattttctggattttgtgaaacagatttacaaggagcttccaaaagtagtgaaccgctactttgagaaccctcaagtgatccccgagaacacagtgcctcccccagaaatggttggtatgataacaacgattgctgtgaaagtcaacccggagcgtgaggacagtgagactcgaacacattccatcattccgaggggatcactttctctgaaagtgttggcagaattgcccattattgttgttttaatgtatcagctctacaaactgaacatccacaatgttgttgctgagtttgtgcccttgatcatgaacaccattgccattcaggtgtctgcacaagcgaggcaacataagctttacaacaaggagttgtatgctgacttcattgctgctcagattaaaacattgtcatttttagcttacattatcaggatttaccaggagttggtgactaagtattctcagcagatggtgaaaggaatgctccagttactttcaaattgtccagcagagactgcacacctcagaaaggagcttctgattgctgccaaacacatcctcaccacagagctgagaaaccagttcattccttgcatggacaagctgtttgatgaatccatactaattggctcaggatatactgccagagagactctaaggcccctcgcctacagcacgctggccgacctcgtgcaccatgtccgccagcacctgcccctcagcgacctctccctcgccgtccagctcttcgccaagaacatcgacgatgagtccctgcccagcagcatccagaccatgtcctgcaagctcctgctgaacctggtggactgcatccgttccaagagcgagcaggagagtggcaatgggagagacgtcctgatgcggatgctggaggttttcgttctcaaattccacacaattgctcggtaccagctctctgccatttttaagaagtgtaagcctcagtcagaacttggagccgtggaagcagctctgcctggggtgcccactgcccctgcagctcctggccctgctccctccccagcccctgtccctgccccacctccacccccgcccccacccccacctgccacccctgtgaccccggcccccgtgcctcccttcgagaagcaaggagaaaaggacaaggaagacaagcagacattccaagtcacagactgtcgaagtttggtcaaaaccttggtgtgtggtgtcaagacaatcacgtggggcataacatcatgcaaagcacctggtgaagctcagttcattcccaacaagcagttacaacccaaagagacacagatttacatcaaacttgtgaaatatgcaatgcaagctttagatatttatcaggtccagatagcaggaaatggacagacatacatccgtgtggccaactgccagactgtgagaatgaaagaggagaaggaggtattggagcatttcgctggtgtgttcacaatgatgaaccccttaacgttcaaagaaatcttccaaactacggtcccttatatggtggagagaatctcaaaaaattatgctcttcagattgttgccaattccttcttggcaaatcctactacctctgctctgtttgctacgattctggtggaatatctccttgatcgcctgccagaaatgggctccaacgtggagctctccaacctgtacctcaagctgttcaagctggtctttggctctgtctccctctttgcagctgaaaatgaacaaatgctgaagcctcacttgcacaagattgtgaacagctctatggagctcgcgcagactgccaaggaaccctacaactacttcttgctgctacgggcgctgtttcgctctattggtggaggtagccacgatctcttgtatcaggagttcttgcctctccttccaaacctcctgcaagggctgaacatgcttcagagtggcctgcacaagcagcacatgaaggacctctttgtggagctgtgtctcaccgtccctgtgcggctgagctcgcttttgccgtacctgcccatgcttatggatcccttggtgtctgcactcaatgggtctcagacattggtcagccaaggcctcaggacgctggagctgtgtgtggacaacctgcagcccgacttcctctacgaccacatccagccggtgcgcgcagagctcatgcaggctctgtggcgcaccttacgcaaccctgctgacagcatctcccacgtggcctaccgtgtgctcggtaagtttggcggcagtaacaggaagatgctgaaggagtcgcagaagctgcactacgttgtgaccgaggttcagggccccagcatcactgtggagttttccgactgcaaagcttctctccagctccccatggagaaggccattgaaactgctctggactgcctgaaaagcgccaacactgagccctactaccggaggcaggcgtgggaagtgatcaaatgcttcctggtggccatgatgagcctggaggacaacaagcacgcactctaccagctcctggcacaccccaactttacagaaaagaccatccccaatgttatcatctcacatcgctacaaagcccaggacactccagcccggaagacttttgagcaggccctgacaggcgccttcatgtctgctgtcattaaggacctgcggcccagcgccctgccctttgtcgccagcttgatccgccactatacgatggtggcagtcgcccagcagtgtggccctttcttgctgccttgctaccaggtgggcagccagcccagcacagccatgtttcacagtgaagaaaatggctcgaaaggaatggatcctttggttctcattgatgcaattgctatttgtatggcatatgaagaaaaggagctttgcaaaatcggggaggtggccctagctgtgatatttgatgttgcaagtatcatcctgggctccaaggagagggcctgccagctgcccctgttttcttacatcgtggagcgcctgtgtgcatgttgttatgaacaggcgtggtatgcaaagctggggggtgtggtgtctattaagtttctcatggagcggctgcctctcacttgggttctccagaaccagcagacattcctgaaagcacttctctttgtcatgatggacttaactggagaggtttccaatggggcagtcgctatggcaaagaccacgctggagcagcttctgatgcggtgcgcaacgcctttaaaagacgaggagagagccgaagagatcgtggccgcccaggaaaagtctttccaccatgtgacacacgacttggttcgagaagtcacctctccaaactccactgtgaggaagcaggccatgcattcgctgcaggtgttggcccaggtcactgggaagagtgtcacggtgatcatggaaccccacaaagaggtcctgcaggatatggtcccccctaagaagcacctgctccgacaccagcctgccaacgcacagattggcctgatggaggggaacacgttctgtaccacgttgcagcccaggctcttcacaatggaccttaacgtggtggagcataaggtgttctacacagagctgttgaatttgtgtgaggctgaagattcagctttaacaaagctgccctgttataaaagccttccgtcactcgtacctttacgaattgcggcattaaatgcacttgctgcctgcaattaccttcctcagtccagggagaaaatcatcgctgcactcttcaaagccctgaattccaccaatagtgagctccaagaggccggagaagcctgtatgagaaagtttttagaaggtgctaccatagaagtcgatcaaatccacacacatatgcgacctttgctgatgatgctgggagattaccggagcttgacgctgaatgttgtgaatcgcctgacttcggtcacgaggctcttcccaaattccttcaatgataaattttgtgatcagatgatgcaacatctgcgcaagtggatggaagtggtggtgatcacccacaaagggggccagaggagcgacggaaacgaaagcatttccgagtgcgggagatgtcccttgtctccattctgtcagtttgaggaaatgaagatttgctcagcaattataaacctttttcatctgatcccggctgctcctcagacactggtgaagcctttgctagaggttgtcatgaaaacggagcgggcgatgctgatcgaggcggggagtccattccgagagcccctgatcaagttcctgactcgacatccctcgcagacagtggagctgttcatgatggaagccacactgaacgatccccagtggagcagaatgtttatgagttttttaaaacacaaagacgccagacctctgcgggatgtgctggctgccaaccccaacaggttcatcaccctgctgctgccggggggtgcccagacggctgtgcgccccggttcgcccagcaccagcaccatgcgcctggacctccagttccaggccatcaagatcataagcattatagtgaaaaacgatgactcctggctggccagccagcactctctggtgagccagttgcgacgtgtgtgggtgagtgagaacttccaagagaggcaccgcaaggagaacatggcagccaccaactggaaggagcccaagctgctggcctactgcctgctgaactactgcaaaaggaattacggagatatagaattgctgttccagctgctccgagcctttactggtcgttttctctgcaacatgacattcttaaaagagtatatggaggaagagattcccaaaaattacagcatcgctcagaaacgtgccctgttctttcgctttgtagacttcaacgaccccaacttcggagatgaattaaaagctaaagttctgcagcatatcttgaatcctgctttcttgtacagctttgagaagggggaaggagagcagctcttgggacctcccaatccagaaggagataacccagaaagcatcaccagtgtgtttattaccaaggtcctggaccccgagaagcaggcggacatgctggactcgctgcggatctacctgctgcagtacgccacgctgctggtggagcacgccccccaccacatccatgacaacaacaagaaccgcaacagcaagctgcgccgcctcatgaccttcgcctggccctgcctgctctccaaggcctgcgtggacccagcctgcaagtacagcggacacttgctcctggcgcacattatcgccaaattcgccatacacaagaagatcgtcctgcaggtttttcatagtctcctcaaggctcacgcaatggaagctcgagcgatcgtcagacaggcgatggccattctgaccccggcggtgccggccaggatggaggacgggcaccagatgctgacccactggacccggaagatcattgtggaggaggggcacaccgtcccgcagctggtccacattctgcacctgatagtgcaacacttcaaggtgtactacccggtacggcaccacttggtgcagcacatggtgagcgccatgcagaggctgggcttcacgcccagtgtcaccatcgagcagaggcggctggccgtggacctgtctgaagtcgtcatcaagtgggagctgcagaggatcaaggaccagcagccggattcagatatggacccaaattccagtggagaaggagtcaattctgtctcatcctccattaagagaggcctgtccgtggattctgcccaggaagtgaaacgctttaggacggccaccggagccatcagtgcagtctttgggaggagccagtcgctacctggagcagactctctcctcgccaagcccattgacaagcagcacacagacactgtggtgaacttccttatccgcgtggcctgtcaggttaatgacaacaccaacacagcggggtcccctggggaggtgctctctcgccggtgtgtgaaccttctgaagactgcgttgcggccagacatgtggcccaagtccgaactcaagctgcagtggttcgacaagctgctgatgactgtggagcagccaaaccaagtgaactatgggaatatctgcacgggcctagaagtgctgagcttcctgctaactgtcctccagtccccagccatcctcagtagcttcaaacctctgcagcgtggaattgccgcctgcatgacatgtggaaacaccaaggtgttgcgagccgtccacagccttctctcgcgcctgatgagcattttcccaacagagccgagtacttccagtgtggcctccaaatatgaagagctggagtgcctctacgcagccgtcggaaaggtcatctatgaagggctcaccaactacgagaaggccaccaatgccaatccctcccagctcttcgggacccttatgatcctcaagtctgcctgcagcaacaaccccagctacatagacaggctgatctccgtctttatgcgctccctgcagaagatggtccgggagcatttaaaccctcaggcagcgtcaggaagcaccgaagccacctcaggtacaagcgagctggtgatgctgagtctggagctggtgaagacgcgcctggcagtgatgagcatggagatgcggaagaacttcatccaggccatcctgacatccctcatcgaaaaatcaccagatgccaaaatcctccgggctgtggtcaaaatcgtggaagaatgggtcaagaataactccccaatggcagccaatcagacacctacactccgggagaagtccattttgcttgtgaagatgatgacttacatagaaaaacgctttccggaagaccttgaattaaatgcccagtttttagatcttgttaactatgtctacagggatgagaccctctctggcagcgagctgacggcgaaacttgagcctgcctttctctctgggctgcgctgtgcccagccactcatcagggcaaagtttttcgaggtttttgacaactccatgaaacgtcgtgtctacgagcgcttgctctatgtgacctgttcgcagaactgggaagccatggggaaccacttctggatcaagcagtgcattgagctgcttctggccgtgtgtgagaagagcacccccattggcaccagctgccaaggagccatgctcccgtccatcaccaacgtcatcaacctggccgatagccacgaccgtgccgccttcgccatggtcacacatgtcaagcaggagccccgggagcgggagaacagcgagtccaaagaggaggatgtagagatagacatcgaactagctcctggggatcagaccagcacgcccaaaaccaaagaactttcagaaaaggacattggaaaccagctgcacatgctaaccaacaggcacgacaagtttctggacactctccgagaggtgaagactggagcgctgctcagcgctttcgttcagctgtgccacatttccacgacgctggcagagaagacgtgggtccagcttttccccagattgtggaagatcctctctgacagacagcagcatgcactcgcgggtgagataagtccatttctgtgcagcggcagtcaccaggtgcagcgggactgccagcccagcgcgctgaactgctttgtggaagccatgtcccagtgcgtgccgccaatccccatccgaccctgcgtcctgaagtacctggggaagacacacaacctctggttccggtccacgctgatgttggagcaccaggcttttgaaaagggtctgagtcttcagattaagccgaagcaaacaacggagttttatgagcaggagagcatcaccccgccgcagcaggagatactggattcccttgcggagctttactccctgttacaagaggaagatatgtgggctggtctgtggcagaagcggtgcaagtactcggagacagcgactgcgattgcttacgagcagcacgggttctttgagcaggcacaagaatcctatgaaaaggcaatggataaagccaaaaaagaacatgagaggagtaacgcctcccctgctattttccctgaataccagctctgggaagaccactggattcgatgctccaaggaattgaaccagtgggaagccctgacggagtacggtcagtccaaaggccacatcaacccctacctcgtcctggagtgcgcctggcgggtgtccaactggactgccatgaaggaggcgctggtgcaggtggaagtgagctgtccgaaggagatggcctggaaggtgaacatgtaccgcggatacctggccatctgccaccccgaggagcagcagctcagcttcatcgagcgcctggtggagatggccagcagcctggccatccgcgagtggcggcggctgccccacgtagtgtcccacgtgcacacgcctctcctacaggcagcccagcaaatcatcgaactccaggaagctgcacaaatcaacgcaggcttacagccaaccaacctgggaaggaacaacagcctgcacgacatgaagacggtggtgaagacctggaggaaccgactgcccatcgtgtctgacgacttgtcccactggagcagcatcttcatgtggaggcagcatcattaccagggtaaaccgacctggtccggcatgcattcatcatcgattgtaactgcctatgagaatagctctcagcatgatcccagttcaaataacgctatgcttggggttcatgcatcagcttcagcgatcatccagtatggaaaaatcgcccggaaacaaggactggtcaatgtagctctggatatattaagtcggattcatactattccaactgttcctatcgtggattgcttccagaagattcgacagcaagttaaatgctacctccagctggcaggcgtcatgggcaaaaacgagtgcatgcagggccttgaagttattgaatctacaaatttaaaatacttcacaaaagagatgacagccgaattttatgcactgaagggaatgttcttggctcagatcaacaagtccgaggaggcaaacaaagccttctctgcagctgtgcagatgcacgatgtgctggtgaaagcctgggccatgtggggcgactacctggagaacatctttgtgaaggagcggcagctgcacctgggcgtgtctgccatcacctgctacctgcacgcctgccggcatcagaacgagagcaaatcgaggaaatacttagccaaggtgctgtggcttttgagttttgatgatgacaaaaacactttggcagatgccgtcgacaagtactgcattggtgtgccacccatccagtggctggcctggatcccacagctgctcacctgcctggttggctcggagggaaagctgctcttgaacctcattagccaggttggacgcgtgtatccccaagcggtctactttcccatccggaccctgtacctgaccctgaaaatagaacagcgggaacgctacaagagcgatccagggcccataagagcaacagcacccatgtggcgctgcagccgaatcatgcacatgcagcgagagctccaccccacccttctgtcttccctggaaggcatcgtcgatcagatggtctggttcagagaaaattggcatgaagaggttctcaggcagctccaacagggcctggcgaaatgttactccgtggcgtttgagaaaagtggagcggtgtccgatgctaaaatcaccccccacactctcaattttgtgaagaagttggtgagcacgtttggggtgggcctggagaatgtgtccaacgtctcgaccatgttctccagcgcagcctctgagtctctggcccggcgggcgcaggccactgcacaagaccctgtctttcagaagctgaaaggccagttcacgacggattttgacttcagcgttccaggatccatgaagcttcataatcttatttctaagttgaaaaagtggatcaaaatcttggaggccaagaccaagcaactccccaaattcttcctcatagaggaaaagtgccggttcttgagcaatttctcggcacagacagctgaagtggaaattcctggggagtttctgatgccaaagccaacgcattattacatcaagattgcacggttcatgccccgggtagagattgtgcagaagcacaacaccgcagcccggcggctgtacatccggggacacaatggcaagatctacccatacctcgtcatgaacgacgcctgcctcacagagtcacggcgagaggagcgtgtgttgcagctgctgcgtctgctgaacccctgtttggagaagagaaaggagaccaccaagaggcacttgtttttcacagtgccccgggttgtggcagtttccccacagatgcgcctcgtggaggacaacccctcttcactttcccttgtggagatctacaagcagcgctgcgccaagaagggcatcgagcatgacaaccccatctcccgttactatgaccggctggctacggtgcaggcgcggggaacccaagccagccaccaggtcctccgcgacatcctcaaggaggttcagagtaacatggtgccgcgcagcatgctcaaggagtgggcgctgcacaccttccccaatgccacggactactggacgttccggaagatgttcaccatccagctggctctgataggcttcgcggaattcgtcctgcatttaaatagactcaaccccgagatgttacagatcgctcaggacactggcaaactgaatgttgcctactttcgatttgacataaacgacgcgactggagacctggatgccaaccgtcctgtcccatttcgactcacgcccaacatttctgagtttctgaccaccatcggggtctccggcccgttgacagcgtccatgattgcggtcgcccggtgcttcgcccagccaaactttaaggtggatggcattctgaaaacggttctccgggacgagatcattgcttggcacaaaaaaacacaagaggacacgtcctctcctctctcggccgccgggcagccagagaacatggacagccagcaactggtgtccctggttcagaaagccgtcaccgccatcatgacccgcctgcacaacctcgcccagttcgaaggcggggaaagcaaggtgaacaccctggtggccgcggcaaacagcctggacaatctgtgccgcatggaccccgcctggcacccctggctgtgactgtggccgccacggccacccggaatgtgaagggcgctccgggctctgagcccgcagcttttacgacttctccctgcctcgttccttatattcacagaagccccatagtttcactgggttgcggttattttcctggtagtttgcgtgtaagaaagggagaatatagttttagaggaagctgaactatgacgatgctgggcgaagcggttggaaatggcagagctgaaacttattccaagctttcaaaataatcttttaagaagccaggattctccggtctggaatttctgagtgagtcctttttttatggtgtcctccctctgtgaatgtacaggcggaactgtacgaacagctcccttccatccatttttaactctttcggaaataacacctcacagcagcttcgtgcttttgtacagacctttgtaacaagtgtacagaaaactcattttgtttgagaaacaggagttgatgaacccatcatgctggtttttctctgagcacaaagttttaggctgtacacagccagccttgggaatctcgttgagcgttcggcgtggatccacggggccaggccaccctgcgggagcgccacacgcatccacttcggattcagtgggtgaagacagaactctgagagtctgcaggcggctcctgtgctttttatttctggctcttcggatgtcttctagacatttactatcactgcacctgaagaaaaaatcacttttaccttcctaatttaaaaagacaaaacagaaatgtacgttccttcgctagctttagtctttctgttcccatttttataaatctgagcattgataatgttctatctaaatttgtacagtgtgatttttttttttagaataaatattttataaaaggg

SEQ ID NO: 374020 - DNA, 16017 bp, Homo sapiens
cgcgccggggcctggtgctcggtcggcgggtgctgccgctttaagcgggggcgggactgcgcgcggccgagcggttgcgacgagggctcggctgggggtcgccggggtcgcgggccgggcctgcaggagccgggccgccgaggtcggggctggttgaactcatggacctgatacttttctcttgagaagcaaaccagcccaaaagaaaaatggcgtttgttgcaacacagggggccacggtggttgaccagaccactttgatgaaaaagtaccttcagtttgtggcagctctcacagatgtgaatacacctgatgaaacaaagttgaaaatgatgcaagaagttagtgaaaattttgagaatgtcacgtcatctcctcagtattctacattcctagaacatatcatccctcgattccttacatttctccaagatggagaagttcagtttcttcaggagaaaccagcacagcaactgcggaagctcgtacttgaaataattcatagaataccaaccaacgaacatcttcgtcctcacacaaaaaatgttttgtctgtgatgtttcgctttttagagacggaaaatgaagaaaatgttcttatttgtctaagaataattattgagctacacaaacagttcaggccaccgatcacacaagaaattcatcattttctggattttgtgaaacagatttacaaggagcttccaaaagtagtgaaccgctactttgagaaccctcaagtgatccccgagaacacagtgcctcccccagaaatggttggtatgataacaacgattgctgtgaaagtcaacccggagcgtgaggacagtgagactcgaacacattccatcattccgaggggatcactttctctgaaagtgttggcagaattgcccattattgttgttttaatgtatcagctctacaaactgaacatccacaatgttgttgctgagtttgtgcccttgatcatgaacaccattgccattcaggtgtctgcacaagcgaggcaacataagctttacaacaaggagttgtatgctgacttcattgctgctcagattaaaacattgtcatttttagcttacattatcaggatttaccaggagttggtgactaagtattctcagcagatggtgaaaggaatgctccagttactttcaaattgtccagcagagactgcacacctcagaaaggagcttctgattgctgccaaacacatcctcaccacagagctgagaaaccagttcattccttgcatggacaagctgtttgatgaatccatactaattggctcaggatatactgccagagagactctaaggcccctcgcctacagcacgctggccgacctcgtgcaccatgtccgccagcacctgcccctcagcgacctctccctcgccgtccagctcttcgccaagaacatcgacgatgagtccctgcccagcagcatccagaccatgtcctgcaagctcctgctgaacctggtggactgcatccgttccaagagcgagcaggagagtggcaatgggagagacgtcctgatgcggatgctggaggttttcgttctcaaattccacacaattgctcggtaccagctctctgccatttttaagaagtgtaagcctcagtcagaacttggagccgtggaagcagctctgcctggggtgcccactgcccctgcagctcctggccctgctccctccccagcccctgtccctgccccacctccacccccgcccccacccccacctgccacccctgtgaccccggcccccgtgcctcccttcgagaagcaaggagaaaaggacaaggaagacaagcagacattccaagtcacagactgtcgaagtttggtcaaaaccttggtgtgtggtgtcaagacaatcacgtggggcataacatcatgcaaagcacctggtgaagctcagttcattcccaacaagcagttacaacccaaagagacacagatttacatcaaacttgtgaaatatgcaatgcaagctttagatatttatcaggtccagatagcaggaaatggacagacatacatccgtgtggccaactgccagactgtgagaatgaaagaggagaaggaggtattggagcatttcgctggtgtgttcacaatgatgaaccccttaacgttcaaagaaatcttccaaactacggtcccttatatggtggagagaatctcaaaaaattatgctcttcagattgttgccaattccttcttggcaaatcctactacctctgctctgtttgctacgattctggtggaatatctccttgatcgcctgccagaaatgggctccaacgtggagctctccaacctgtacctcaagctgttcaagctggtctttggctctgtctccctctttgcagctgaaaatgaacaaatgctgaagcctcacttgcacaagattgtgaacagctctatggagctcgcgcagactgccaaggaaccctacaactacttcttgctgctacgggcgctgtttcgctctattggtggaggtagccacgatctcttgtatcaggagttcttgcctctccttccaaacctcctgcaagggctgaacatgcttcagagtggcctgcacaagcagcacatgaaggacctctttgtggagctgtgtctcaccgtccctgtgcggctgagctcgcttttgccgtacctgcccatgcttatggatcccttggtgtctgcactcaatgggtctcagacattggtcagccaaggcctcaggacgctggagctgtgtgtggacaacctgcagcccgacttcctctacgaccacatccagccggtgcgcgcagagctcatgcaggctctgtggcgcaccttacgcaaccctgctgacagcatctcccacgtggcctaccgtgtgctcggtaagtttggcggcagtaacaggaagatgctgaaggagtcgcagaagctgcactacgttgtgaccgaggttcagggccccagcatcactgtggagttttccgactgcaaagcttctctccagctccccatggagaaggccattgaaactgctctggactgcctgaaaagcgccaacactgagccctactaccggaggcaggcgtgggaagtgatcaaatgcttcctggtggccatgatgagcctggaggacaacaagcacgcactctaccagctcctggcacaccccaactttacagaaaagaccatccccaatgttatcatctcacatcgctacaaagcccaggacactccagcccggaagacttttgagcaggccctgacaggcgccttcatgtctgctgtcattaaggacctgcggcccagcgccctgccctttgtcgccagcttgatccgccactatacgatggtggcagtcgcccagcagtgtggccctttcttgctgccttgctaccaggtgggcagccagcccagcacagccatgtttcacagtgaagaaaatggctcgaaaggaatggatcctttggttctcattgatgcaattgctatttgtatggcatatgaagaaaaggagctttgcaaaatcggggaggtggccctagctgtgatatttgatgttgcaagtatcatcctgggctccaaggagagggcctgccagctgcccctgttttcttacatcgtggagcgcctgtgtgcatgttgttatgaacaggcgtggtatgcaaagctggggggtgtggtgtctattaagtttctcatggagcggctgcctctcacttgggttctccagaaccagcagacattcctgaaagcacttctctttgtcatgatggacttaactggagaggtttccaatggggcagtcgctatggcaaagaccacgctggagcagcttctgatgcggtgcgcaacgcctttaaaagacgaggagagagccgaagagatcgtggccgcccaggaaaagtctttccaccatgtgacacacgacttggttcgagaagtcacctctccaaactccactgtgaggaagcaggccatgcattcgctgcaggtgttggcccaggtcactgggaagagtgtcacggtgatcatggaaccccacaaagaggtcctgcaggatatggtcccccctaagaagcacctgctccgacaccagcctgccaacgcacagattggcctgatggaggggaacacgttctgtaccacgttgcagcccaggctcttcacaatggaccttaacgtggtggagcataaggtgttctacacagagctgttgaatttgtgtgaggctgaagattcagctttaacaaagctgccctgttataaaagccttccgtcactcgtacctttacgaattgcggcattaaatgcacttgctgcctgcaattaccttcctcagtccagggagaaaatcatcgctgcactcttcaaagccctgaattccaccaatagtgagctccaagaggccggagaagcctgtatgagaaagtttttagaaggtgctaccatagaagtcgatcaaatccacacacatatgcgacctttgctgatgatgctgggagattaccggagcttgacgctgaatgttgtgaatcgcctgacttcggtcacgaggctcttcccaaattccttcaatgataaattttgtgatcagatgatgcaacatctgcgcaagtggatggaagtggtggtgatcacccacaaagggggccagaggagcgacggaaacgaaagcatttccgagtgcgggagatgtcccttgtctccattctgtcagtttgaggaaatgaagatttgctcagcaattataaacctttttcatctgatcccggctgctcctcagacactggtgaagcctttgctagaggttgtcatgaaaacggagcgggcgatgctgatcgaggcggggagtccattccgagagcccctgatcaagttcctgactcgacatccctcgcagacagtggagctgttcatgatggaagccacactgaacgatccccagtggagcagaatgtttatgagttttttaaaacacaaagacgccagacctctgcgggatgtgctggctgccaaccccaacaggttcatcaccctgctgctgccggggggtgcccagacggctgtgcgccccggttcgcccagcaccagcaccatgcgcctggacctccagttccaggccatcaagatcataagcattatagtgaaaaacgatgactcctggctggccagccagcactctctggtgagccagttgcgacgtgtgtgggtgagtgagaacttccaagagaggcaccgcaaggagaacatggcagccaccaactggaaggagcccaagctgctggcctactgcctgctgaactactgcaaaaggaattacggagatatagaattgctgttccagctgctccgagcctttactggtcgttttctctgcaacatgacattcttaaaagagtatatggaggaagagattcccaaaaattacagcatcgctcagaaacgtgccctgttctttcgctttgtagacttcaacgaccccaacttcggagatgaattaaaagctaaagttctgcagcatatcttgaatcctgctttcttgtacagctttgagaagggggaaggagagcagctcttgggacctcccaatccagaaggagataacccagaaagcatcaccagtgtgtttattaccaaggtcctggaccccgagaagcaggcggacatgctggactcgctgcggatctacctgctgcagtacgccacgctgctggtggagcacgccccccaccacatccatgacaacaacaagaaccgcaacagcaagctgcgccgcctcatgaccttcgcctggccctgcctgctctccaaggcctgcgtggacccagcctgcaagtacagcggacacttgctcctggcgcacattatcgccaaattcgccatacacaagaagatcgtcctgcaggtttttcatagtctcctcaaggctcacgcaatggaagctcgagcgatcgtcagacaggcgatggccattctgaccccggcggtgccggccaggatggaggacgggcaccagatgctgacccactggacccggaagatcattgtggaggaggggcacaccgtcccgcagctggtccacattctgcacctgatagtgcaacacttcaaggtgtactacccggtacggcaccacttggtgcagcacatggtgagcgccatgcagaggctgggcttcacgcccagtgtcaccatcgagcagaggcggctggccgtggacctgtctgaagtcgtcatcaagtgggagctgcagaggatcaaggaccagcagccggattcagatatggacccaaattccagtggagaaggagtcaattctgtctcatcctccattaagagaggcctgtccgtggattctgcccaggaagtgaaacgctttaggacggccaccggagccatcagtgcagtctttgggaggagccagtcgctacctggagcagactctctcctcgccaagcccattgacaagcagcacacagacactgtggtgaacttccttatccgcgtggcctgtcaggttaatgacaacaccaacacagcggggtcccctggggaggtgctctctcgccggtgtgtgaaccttctgaagactgcgttgcggccagacatgtggcccaagtccgaactcaagctgcagtggttcgacaagctgctgatgactgtggagcagccaaaccaagtgaactatgggaatatctgcacgggcctagaagtgctgagcttcctgctaactgtcctccagtccccagccatcctcagtagcttcaaacctctgcagcgtggaattgccgcctgcatgacatgtggaaacaccaaggtgttgcgagccgtccacagccttctctcgcgcctgatgagcattttcccaacagagccgagtacttccagtgtggcctccaaatatgaagagctggagtgcctctacgcagccgtcggaaaggtcatctatgaagggctcaccaactacgagaaggccaccaatgccaatccctcccagctcttcgggacccttatgatcctcaagtctgcctgcagcaacaaccccagctacatagacaggctgatctccgtctttatgcgctccctgcagaagatggtccgggagcatttaaaccctcaggcagcgtcaggaagcaccgaagccacctcaggtacaagcgagctggtgatgctgagtctggagctggtgaagacgcgcctggcagtgatgagcatggagatgcggaagaacttcatccaggccatcctgacatccctcatcgaaaaatcaccagatgccaaaatcctccgggctgtggtcaaaatcgtggaagaatgggtcaagaataactccccaatggcagccaatcagacacctacactccgggagaagtccattttgcttgtgaagatgatgacttacatagaaaaacgctttccggaagaccttgaattaaatgcccagtttttagatcttgttaactatgtctacagggatgagaccctctctggcagcgagctgacggcgaaacttgagcctgcctttctctctgggctgcgctgtgcccagccactcatcagggcaaagtttttcgaggtttttgacaactccatgaaacgtcgtgtctacgagcgcttgctctatgtgacctgttcgcagaactgggaagccatggggaaccacttctggatcaagcagtgcattgagctgcttctggccgtgtgtgagaagagcacccccattggcaccagctgccaaggagccatgctcccgtccatcaccaacgtcatcaacctggccgatagccacgaccgtgccgccttcgccatggtcacacatgtcaagcaggagccccgggagcgggagaacagcgagtccaaagaggaggatgtagagatagacatcgaactagctcctggggatcagaccagcacgcccaaaaccaaagaactttcagaaaaggacattggaaaccagctgcacatgctaaccaacaggcacgacaagtttctggacactctccgagaggtgaagactggagcgctgctcagcgctttcgttcagctgtgccacatttccacgacgctggcagagaagacgtgggtccagcttttccccagattgtggaagatcctctctgacagacagcagcatgcactcgcgggtgagataagtccatttctgtgcagcggcagtcaccaggtgcagcgggactgccagcccagcgcgctgaactgctttgtggaagccatgtcccagtgcgtgccgccaatccccatccgaccctgcgtcctgaagtacctggggaagacacacaacctctggttccggtccacgctgatgttggagcaccaggcttttgaaaagggtctgagtcttcagattaagccgaagcaaacaacggagttttatgagcaggagagcatcaccccgccgcagcaggagatactggattcccttgcggagctttactccctgttacaagaggaagatatgtgggctggtctgtggcagaagcggtgcaagtactcggagacagcgactgcgattgcttacgagcagcacgggttctttgagcaggcacaagaatcctatgaaaaggcaatggataaagccaaaaaagaacatgagaggagtaacgcctcccctgctattttccctgaataccagctctgggaagaccactggattcgatgctccaaggaattgaaccagtgggaagccctgacggagtacggtcagtccaaaggccacatcaacccctacctcgtcctggagtgcgcctggcgggtgtccaactggactgccatgaaggaggcgctggtgcaggtggaagtgagctgtccgaaggagatggcctggaaggtgaacatgtaccgcggatacctggccatctgccaccccgaggagcagcagctcagcttcatcgagcgcctggtggagatggccagcagcctggccatccgcgagtggcggcggctgccccacgtagtgtcccacgtgcacacgcctctcctacaggcagcccagcaaatcatcgaactccaggaagctgcacaaatcaacgcaggcttacagccaaccaacctgggaaggaacaacagcctgcacgacatgaagacggtggtgaagacctggaggaaccgactgcccatcgtgtctgacgacttgtcccactggagcagcatcttcatgtggaggcagcatcattaccaggcgattgtaactgcctatgagaatagctctcagcatgatcccagttcaaataacgctatgcttggggttcatgcatcagcttcagcgatcatccagtatggaaaaatcgcccggaaacaaggactggtcaatgtagctctggatatattaagtcggattcatactattccaactgttcctatcgtggattgcttccagaagattcgacagcaagttaaatgctacctccagctggcaggcgtcatgggcaaaaacgagtgcatgcagggccttgaagttattgaatctacaaatttaaaatacttcacaaaagagatgacagccgaattttatgcactgaagggaatgttcttggctcagatcaacaagtccgaggaggcaaacaaagccttctctgcagctgtgcagatgcacgatgtgctggtgaaagcctgggccatgtggggcgactacctggagaacatctttgtgaaggagcggcagctgcacctgggcgtgtctgccatcacctgctacctgcacgcctgccggcatcagaacgagagcaaatcgaggaaatacttagccaaggtgctgtggcttttgagttttgatgatgacaaaaacactttggcagatgccgtcgacaagtactgcattggtgtgccacccatccagtggctggcctggatcccacagctgctcacctgcctggttggctcggagggaaagctgctcttgaacctcattagccaggttggacgcgtgtatccccaagcggtctactttcccatccggaccctgtacctgaccctgaaaatagaacagcgggaacgctacaagagcgattctggacagcagcagccaagttcagtgggtaaccagtcccattctgcatcagatccagggcccataagagcaacagcacccatgtggcgctgcagccgaatcatgcacatgcagcgagagctccaccccacccttctgtcttccctggaaggcatcgtcgatcagatggtctggttcagagaaaattggcatgaagaggttctcaggcagctccaacagggcctggcgaaatgttactccgtggcgtttgagaaaagtggagcggtgtccgatgctaaaatcaccccccacactctcaattttgtgaagaagttggtgagcacgtttggggtgggcctggagaatgtgtccaacgtctcgaccatgttctccagcgcagcctctgagtctctggcccggcgggcgcaggccactgcacaagaccctgtctttcagaagctgaaaggccagttcacgacggattttgacttcagcgttccaggatccatgaagcttcataatcttatttctaagttgaaaaagtggatcaaaatcttggaggccaagaccaagcaactccccaaattcttcctcatagaggaaaagtgccggttcttgagcaatttctcggcacagacagctgaagtggaaattcctggggagtttctgatgccaaagccaacgcattattacatcaagattgcacggttcatgccccgggtagagattgtgcagaagcacaacaccgcagcccggcggctgtacatccggggacacaatggcaagatctacccatacctcgtcatgaacgacgcctgcctcacagagtcacggcgagaggagcgtgtgttgcagctgctgcgtctgctgaacccctgtttggagaagagaaaggagaccaccaagaggcacttgtttttcacagtgccccgggttgtggcagtttccccacagatgcgcctcgtggaggacaacccctcttcactttcccttgtggagatctacaagcagcgctgcgccaagaagggcatcgagcatgacaaccccatctcccgttactatgaccggctggctacggtgcaggcgcggggaacccaagccagccaccaggtcctccgcgacatcctcaaggaggttcagagtaacatggtgccgcgcagcatgctcaaggagtgggcgctgcacaccttccccaatgccacggactactggacgttccggaagatgttcaccatccagctggctctgataggcttcgcggaattcgtcctgcatttaaatagactcaaccccgagatgttacagatcgctcaggacactggcaaactgaatgttgcctactttcgatttgacataaacgacgcgactggagacctggatgccaaccgtcctgtcccatttcgactcacgcccaacatttctgagtttctgaccaccatcggggtctccggcccgttgacagcgtccatgattgcggtcgcccggtgcttcgcccagccaaactttaaggtggatggcattctgaaaacggttctccgggacgagatcattgcttggcacaaaaaaacacaagaggacacgtcctctcctctctcggccgccgggcagccagagaacatggacagccagcaactggtgtccctggttcagaaagccgtcaccgccatcatgacccgcctgcacaacctcgcccagttcgaaggcggggaaagcaaggtgaacaccctggtggccgcggcaaacagcctggacaatctgtgccgcatggaccccgcctggcacccctggctgtgactgtggccgccacggccacccggaatgtgaagggcgctccgggctctgagcccgcagcttttacgacttctccctgcctcgttccttatattcacagaagccccatagtttcactgggttgcggttattttcctggtagtttgcgtgtaagaaagggagaatatagttttagaggaagctgaactatgacgatgctgggcgaagcggttggaaatggcagagctgaaacttattccaagctttcaaaataatcttttaagaagccaggattctccggtctggaatttctgagtgagtcctttttttatggtgtcctccctctgtgaatgtacaggcggaactgtacgaacagctcccttccatccatttttaactctttcggaaataacacctcacagcagcttcgtgcttttgtacagacctttgtaacaagtgtacagaaaactcattttgtttgagaaacaggagttgatgaacccatcatgctggtttttctctgagcacaaagttttaggctgtacacagccagccttgggaatctcgttgagcgttcggcgtggatccacggggccaggccaccctgcgggagcgccacacgcatccacttcggattcagtgggtgaagacagaactctgagagtctgcaggcggctcctgtgctttttatttctggctcttcggatgtcttctagacatttactatcactgcacctgaagaaaaaatcacttttaccttcctaatttaaaaagacaaaacagaaatgtacgttccttcgctagctttagtctttctgttcccatttttataaatctgagcattgataatgttctatctaaatttgtacagtgtgatttttttttttagaataaatattttataaaagggtttattgtcccttgtttatgttaaaatgcttgtttccatgaggggtttcttccctctcaatgcccctagccccttgggaaccagaggccccagagacagtgtgggctcctcagcgtagcctcttggtgacagcatgcgctgcctgggcaggcacagtgctgctgtgatcacaggggaggccatgacttggcacctgggaagccagctcagagcatattcagtcaagttgatgaggaatggcggcccgacctcagcagcaggtcggcgtgcgggactctcagaatggcggcctgatctcagcagcgggtcggcatgccagactctcggagccctcagctatcttcatgtgtttcaggactgctgccatgtaacgtgtgtgtgtggagagtgtgcggagtgtacacgaagcatgcccggaggctcagcatgaagcactctgtacccagctctacctcctcattgtccttcatccagtgtgtaccttcagccaggcctgccctcgtgtgggaggggcagtccccaaggagcacacgccatgatgtcagaaacatcttcttcgaggaagatggccctttacaggccccaggggacgggggcagcacggagccctctctggacctctgccgcaggccacagaaccttctccagcccttgactctccttgcctttcatttaccctccattgttccaggctaccacggaatgatgattacagctgagtttacccaaatcccaccacagggtcaaatgaaagggccttgacaagatgtcccttggcagcttgagatcgcagttgtgttgctgggttatggcctgggtgcaggctggtttgcagtgggcggtactggcagctaccatcaaggtctctgtgctgggctccagccctcagcccagaggggtggttccccactttatagagagggggtttccagctcacagaaggtgagaagcttgtcccaggcctggagcagctgtggagaaactgggagggaagcccgtccagcctgattccaagcccacatgctgctcacaggtcaaggccgagggactgatttttgccggtctgactggactcaagttacttcccagttccttgcagagagctgtctttgtgagacagtgtcttgggttctggaatgatgggagccgtgctttgcaaatgaggagtgattgcgtgctcatctggcagctggtgggtgtcctgctggcatcaggcctgagcggtgaccgtgctcctctgattgtcctcactgcgtgtgacaaggcctgggccactgtgtgagtcgtcttgcgctccatgaagcctggtgtctgtgcagatgtgtgggtggcgttagggttgggggacatttgtctttcacactggagaatgggagtctggagctggtgctactggtgaggaagaggcccggcctgctgccaggttcgcccacaccttccccctggttgttgggaaaaccaaccttggaatggccaaggcaggagatagcacctccccggtgaagatccaggagctctcatgagctccacgtggaaagatcaaggatctggagtctggagcccttcaggcagcaactcagtgaccatgaacctcagctctgtccacccggcacagcattgctgggagctggacccgggaggctgccggctccagagcgaggagggtccagaccatgcagacaatatgccctttttctccaaacaccatttcaagcaaacccgcaggtctcctccacggctgtcagcagcttctcgtagagcttctcataggactcatatggtggaatgtcgatccggttaaagctgaaaaaggacaaaagagagtcaccgtgtgggcagtccagccctaggaccaacctcaaggccaaggacaggcaagacagggtctcgctaggttgcccaggctgctctcaaactccaggcctcaagtgaacctcctgccttgccctctcaacgtgctgggagccactgtgcccaatcaacacacagtaaaggggaagctcatttccagtatttgtgcaaagaaaaagacatcctttaagaagctatcgcagcaaaccaaaaaatacaaaattgtgacccagaggatgtacagtgacttctggctttctagggtgctgtggcttttgagttctgatgatgacaaaaatattttggcagagactccatctcaaaaaaaaacaacaaaaaaaaaacgtgaacgtcagcatcctctggggctcccaggacgccgtgacttcctggccgcggtgcttaccagcacacatctcagaaaaacatcccagccaccttccagctcttcctgcccacagcgcacatagacgcgtcatcgaatagccctgcctccacgtcagtcaccttgcaaagccttgaagccttggagcgggactcgcgtggacccagtcacaaactgcaggagcctggccctcctttcttcatcgaacgtctccaccgcttgccagaaccaccgcacgatgttgctgtcggccacacagtgcttcagccgcgtgttcgacttccagtcgttcaagtctattttatccaggccgcctatgatcagctgaggaggtgcagaaaggtgaattacttccaaaatgcataaacccacgtcaggatgcgcctcctaggtacccgacacacaacagtgaaaagtcgattcccaagcaaagcagcagctgtgtactaggcagatgttgagacaggaagaaagctacaaacaggaggcctgtggcacatgcttccgtccgcctcctccaaacgggtctccaaccccaaggaccgcggtgcacagctgttgatgggatgttattttataaccaaagcggggtttttgctctgcatcggtgaggagtatcaaagaaccaaccggtgacactgaacagagctaaccatgaataacggcacgtcccagggtctctccaggacactcaaggacatgtggagtttcaagtctgaagagaggagaattcagcaagagttaggtggggctggggccgatagggcatgtttccgcaattggcttgaaaagttcaacccctgctgggtgcagtggctcacgcctgtagtcccggcactttgtgggggccgaagttgggcggatcacttgagcccaggagttcaaggccagcctgggcaacatggcaaaaccccgtctctacaacagatacaaaaattagccaggcatgatgacgtgcacctgtagcctcagctactcgggaggcggaggtgggaggatggcttcagcctgggaggtcgaggctgcagtgagccatgatcgcaccactgcactccagcctgagcaacagagcgagaccgtgtctc

SEQ ID NO: 374021 - DNA, 15963 bp, Homo sapiens
cgcgccggggcctggtgctcggtcggcgggtgctgccgctttaagcgggggcgggactgcgcgcggccgagcggttgcgacgagggctcggctgggggtcgccggggtcgcgggccgggcctgcaggagccgggccgccgaggtcggggctggttgaactcatggacctgatacttttctcttgagaagcaaaccagcccaaaagaaaaatggcgtttgttgcaacacagggggccacggtggttgaccagaccactttgatgaaaaagtaccttcagtttgtggcagctctcacagatgtgaatacacctgatgaaacaaagttgaaaatgatgcaagaagttagtgaaaattttgagaatgtcacgtcatctcctcagtattctacattcctagaacatatcatccctcgattccttacatttctccaagatggagaagttcagtttcttcaggagaaaccagcacagcaactgcggaagctcgtacttgaaataattcatagaataccaaccaacgaacatcttcgtcctcacacaaaaaatgttttgtctgtgatgtttcgctttttagagacggaaaatgaagaaaatgttcttatttgtctaagaataattattgagctacacaaacagttcaggccaccgatcacacaagaaattcatcattttctggattttgtgaaacagatttacaaggagcttccaaaagtagtgaaccgctactttgagaaccctcaagtgatccccgagaacacagtgcctcccccagaaatggttggtatgataacaacgattgctgtgaaagtcaacccggagcgtgaggacagtgagactcgaacacattccatcattccgaggggatcactttctctgaaagtgttggcagaattgcccattattgttgttttaatgtatcagctctacaaactgaacatccacaatgttgttgctgagtttgtgcccttgatcatgaacaccattgccattcaggtgtctgcacaagcgaggcaacataagctttacaacaaggagttgtatgctgacttcattgctgctcagattaaaacattgtcatttttagcttacattatcaggatttaccaggagttggtgactaagtattctcagcagatggtgaaaggaatgctccagttactttcaaattgtccagcagagactgcacacctcagaaaggagcttctgattgctgccaaacacatcctcaccacagagctgagaaaccagttcattccttgcatggacaagctgtttgatgaatccatactaattggctcaggatatactgccagagagactctaaggcccctcgcctacagcacgctggccgacctcgtgcaccatgtccgccagcacctgcccctcagcgacctctccctcgccgtccagctcttcgccaagaacatcgacgatgagtccctgcccagcagcatccagaccatgtcctgcaagctcctgctgaacctggtggactgcatccgttccaagagcgagcaggagagtggcaatgggagagacgtcctgatgcggatgctggaggttttcgttctcaaattccacacaattgctcggtaccagctctctgccatttttaagaagtgtaagcctcagtcagaacttggagccgtggaagcagctctgcctggggtgcccactgcccctgcagctcctggccctgctccctccccagcccctgtccctgccccacctccacccccgcccccacccccacctgccacccctgtgaccccggcccccgtgcctcccttcgagaagcaaggagaaaaggacaaggaagacaagcagacattccaagtcacagactgtcgaagtttggtcaaaaccttggtgtgtggtgtcaagacaatcacgtggggcataacatcatgcaaagcacctggtgaagctcagttcattcccaacaagcagttacaacccaaagagacacagatttacatcaaacttgtgaaatatgcaatgcaagctttagatatttatcaggtccagatagcaggaaatggacagacatacatccgtgtggccaactgccagactgtgagaatgaaagaggagaaggaggtattggagcatttcgctggtgtgttcacaatgatgaaccccttaacgttcaaagaaatcttccaaactacggtcccttatatggtggagagaatctcaaaaaattatgctcttcagattgttgccaattccttcttggcaaatcctactacctctgctctgtttgctacgattctggtggaatatctccttgatcgcctgccagaaatgggctccaacgtggagctctccaacctgtacctcaagctgttcaagctggtctttggctctgtctccctctttgcagctgaaaatgaacaaatgctgaagcctcacttgcacaagattgtgaacagctctatggagctcgcgcagactgccaaggaaccctacaactacttcttgctgctacgggcgctgtttcgctctattggtggaggtagccacgatctcttgtatcaggagttcttgcctctccttccaaacctcctgcaagggctgaacatgcttcagagtggcctgcacaagcagcacatgaaggacctctttgtggagctgtgtctcaccgtccctgtgcggctgagctcgcttttgccgtacctgcccatgcttatggatcccttggtgtctgcactcaatgggtctcagacattggtcagccaaggcctcaggacgctggagctgtgtgtggacaacctgcagcccgacttcctctacgaccacatccagccggtgcgcgcagagctcatgcaggctctgtggcgcaccttacgcaaccctgctgacagcatctcccacgtggcctaccgtgtgctcggtaagtttggcggcagtaacaggaagatgctgaaggagtcgcagaagctgcactacgttgtgaccgaggttcagggccccagcatcactgtggagttttccgactgcaaagcttctctccagctccccatggagaaggccattgaaactgctctggactgcctgaaaagcgccaacactgagccctactaccggaggcaggcgtgggaagtgatcaaatgcttcctggtggccatgatgagcctggaggacaacaagcacgcactctaccagctcctggcacaccccaactttacagaaaagaccatccccaatgttatcatctcacatcgctacaaagcccaggacactccagcccggaagacttttgagcaggccctgacaggcgccttcatgtctgctgtcattaaggacctgcggcccagcgccctgccctttgtcgccagcttgatccgccactatacgatggtggcagtcgcccagcagtgtggccctttcttgctgccttgctaccaggtgggcagccagcccagcacagccatgtttcacagtgaagaaaatggctcgaaaggaatggatcctttggttctcattgatgcaattgctatttgtatggcatatgaagaaaaggagctttgcaaaatcggggaggtggccctagctgtgatatttgatgttgcaagtatcatcctgggctccaaggagagggcctgccagctgcccctgttttcttacatcgtggagcgcctgtgtgcatgttgttatgaacaggcgtggtatgcaaagctggggggtgtggtgtctattaagtttctcatggagcggctgcctctcacttgggttctccagaaccagcagacattcctgaaagcacttctctttgtcatgatggacttaactggagaggtttccaatggggcagtcgctatggcaaagaccacgctggagcagcttctgatgcggtgcgcaacgcctttaaaagacgaggagagagccgaagagatcgtggccgcccaggaaaagtctttccaccatgtgacacacgacttggttcgagaagtcacctctccaaactccactgtgaggaagcaggccatgcattcgctgcaggtgttggcccaggtcactgggaagagtgtcacggtgatcatggaaccccacaaagaggtcctgcaggatatggtcccccctaagaagcacctgctccgacaccagcctgccaacgcacagattggcctgatggaggggaacacgttctgtaccacgttgcagcccaggctcttcacaatggaccttaacgtggtggagcataaggtgttctacacagagctgttgaatttgtgtgaggctgaagattcagctttaacaaagctgccctgttataaaagccttccgtcactcgtacctttacgaattgcggcattaaatgcacttgctgcctgcaattaccttcctcagtccagggagaaaatcatcgctgcactcttcaaagccctgaattccaccaatagtgagctccaagaggccggagaagcctgtatgagaaagtttttagaaggtgctaccatagaagtcgatcaaatccacacacatatgcgacctttgctgatgatgctgggagattaccggagcttgacgctgaatgttgtgaatcgcctgacttcggtcacgaggctcttcccaaattccttcaatgataaattttgtgatcagatgatgcaacatctgcgcaagtggatggaagtggtggtgatcacccacaaagggggccagaggagcgacggaaacgaaagcatttccgagtgcgggagatgtcccttgtctccattctgtcagtttgaggaaatgaagatttgctcagcaattataaacctttttcatctgatcccggctgctcctcagacactggtgaagcctttgctagaggttgtcatgaaaacggagcgggcgatgctgatcgaggcggggagtccattccgagagcccctgatcaagttcctgactcgacatccctcgcagacagtggagctgttcatgatggaagccacactgaacgatccccagtggagcagaatgtttatgagttttttaaaacacaaagacgccagacctctgcgggatgtgctggctgccaaccccaacaggttcatcaccctgctgctgccggggggtgcccagacggctgtgcgccccggttcgcccagcaccagcaccatgcgcctggacctccagttccaggccatcaagatcataagcattatagtgaaaaacgatgactcctggctggccagccagcactctctggtgagccagttgcgacgtgtgtgggtgagtgagaacttccaagagaggcaccgcaaggagaacatggcagccaccaactggaaggagcccaagctgctggcctactgcctgctgaactactgcaaaaggaattacggagatatagaattgctgttccagctgctccgagcctttactggtcgttttctctgcaacatgacattcttaaaagagtatatggaggaagagattcccaaaaattacagcatcgctcagaaacgtgccctgttctttcgctttgtagacttcaacgaccccaacttcggagatgaattaaaagctaaagttctgcagcatatcttgaatcctgctttcttgtacagctttgagaagggggaaggagagcagctcttgggacctcccaatccagaaggagataacccagaaagcatcaccagtgtgtttattaccaaggtcctggaccccgagaagcaggcggacatgctggactcgctgcggatctacctgctgcagtacgccacgctgctggtggagcacgccccccaccacatccatgacaacaacaagaaccgcaacagcaagctgcgccgcctcatgaccttcgcctggccctgcctgctctccaaggcctgcgtggacccagcctgcaagtacagcggacacttgctcctggcgcacattatcgccaaattcgccatacacaagaagatcgtcctgcaggtttttcatagtctcctcaaggctcacgcaatggaagctcgagcgatcgtcagacaggcgatggccattctgaccccggcggtgccggccaggatggaggacgggcaccagatgctgacccactggacccggaagatcattgtggaggaggggcacaccgtcccgcagctggtccacattctgcacctgatagtgcaacacttcaaggtgtactacccggtacggcaccacttggtgcagcacatggtgagcgccatgcagaggctgggcttcacgcccagtgtcaccatcgagcagaggcggctggccgtggacctgtctgaagtcgtcatcaagtgggagctgcagaggatcaaggaccagcagccggattcagatatggacccaaattccagtggagaaggagtcaattctgtctcatcctccattaagagaggcctgtccgtggattctgcccaggaagtgaaacgctttaggacggccaccggagccatcagtgcagtctttgggaggagccagtcgctacctggagcagactctctcctcgccaagcccattgacaagcagcacacagacactgtggtgaacttccttatccgcgtggcctgtcaggttaatgacaacaccaacacagcggggtcccctggggaggtgctctctcgccggtgtgtgaaccttctgaagactgcgttgcggccagacatgtggcccaagtccgaactcaagctgcagtggttcgacaagctgctgatgactgtggagcagccaaaccaagtgaactatgggaatatctgcacgggcctagaagtgctgagcttcctgctaactgtcctccagtccccagccatcctcagtagcttcaaacctctgcagcgtggaattgccgcctgcatgacatgtggaaacaccaaggtgttgcgagccgtccacagccttctctcgcgcctgatgagcattttcccaacagagccgagtacttccagtgtggcctccaaatatgaagagctggagtgcctctacgcagccgtcggaaaggtcatctatgaagggctcaccaactacgagaaggccaccaatgccaatccctcccagctcttcgggacccttatgatcctcaagtctgcctgcagcaacaaccccagctacatagacaggctgatctccgtctttatgcgctccctgcagaagatggtccgggagcatttaaaccctcaggcagcgtcaggaagcaccgaagccacctcaggtacaagcgagctggtgatgctgagtctggagctggtgaagacgcgcctggcagtgatgagcatggagatgcggaagaacttcatccaggccatcctgacatccctcatcgaaaaatcaccagatgccaaaatcctccgggctgtggtcaaaatcgtggaagaatgggtcaagaataactccccaatggcagccaatcagacacctacactccgggagaagtccattttgcttgtgaagatgatgacttacatagaaaaacgctttccggaagaccttgaattaaatgcccagtttttagatcttgttaactatgtctacagggatgagaccctctctggcagcgagctgacggcgaaacttgagcctgcctttctctctgggctgcgctgtgcccagccactcatcagggcaaagtttttcgaggtttttgacaactccatgaaacgtcgtgtctacgagcgcttgctctatgtgacctgttcgcagaactgggaagccatggggaaccacttctggatcaagcagtgcattgagctgcttctggccgtgtgtgagaagagcacccccattggcaccagctgccaaggagccatgctcccgtccatcaccaacgtcatcaacctggccgatagccacgaccgtgccgccttcgccatggtcacacatgtcaagcaggagccccgggagcgggagaacagcgagtccaaagaggaggatgtagagatagacatcgaactagctcctggggatcagaccagcacgcccaaaaccaaagaactttcagaaaaggacattggaaaccagctgcacatgctaaccaacaggcacgacaagtttctggacactctccgagaggtgaagactggagcgctgctcagcgctttcgttcagctgtgccacatttccacgacgctggcagagaagacgtgggtccagcttttccccagattgtggaagatcctctctgacagacagcagcatgcactcgcgggtgagataagtccatttctgtgcagcggcagtcaccaggtgcagcgggactgccagcccagcgcgctgaactgctttgtggaagccatgtcccagtgcgtgccgccaatccccatccgaccctgcgtcctgaagtacctggggaagacacacaacctctggttccggtccacgctgatgttggagcaccaggcttttgaaaagggtctgagtcttcagattaagccgaagcaaacaacggagttttatgagcaggagagcatcaccccgccgcagcaggagatactggattcccttgcggagctttactccctgttacaagaggaagatatgtgggctggtctgtggcagaagcggtgcaagtactcggagacagcgactgcgattgcttacgagcagcacgggttctttgagcaggcacaagaatcctatgaaaaggcaatggataaagccaaaaaagaacatgagaggagtaacgcctcccctgctattttccctgaataccagctctgggaagaccactggattcgatgctccaaggaattgaaccagtgggaagccctgacggagtacggtcagtccaaaggccacatcaacccctacctcgtcctggagtgcgcctggcgggtgtccaactggactgccatgaaggaggcgctggtgcaggtggaagtgagctgtccgaaggagatggcctggaaggtgaacatgtaccgcggatacctggccatctgccaccccgaggagcagcagctcagcttcatcgagcgcctggtggagatggccagcagcctggccatccgcgagtggcggcggctgccccacgtagtgtcccacgtgcacacgcctctcctacaggcagcccagcaaatcatcgaactccaggaagctgcacaaatcaacgcaggcttacagccaaccaacctgggaaggaacaacagcctgcacgacatgaagacggtggtgaagacctggaggaaccgactgcccatcgtgtctgacgacttgtcccactggagcagcatcttcatgtggaggcagcatcattaccaggcgattgtaactgcctatgagaatagctctcagcatgatcccagttcaaataacgctatgcttggggttcatgcatcagcttcagcgatcatccagtatggaaaaatcgcccggaaacaaggactggtcaatgtagctctggatatattaagtcggattcatactattccaactgttcctatcgtggattgcttccagaagattcgacagcaagttaaatgctacctccagctggcaggcgtcatgggcaaaaacgagtgcatgcagggccttgaagttattgaatctacaaatttaaaatacttcacaaaagagatgacagccgaattttatgcactgaagggaatgttcttggctcagatcaacaagtccgaggaggcaaacaaagccttctctgcagctgtgcagatgcacgatgtgctggtgaaagcctgggccatgtggggcgactacctggagaacatctttgtgaaggagcggcagctgcacctgggcgtgtctgccatcacctgctacctgcacgcctgccggcatcagaacgagagcaaatcgaggaaatacttagccaaggtgctgtggcttttgagttttgatgatgacaaaaacactttggcagatgccgtcgacaagtactgcattggtgtgccacccatccagtggctggcctggatcccacagctgctcacctgcctggttggctcggagggaaagctgctcttgaacctcattagccaggttggacgcgtgtatccccaagcggtctactttcccatccggaccctgtacctgaccctgaaaatagaacagcgggaacgctacaagagcgattctggacagcagcagccaagttcagtgggtaaccagtcccattctgcatcagatccagggcccataagagcaacagcacccatgtggcgctgcagccgaatcatgcacatgcagcgagagctccaccccacccttctgtcttccctggaaggcatcgtcgatcagatggtctggttcagagaaaattggcatgaagaggttctcaggcagctccaacagggcctggcgaaatgttactccgtggcgtttgagaaaagtggagcggtgtccgatgctaaaatcaccccccacactctcaattttgtgaagaagttggtgagcacgtttggggtgggcctggagaatgtgtccaacgtctcgaccatgttctccagcgcagcctctgagtctctggcccggcgggcgcaggccactgcacaagaccctgtctttcagaagctgaaaggccagttcacgacggattttgacttcagcgttccaggatccatgaagcttcataatcttatttctaagttgaaaaagtggatcaaaatcttggaggccaagaccaagcaactccccaaattcttcctcatagaggaaaagtgccggttcttgagcaatttctcggcacagacagctgaagtggaaattcctggggagtttctgatgccaaagccaacgcattattacatcaagattgcacggttcatgccccgggtagagattgtgcagaagcacaacaccgcagcccggcggctgtacatccggggacacaatggcaagatctacccatacctcgtcatgaacgacgcctgcctcacagagtcacggcgagaggagcgtgtgttgcagctgctgcgtctgctgaacccctgtttggagaagagaaaggagaccaccaagaggcacttgtttttcacagtgccccgggttgtggcagtttccccacagatgcgcctcgtggaggacaacccctcttcactttcccttgtggagatctacaagcagcgctgcgccaagaagggcatcgagcatgacaaccccatctcccgttactatgaccggctggctacggtgcaggcgcggggaacccaagccagccaccaggtcctccgcgacatcctcaaggaggttcagagtaacatggtgccgcgcagcatgctcaaggagtgggcgctgcacaccttccccaatgccacggactactggacgttccggaagatgttcaccatccagctggctctgataggcttcgcggaattcgtcctgcatttaaatagactcaaccccgagatgttacagatcgctcaggacactggcaaactgaatgttgcctactttcgatttgacataaacgacgcgactggagacctggatgccaaccgtcctgtcccatttcgactcacgcccaacatttctgagtttctgaccaccatcggggtctccggcccgttgacagcgtccatgattgcggtcgcccggtgcttcgcccagccaaactttaaggtggatggcattctgaaaacggttctccgggacgagatcattgcttggcacaaaatggacagccagcaactggtgtccctggttcagaaagccgtcaccgccatcatgacccgcctgcacaacctcgcccagttcgaaggcggggaaagcaaggtgaacaccctggtggccgcggcaaacagcctggacaatctgtgccgcatggaccccgcctggcacccctggctgtgactgtggccgccacggccacccggaatgtgaagggcgctccgggctctgagcccgcagcttttacgacttctccctgcctcgttccttatattcacagaagccccatagtttcactgggttgcggttattttcctggtagtttgcgtgtaagaaagggagaatatagttttagaggaagctgaactatgacgatgctgggcgaagcggttggaaatggcagagctgaaacttattccaagctttcaaaataatcttttaagaagccaggattctccggtctggaatttctgagtgagtcctttttttatggtgtcctccctctgtgaatgtacaggcggaactgtacgaacagctcccttccatccatttttaactctttcggaaataacacctcacagcagcttcgtgcttttgtacagacctttgtaacaagtgtacagaaaactcattttgtttgagaaacaggagttgatgaacccatcatgctggtttttctctgagcacaaagttttaggctgtacacagccagccttgggaatctcgttgagcgttcggcgtggatccacggggccaggccaccctgcgggagcgccacacgcatccacttcggattcagtgggtgaagacagaactctgagagtctgcaggcggctcctgtgctttttatttctggctcttcggatgtcttctagacatttactatcactgcacctgaagaaaaaatcacttttaccttcctaatttaaaaagacaaaacagaaatgtacgttccttcgctagctttagtctttctgttcccatttttataaatctgagcattgataatgttctatctaaatttgtacagtgtgatttttttttttagaataaatattttataaaagggtttattgtcccttgtttatgttaaaatgcttgtttccatgaggggtttcttccctctcaatgcccctagccccttgggaaccagaggccccagagacagtgtgggctcctcagcgtagcctcttggtgacagcatgcgctgcctgggcaggcacagtgctgctgtgatcacaggggaggccatgacttggcacctgggaagccagctcagagcatattcagtcaagttgatgaggaatggcggcccgacctcagcagcaggtcggcgtgcgggactctcagaatggcggcctgatctcagcagcgggtcggcatgccagactctcggagccctcagctatcttcatgtgtttcaggactgctgccatgtaacgtgtgtgtgtggagagtgtgcggagtgtacacgaagcatgcccggaggctcagcatgaagcactctgtacccagctctacctcctcattgtccttcatccagtgtgtaccttcagccaggcctgccctcgtgtgggaggggcagtccccaaggagcacacgccatgatgtcagaaacatcttcttcgaggaagatggccctttacaggccccaggggacgggggcagcacggagccctctctggacctctgccgcaggccacagaaccttctccagcccttgactctccttgcctttcatttaccctccattgttccaggctaccacggaatgatgattacagctgagtttacccaaatcccaccacagggtcaaatgaaagggccttgacaagatgtcccttggcagcttgagatcgcagttgtgttgctgggttatggcctgggtgcaggctggtttgcagtgggcggtactggcagctaccatcaaggtctctgtgctgggctccagccctcagcccagaggggtggttccccactttatagagagggggtttccagctcacagaaggtgagaagcttgtcccaggcctggagcagctgtggagaaactgggagggaagcccgtccagcctgattccaagcccacatgctgctcacaggtcaaggccgagggactgatttttgccggtctgactggactcaagttacttcccagttccttgcagagagctgtctttgtgagacagtgtcttgggttctggaatgatgggagccgtgctttgcaaatgaggagtgattgcgtgctcatctggcagctggtgggtgtcctgctggcatcaggcctgagcggtgaccgtgctcctctgattgtcctcactgcgtgtgacaaggcctgggccactgtgtgagtcgtcttgcgctccatgaagcctggtgtctgtgcagatgtgtgggtggcgttagggttgggggacatttgtctttcacactggagaatgggagtctggagctggtgctactggtgaggaagaggcccggcctgctgccaggttcgcccacaccttccccctggttgttgggaaaaccaaccttggaatggccaaggcaggagatagcacctccccggtgaagatccaggagctctcatgagctccacgtggaaagatcaaggatctggagtctggagcccttcaggcagcaactcagtgaccatgaacctcagctctgtccacccggcacagcattgctgggagctggacccgggaggctgccggctccagagcgaggagggtccagaccatgcagacaatatgccctttttctccaaacaccatttcaagcaaacccgcaggtctcctccacggctgtcagcagcttctcgtagagcttctcataggactcatatggtggaatgtcgatccggttaaagctgaaaaaggacaaaagagagtcaccgtgtgggcagtccagccctaggaccaacctcaaggccaaggacaggcaagacagggtctcgctaggttgcccaggctgctctcaaactccaggcctcaagtgaacctcctgccttgccctctcaacgtgctgggagccactgtgcccaatcaacacacagtaaaggggaagctcatttccagtatttgtgcaaagaaaaagacatcctttaagaagctatcgcagcaaaccaaaaaatacaaaattgtgacccagaggatgtacagtgacttctggctttctagggtgctgtggcttttgagttctgatgatgacaaaaatattttggcagagactccatctcaaaaaaaaacaacaaaaaaaaaacgtgaacgtcagcatcctctggggctcccaggacgccgtgacttcctggccgcggtgcttaccagcacacatctcagaaaaacatcccagccaccttccagctcttcctgcccacagcgcacatagacgcgtcatcgaatagccctgcctccacgtcagtcaccttgcaaagccttgaagccttggagcgggactcgcgtggacccagtcacaaactgcaggagcctggccctcctttcttcatcgaacgtctccaccgcttgccagaaccaccgcacgatgttgctgtcggccacacagtgcttcagccgcgtgttcgacttccagtcgttcaagtctattttatccaggccgcctatgatcagctgaggaggtgcagaaaggtgaattacttccaaaatgcataaacccacgtcaggatgcgcctcctaggtacccgacacacaacagtgaaaagtcgattcccaagcaaagcagcagctgtgtactaggcagatgttgagacaggaagaaagctacaaacaggaggcctgtggcacatgcttccgtccgcctcctccaaacgggtctccaaccccaaggaccgcggtgcacagctgttgatgggatgttattttataaccaaagcggggtttttgctctgcatcggtgaggagtatcaaagaaccaaccggtgacactgaacagagctaaccatgaataacggcacgtcccagggtctctccaggacactcaaggacatgtggagtttcaagtctgaagagaggagaattcagcaagagttaggtggggctggggccgatagggcatgtttccgcaattggcttgaaaagttcaacccctgctgggtgcagtggctcacgcctgtagtcccggcactttgtgggggccgaagttgggcggatcacttgagcccaggagttcaaggccagcctgggcaacatggcaaaaccccgtctctacaacagatacaaaaattagccaggcatgatgacgtgcacctgtagcctcagctactcgggaggcggaggtgggaggatggcttcagcctgggaggtcgaggctgcagtgagccatgatcgcaccactgcactccagcctgagcaacagagcgagaccgtgtctc

SEQ ID NO: 374022 - DNA, 7941 bp, Homo sapiens
acggaatatgaggaggcggtcctgcttttatttcagtgcggggcgggggttcgttgacagtacatgggcgtgcactcgcgggtgagataagtccatttctgtgcagcggcagtcaccaggtgcagcgggactgccagcccagcgcgctgaactgctttgtggaagccatgtcccagtgcgtgccgccaatccccatccgaccctgcgtcctgaagtacctggggaagacacacaacctctggttccggtccacgctgatgttggagcaccaggcttttgaaaagggtctgagtcttcagattaagccgaagcaaacaacggagttttatgagcaggagagcatcaccccgccgcagcaggagatactggattcccttgcggagctttactccctgttacaagaggaagatatgtgggctggtctgtggcagaagcggtgcaagtactcggagacagcgactgcgattgcttacgagcagcacgggttctttgagcaggcacaagaatcctatgaaaaggcaatggataaagccaaaaaagaacatgagaggagtaacgcctcccctgctattttccctgaataccagctctgggaagaccactggattcgatgctccaaggaattgaaccagtgggaagccctgacggagtacggtcagtccaaaggccacatcaacccctacctcgtcctggagtgcgcctggcgggtgtccaactggactgccatgaaggaggcgctggtgcaggtggaagtgagctgtccgaaggagatggcctggaaggtgaacatgtaccgcggatacctggccatctgccaccccgaggagcagcagctcagcttcatcgagcgcctggtggagatggccagcagcctggccatccgcgagtggcggcggctgccccacgtagtgtcccacgtgcacacgcctctcctacaggcagcccagcaaatcatcgaactccaggaagctgcacaaatcaacgcaggcttacagccaaccaacctgggaaggaacaacagcctgcacgacatgaagacggtggtgaagacctggaggaaccgactgcccatcgtgtctgacgacttgtcccactggagcagcatcttcatgtggaggcagcatcattaccaggcgattgtaactgcctatgagaatagctctcagcatgatcccagttcaaataacgctatgcttggggttcatgcatcagcttcagcgatcatccagtatggaaaaatcgcccggaaacaaggactggtcaatgtagctctggatatattaagtcggattcatactattccaactgttcctatcgtggattgcttccagaagattcgacagcaagttaaatgctacctccagctggcaggcgtcatgggcaaaaacgagtgcatgcagggccttgaagttattgaatctacaaatttaaaatacttcacaaaagagatgacagccgaattttatgcactgaagggaatgttcttggctcagatcaacaagtccgaggaggcaaacaaagccttctctgcagctgtgcagatgcacgatgtgctggtgaaagcctgggccatgtggggcgactacctggagaacatctttgtgaaggagcggcagctgcacctgggcgtgtctgccatcacctgctacctgcacgcctgccggcatcagaacgagagcaaatcgaggaaatacttagccaaggtgctgtggcttttgagttttgatgatgacaaaaacactttggcagatgccgtcgacaagtactgcattggtgtgccacccatccagtggctggcctggatcccacagctgctcacctgcctggttggctcggagggaaagctgctcttgaacctcattagccaggttggacgcgtgtatccccaagcggtctactttcccatccggaccctgtacctgaccctgaaaatagaacagcgggaacgctacaagagcgattctggacagcagcagccaagttcagtgggtaaccagtcccattctgcatcagatccagggcccataagagcaacagcacccatgtggcgctgcagccgaatcatgcacatgcagcgagagctccaccccacccttctgtcttccctggaaggcatcgtcgatcagatggtctggttcagagaaaattggcatgaagaggttctcaggcagctccaacagggcctggcgaaatgttactccgtggcgtttgagaaaagtggagcggtgtccgatgctaaaatcaccccccacactctcaattttgtgaagaagttggtgagcacgtttggggtgggcctggagaatgtgtccaacgtctcgaccatgttctccagcgcagcctctgagtctctggcccggcgggcgcaggccactgcacaagaccctgtctttcagaagctgaaaggccagttcacgacggattttgacttcagcgttccaggatccatgaagcttcataatcttatttctaagttgaaaaagtggatcaaaatcttggaggccaagaccaagcaactccccaaattcttcctcatagaggaaaagtgccggttcttgagcaatttctcggcacagacagctgaagtggaaattcctggggagtttctgatgccaaagccaacgcattattacatcaagattgcacggttcatgccccgggtagagattgtgcagaagcacaacaccgcagcccggcggctgtacatccggggacacaatggcaagatctacccatacctcgtcatgaacgacgcctgcctcacagagtcacggcgagaggagcgtgtgttgcagctgctgcgtctgctgaacccctgtttggagaagagaaaggagaccaccaagaggcacttgtttttcacagtgccccgggttgtggcagtttccccacagatgcgcctcgtggaggacaacccctcttcactttcccttgtggagatctacaagcagcgctgcgccaagaagggcatcgagcatgacaaccccatctcccgttactatgaccggctggctacggtgcaggcgcggggaacccaagccagccaccaggtcctccgcgacatcctcaaggaggttcagagtaacatggtgccgcgcagcatgctcaaggagtgggcgctgcacaccttccccaatgccacggactactggacgttccggaagatgttcaccatccagctggctctgataggcttcgcggaattcgtcctgcatttaaatagactcaaccccgagatgttacagatcgctcaggacactggcaaactgaatgttgcctactttcgatttgacataaacgacgcgactggagacctggatgccaaccgtcctgtcccatttcgactcacgcccaacatttctgagtttctgaccaccatcggggtctccggcccgttgacagcgtccatgattgcggtcgcccggtgcttcgcccagccaaactttaaggtggatggcattctgaaaacggttctccgggacgagatcattgcttggcacaaaaaaacacaagaggacacgtcctctcctctctcggccgccgggcagccagagaacatggacagccagcaactggtgtccctggttcagaaagccgtcaccgccatcatgacccgcctgcacaacctcgcccagttcgaaggcggggaaagcaaggtgaacaccctggtggccgcggcaaacagcctggacaatctgtgccgcatggaccccgcctggcacccctggctgtgactgtggccgccacggccacccggaatgtgaagggcgctccgggctctgagcccgcagcttttacgacttctccctgcctcgttccttatattcacagaagccccatagtttcactgggttgcggttattttcctggtagtttgcgtgtaagaaagggagaatatagttttagaggaagctgaactatgacgatgctgggcgaagcggttggaaatggcagagctgaaacttattccaagctttcaaaataatcttttaagaagccaggattctccggtctggaatttctgagtgagtcctttttttatggtgtcctccctctgtgaatgtacaggcggaactgtacgaacagctcccttccatccatttttaactctttcggaaataacacctcacagcagcttcgtgcttttgtacagacctttgtaacaagtgtacagaaaactcattttgtttgagaaacaggagttgatgaacccatcatgctggtttttctctgagcacaaagttttaggctgtacacagccagccttgggaatctcgttgagcgttcggcgtggatccacggggccaggccaccctgcgggagcgccacacgcatccacttcggattcagtgggtgaagacagaactctgagagtctgcaggcggctcctgtgctttttatttctggctcttcggatgtcttctagacatttactatcactgcacctgaagaaaaaatcacttttaccttcctaatttaaaaagacaaaacagaaatgtacgttccttcgctagctttagtctttctgttcccatttttataaatctgagcattgataatgttctatctaaatttgtacagtgtgatttttttttttagaataaatattttataaaagggtttattgtcccttgtttatgttaaaatgcttgtttccatgaggggtttcttccctctcaatgcccctagccccttgggaaccagaggccccagagacagtgtgggctcctcagcgtagcctcttggtgacagcatgcgctgcctgggcaggcacagtgctgctgtgatcacaggggaggccatgacttggcacctgggaagccagctcagagcatattcagtcaagttgatgaggaatggcggcccgacctcagcagcaggtcggcgtgcgggactctcagaatggcggcctgatctcagcagcgggtcggcatgccagactctcggagccctcagctatcttcatgtgtttcaggactgctgccatgtaacgtgtgtgtgtggagagtgtgcggagtgtacacgaagcatgcccggaggctcagcatgaagcactctgtacccagctctacctcctcattgtccttcatccagtgtgtaccttcagccaggcctgccctcgtgtgggaggggcagtccccaaggagcacacgccatgatgtcagaaacatcttcttcgaggaagatggccctttacaggccccaggggacgggggcagcacggagccctctctggacctctgccgcaggccacagaaccttctccagcccttgactctccttgcctttcatttaccctccattgttccaggctaccacggaatgatgattacagctgagtttacccaaatcccaccacagggtcaaatgaaagggccttgacaagatgtcccttggcagcttgagatcgcagttgtgttgctgggttatggcctgggtgcaggctggtttgcagtgggcggtactggcagctaccatcaaggtctctgtgctgggctccagccctcagcccagaggggtggttccccactttatagagagggggtttccagctcacagaaggtgagaagcttgtcccaggcctggagcagctgtggagaaactgggagggaagcccgtccagcctgattccaagcccacatgctgctcacaggtcaaggccgagggactgatttttgccggtctgactggactcaagttacttcccagttccttgcagagagctgtctttgtgagacagtgtcttgggttctggaatgatgggagccgtgctttgcaaatgaggagtgattgcgtgctcatctggcagctggtgggtgtcctgctggcatcaggcctgagcggtgaccgtgctcctctgattgtcctcactgcgtgtgacaaggcctgggccactgtgtgagtcgtcttgcgctccatgaagcctggtgtctgtgcagatgtgtgggtggcgttagggttgggggacatttgtctttcacactggagaatgggagtctggagctggtgctactggtgaggaagaggcccggcctgctgccaggttcgcccacaccttccccctggttgttgggaaaaccaaccttggaatggccaaggcaggagatagcacctccccggtgaagatccaggagctctcatgagctccacgtggaaagatcaaggatctggagtctggagcccttcaggcagcaactcagtgaccatgaacctcagctctgtccacccggcacagcattgctgggagctggacccgggaggctgccggctccagagcgaggagggtccagaccatgcagacaatatgccctttttctccaaacaccatttcaagcaaacccgcaggtctcctccacggctgtcagcagcttctcgtagagcttctcataggactcatatggtggaatgtcgatccggttaaagctgaaaaaggacaaaagagagtcaccgtgtgggcagtccagccctaggaccaacctcaaggccaaggacaggcaagacagggtctcgctaggttgcccaggctgctctcaaactccaggcctcaagtgaacctcctgccttgccctctcaacgtgctgggagccactgtgcccaatcaacacacagtaaaggggaagctcatttccagtatttgtgcaaagaaaaagacatcctttaagaagctatcgcagcaaaccaaaaaatacaaaattgtgacccagaggatgtacagtgacttctggctttctagggtgctgtggcttttgagttctgatgatgacaaaaatattttggcagagactccatctcaaaaaaaaacaacaaaaaaaaaacgtgaacgtcagcatcctctggggctcccaggacgccgtgacttcctggccgcggtgcttaccagcacacatctcagaaaaacatcccagccaccttccagctcttcctgcccacagcgcacatagacgcgtcatcgaatagccctgcctccacgtcagtcaccttgcaaagccttgaagccttggagcgggactcgcgtggacccagtcacaaactgcaggagcctggccctcctttcttcatcgaacgtctccaccgcttgccagaaccaccgcacgatgttgctgtcggccacacagtgcttcagccgcgtgttcgacttccagtcgttcaagtctattttatccaggccgcctatgatcagctgaggaggtgcagaaaggtgaattacttccaaaatgcataaacccacgtcaggatgcgcctcctaggtacccgacacacaacagtgaaaagtcgattcccaagcaaagcagcagctgtgtactaggcagatgttgagacaggaagaaagctacaaacaggaggcctgtggcacatgcttccgtccgcctcctccaaacgggtctccaaccccaaggaccgcggtgcacagctgttgatgggatgttattttataaccaaagcggggtttttgctctgcatcggtgaggagtatcaaagaaccaaccggtgacactgaacagagctaaccatgaataacggcacgtcccagggtctctccaggacactcaaggacatgtggagtttcaagtctgaagagaggagaattcagcaagagttaggtggggctggggccgatagggcatgtttccgcaattggcttgaaaagttcaacccctgctgggtgcagtggctcacgcctgtagtcccggcactttgtgggggccgaagttgggcggatcacttgagcccaggagttcaaggccagcctgggcaacatggcaaaaccccgtctctacaacagatacaaaaattagccaggcatgatgacgtgcacctgtagcctcagctactcgggaggcggaggtgggaggatggcttcagcctgggaggtcgaggctgcagtgagccatgatcgcaccactgcactccagcctgagcaacagagcgagaccgtgtctc

SEQ ID NO: 374023 - DNA, 6397 bp, Homo sapiens
  misc_feature (40)..(40): n is a, c, g, or t
caactctggcgcgagctgctaactcagggcgagctgctanctcagggcgagctgctaactcaggagcggcagctgcacctgggcgtgtctgccatcacctgctacctgcacgcctgccggcatcagaacgagagcaaatcgaggaaatacttagccaaggtgctgtggcttttgagttttgatgatgacaaaaacactttggcagatgccgtcgacaagtactgcattggtgtgccacccatccagtggctggcctggatcccacagctgctcacctgcctggttggctcggagggaaagctgctcttgaacctcattagccaggttggacgcgtgtatccccaagcggtctactttcccatccggaccctgtacctgaccctgaaaatagaacagcgggaacgctacaagagcgattctggacagcagcagccaagttcagtgggtaaccagtcccattctgcatcagatccagggcccataagagcaacagcacccatgtggcgctgcagccgaatcatgcacatgcagcgagagctccaccccacccttctgtcttccctggaaggcatcgtcgatcagatggtctggttcagagaaaattggcatgaagaggttctcaggcagctccaacagggcctggcgaaatgttactccgtggcgtttgagaaaagtggagcggtgtccgatgctaaaatcaccccccacactctcaattttgtgaagaagttggtgagcacgtttggggtgggcctggagaatgtgtccaacgtctcgaccatgttctccagcgcagcctctgagtctctggcccggcgggcgcaggccactgcacaagaccctgtctttcagaagctgaaaggccagttcacgacggattttgacttcagcgttccaggatccatgaagcttcataatcttatttctaagttgaaaaagtggatcaaaatcttggaggccaagaccaagcaactccccaaattcttcctcatagaggaaaagtgccggttcttgagcaatttctcggcacagacagctgaagtggaaattcctggggagtttctgatgccaaagccaacgcattattacatcaagattgcacggttcatgccccgggtagagattgtgcagaagcacaacaccgcagcccggcggctgtacatccggggacacaatggcaagatctacccatacctcgtcatgaacgacgcctgcctcacagagtcacggcgagaggagcgtgtgttgcagctgctgcgtctgctgaacccctgtttggagaagagaaaggagaccaccaagaggcacttgtttttcacagtgccccgggttgtggcagtttccccacagatgcgcctcgtggaggacaacccctcttcactttcccttgtggagatctacaagcagcgctgcgccaagaagggcatcgagcatgacaaccccatctcccgttactatgaccggctggctacggtgcaggcgcggggaacccaagccagccaccaggtcctccgcgacatcctcaaggaggttcagagtaacatggtgccgcgcagcatgctcaaggagtgggcgctgcacaccttccccaatgccacggactactggacgttccggaagatgttcaccatccagctggctctgataggcttcgcggaattcgtcctgcatttaaatagactcaaccccgagatgttacagatcgctcaggacactggcaaactgaatgttgcctactttcgatttgacataaacgacgcgactggagacctggatgccaaccgtcctgtcccatttcgactcacgcccaacatttctgagtttctgaccaccatcggggtctccggcccgttgacagcgtccatgattgcggtcgcccggtgcttcgcccagccaaactttaaggtggatggcattctgaaaacggttctccgggacgagatcattgcttggcacaaaaaaacacaagaggacacgtcctctcctctctcggccgccgggcagccagagaacatggacagccagcaactggtgtccctggttcagaaagccgtcaccgccatcatgacccgcctgcacaacctcgcccagttcgaaggcggggaaagcaaggtgaacaccctggtggccgcggcaaacagcctggacaatctgtgccgcatggaccccgcctggcacccctggctgtgactgtggccgccacggccacccggaatgtgaagggcgctccgggctctgagcccgcagcttttacgacttctccctgcctcgttccttatattcacagaagccccatagtttcactgggttgcggttattttcctggtagtttgcgtgtaagaaagggagaatatagttttagaggaagctgaactatgacgatgctgggcgaagcggttggaaatggcagagctgaaacttattccaagctttcaaaataatcttttaagaagccaggattctccggtctggaatttctgagtgagtcctttttttatggtgtcctccctctgtgaatgtacaggcggaactgtacgaacagctcccttccatccatttttaactctttcggaaataacacctcacagcagcttcgtgcttttgtacagacctttgtaacaagtgtacagaaaactcattttgtttgagaaacaggagttgatgaacccatcatgctggtttttctctgagcacaaagttttaggctgtacacagccagccttgggaatctcgttgagcgttcggcgtggatccacggggccaggccaccctgcgggagcgccacacgcatccacttcggattcagtgggtgaagacagaactctgagagtctgcaggcggctcctgtgctttttatttctggctcttcggatgtcttctagacatttactatcactgcacctgaagaaaaaatcacttttaccttcctaatttaaaaagacaaaacagaaatgtacgttccttcgctagctttagtctttctgttcccatttttataaatctgagcattgataatgttctatctaaatttgtacagtgtgatttttttttttagaataaatattttataaaagggtttattgtcccttgtttatgttaaaatgcttgtttccatgaggggtttcttccctctcaatgcccctagccccttgggaaccagaggccccagagacagtgtgggctcctcagcgtagcctcttggtgacagcatgcgctgcctgggcaggcacagtgctgctgtgatcacaggggaggccatgacttggcacctgggaagccagctcagagcatattcagtcaagttgatgaggaatggcggcccgacctcagcagcaggtcggcgtgcgggactctcagaatggcggcctgatctcagcagcgggtcggcatgccagactctcggagccctcagctatcttcatgtgtttcaggactgctgccatgtaacgtgtgtgtgtggagagtgtgcggagtgtacacgaagcatgcccggaggctcagcatgaagcactctgtacccagctctacctcctcattgtccttcatccagtgtgtaccttcagccaggcctgccctcgtgtgggaggggcagtccccaaggagcacacgccatgatgtcagaaacatcttcttcgaggaagatggccctttacaggccccaggggacgggggcagcacggagccctctctggacctctgccgcaggccacagaaccttctccagcccttgactctccttgcctttcatttaccctccattgttccaggctaccacggaatgatgattacagctgagtttacccaaatcccaccacagggtcaaatgaaagggccttgacaagatgtcccttggcagcttgagatcgcagttgtgttgctgggttatggcctgggtgcaggctggtttgcagtgggcggtactggcagctaccatcaaggtctctgtgctgggctccagccctcagcccagaggggtggttccccactttatagagagggggtttccagctcacagaaggtgagaagcttgtcccaggcctggagcagctgtggagaaactgggagggaagcccgtccagcctgattccaagcccacatgctgctcacaggtcaaggccgagggactgatttttgccggtctgactggactcaagttacttcccagttccttgcagagagctgtctttgtgagacagtgtcttgggttctggaatgatgggagccgtgctttgcaaatgaggagtgattgcgtgctcatctggcagctggtgggtgtcctgctggcatcaggcctgagcggtgaccgtgctcctctgattgtcctcactgcgtgtgacaaggcctgggccactgtgtgagtcgtcttgcgctccatgaagcctggtgtctgtgcagatgtgtgggtggcgttagggttgggggacatttgtctttcacactggagaatgggagtctggagctggtgctactggtgaggaagaggcccggcctgctgccaggttcgcccacaccttccccctggttgttgggaaaaccaaccttggaatggccaaggcaggagatagcacctccccggtgaagatccaggagctctcatgagctccacgtggaaagatcaaggatctggagtctggagcccttcaggcagcaactcagtgaccatgaacctcagctctgtccacccggcacagcattgctgggagctggacccgggaggctgccggctccagagcgaggagggtccagaccatgcagacaatatgccctttttctccaaacaccatttcaagcaaacccgcaggtctcctccacggctgtcagcagcttctcgtagagcttctcataggactcatatggtggaatgtcgatccggttaaagctgaaaaaggacaaaagagagtcaccgtgtgggcagtccagccctaggaccaacctcaaggccaaggacaggcaagacagggtctcgctaggttgcccaggctgctctcaaactccaggcctcaagtgaacctcctgccttgccctctcaacgtgctgggagccactgtgcccaatcaacacacagtaaaggggaagctcatttccagtatttgtgcaaagaaaaagacatcctttaagaagctatcgcagcaaaccaaaaaatacaaaattgtgacccagaggatgtacagtgacttctggctttctagggtgctgtggcttttgagttctgatgatgacaaaaatattttggcagagactccatctcaaaaaaaaacaacaaaaaaaaaacgtgaacgtcagcatcctctggggctcccaggacgccgtgacttcctggccgcggtgcttaccagcacacatctcagaaaaacatcccagccaccttccagctcttcctgcccacagcgcacatagacgcgtcatcgaatagccctgcctccacgtcagtcaccttgcaaagccttgaagccttggagcgggactcgcgtggacccagtcacaaactgcaggagcctggccctcctttcttcatcgaacgtctccaccgcttgccagaaccaccgcacgatgttgctgtcggccacacagtgcttcagccgcgtgttcgacttccagtcgttcaagtctattttatccaggccgcctatgatcagctgaggaggtgcagaaaggtgaattacttccaaaatgcataaacccacgtcaggatgcgcctcctaggtacccgacacacaacagtgaaaagtcgattcccaagcaaagcagcagctgtgtactaggcagatgttgagacaggaagaaagctacaaacaggaggcctgtggcacatgcttccgtccgcctcctccaaacgggtctccaaccccaaggaccgcggtgcacagctgttgatgggatgttattttataaccaaagcggggtttttgctctgcatcggtgaggagtatcaaagaaccaaccggtgacactgaacagagctaaccatgaataacggcacgtcccagggtctctccaggacactcaaggacatgtggagtttcaagtctgaagagaggagaattcagcaagagttaggtggggctggggccgatagggcatgtttccgcaattggcttgaaaagttcaacccctgctgggtgcagtggctcacgcctgtagtcccggcactttgtgggggccgaagttgggcggatcacttgagcccaggagttcaaggccagcctgggcaacatggcaaaaccccgtctctacaacagatacaaaaattagccaggcatgatgacgtgcacctgtagcctcagctactcgggaggcggaggtgggaggatggcttcagcctgggaggtcgaggctgcagtgagccatgatcgcaccactgcactccagcctgagcaacagagcgagaccgtgtctc

SEQ ID NO: 374024 - DNA, 16144 bp, Homo sapiens
cgcgccggggcctggtgctcggtcggcgggtgctgccgctttaagcgggggcgggactgcgcgcggccgagcggttgcgacgagggctcggctgggggtcgccggggtcgcgggccgggcctgcaggagccgggccgccgaggtcggggctggttgaactcatggacctgatacttttctcttgagaagcaaaccagcccaaaagaaaaatggcgtttgttgcaacacagggggccacggtggttgaccagaccactttgatgaaaaagtaccttcagtttgtggcagctctcacagatgtgaatacacctgatgaaacaaagttgaaaatgatgcaagaagttagtgaaaattttgagaatgtcacgtcatctcctcagtattctacattcctagaacatatcatccctcgattccttacatttctccaagatggagaagttcagtttcttcaggagaaaccagcacagcaactgcggaagctcgtacttgaaataattcatagaataccaaccaacgaacatcttcgtcctcacacaaaaaatgttttgtctgtgatgtttcgctttttagagacggaaaatgaagaaaatgttcttatttgtctaagaataattattgagctacacaaacagttcaggccaccgatcacacaagaaattcatcattttctggattttgtgaaacagatttacaaggagcttccaaaagtagtgaaccgctactttgagaaccctcaagtgatccccgagaacacagtgcctcccccagaaatggttggtatgataacaacgattgctgtgaaagtcaacccggagcgtgaggacagtgagactcgaacacattccatcattccgaggggatcactttctctgaaagtgttggcagaattgcccattattgttgttttaatgtatcagctctacaaactgaacatccacaatgttgttgctgagtttgtgcccttgatcatgaacaccattgccattcaggtgtctgcacaagcgaggcaacataagctttacaacaaggagttgtatgctgacttcattgctgctcagattaaaacattgtcatttttagcttacattatcaggatttaccaggagttggtgactaagtattctcagcagatggtgaaaggaatgctccagttactttcaaattgtccagcagagactgcacacctcagaaaggagcttctgattgctgccaaacacatcctcaccacagagctgagaaaccagttcattccttgcatggacaagctgtttgatgaatccatactaattggctcaggatatactgccagagagactctaaggcccctcgcctacagcacgctggccgacctcgtgcaccatgtccgccagcacctgcccctcagcgacctctccctcgccgtccagctcttcgccaagaacatcgacgatgagtccctgcccagcagcatccagaccatgtcctgcaagctcctgctgaacctggtggactgcatccgttccaagagcgagcaggagagtggcaatgggagagacgtcctgatgcggatgctggaggttttcgttctcaaattccacacaattgctcggtaccagctctctgccatttttaagaagtgtaagcctcagtcagaacttggagccgtggaagcagctctgcctggggtgcccactgcccctgcagctcctggccctgctccctccccagcccctgtccctgccccacctccacccccgcccccacccccacctgccacccctgtgaccccggcccccgtgcctcccttcgagaagcaaggagaaaaggacaaggaagacaagcagacattccaagtcacagactgtcgaagtttggtcaaaaccttggtgtgtggtgtcaagacaatcacgtggggcataacatcatgcaaagcacctggtgaagctcagttcattcccaacaagcagttacaacccaaagagacacagatttacatcaaacttgtgaaatatgcaatgcaagctttagatatttatcaggtccagatagcaggaaatggacagacatacatccgtgtggccaactgccagactgtgagaatgaaagaggagaaggaggtattggagcatttcgctggtgtgttcacaatgatgaaccccttaacgttcaaagaaatcttccaaactacggtcccttatatggtggagagaatctcaaaaaattatgctcttcagattgttgccaattccttcttggcaaatcctactacctctgctctgtttgctacgattctggtggaatatctccttgatcgcctgccagaaatgggctccaacgtggagctctccaacctgtacctcaagctgttcaagctggtctttggctctgtctccctctttgcagctgaaaatgaacaaatgctgaagcctcacttgcacaagattgtgaacagctctatggagctcgcgcagactgccaaggaaccctacaactacttcttgctgctacgggcgctgtttcgctctattggtggaggtagccacgatctcttgtatcaggagttcttgcctctccttccaaacctcctgcaagggctgaacatgcttcagagtggcctgcacaagcagcacatgaaggacctctttgtggagctgtgtctcaccgtccctgtgcggctgagctcgcttttgccgtacctgcccatgcttatggatcccttggtgtctgcactcaatgggtctcagacattggtcagccaaggcctcaggacgctggagctgtgtgtggacaacctgcagcccgacttcctctacgaccacatccagccggtgcgcgcagagctcatgcaggctctgtggcgcaccttacgcaaccctgctgacagcatctcccacgtggcctaccgtgtgctcggtaagtttggcggcagtaacaggaagatgctgaaggagtcgcagaagctgcactacgttgtgaccgaggttcagggccccagcatcactgtggagttttccgactgcaaagcttctctccagctccccatggagaaggccattgaaactgctctggactgcctgaaaagcgccaacactgagccctactaccggaggcaggcgtgggaagtgatcaaatgcttcctggtggccatgatgagcctggaggacaacaagcacgcactctaccagctcctggcacaccccaactttacagaaaagaccatccccaatgttatcatctcacatcgctacaaagcccaggacactccagcccggaagacttttgagcaggccctgacaggcgccttcatgtctgctgtcattaaggacctgcggcccagcgccctgccctttgtcgccagcttgatccgccactatacgatggtggcagtcgcccagcagtgtggccctttcttgctgccttgctaccaggtgggcagccagcccagcacagccatgtttcacagtgaagaaaatggctcgaaaggaatggatcctttggttctcattgatgcaattgctatttgtatggcatatgaagaaaaggagctttgcaaaatcggggaggtggccctagctgtgatatttgatgttgcaagtatcatcctgggctccaaggagagggcctgccagctgcccctgttttcttacatcgtggagcgcctgtgtgcatgttgttatgaacaggcgtggtatgcaaagctggggggtgtggtgtctattaagtttctcatggagcggctgcctctcacttgggttctccagaaccagcagacattcctgaaagcacttctctttgtcatgatggacttaactggagaggtttccaatggggcagtcgctatggcaaagaccacgctggagcagcttctgatgcggtgcgcaacgcctttaaaagacgaggagagagccgaagagatcgtggccgcccaggaaaagtctttccaccatgtgacacacgacttggttcgagaagtcacctctccaaactccactgtgaggaagcaggccatgcattcgctgcaggtgttggcccaggtcactgggaagagtgtcacggtgatcatggaaccccacaaagaggtcctgcaggatatggtcccccctaagaagcacctgctccgacaccagcctgccaacgcacagattggcctgatggaggggaacacgttctgtaccacgttgcagcccaggctcttcacaatggaccttaacgtggtggagcataaggtgttctacacagagctgttgaatttgtgtgaggctgaagattcagctttaacaaagctgccctgttataaaagccttccgtcactcgtacctttacgaattgcggcattaaatgcacttgctgcctgcaattaccttcctcagtccagggagaaaatcatcgctgcactcttcaaagccctgaattccaccaatagtgagctccaagaggccggagaagcctgtatgagaaagtttttagaaggtgctaccatagaagtcgatcaaatccacacacatatgcgacctttgctgatgatgctgggagattaccggagcttgacgctgaatgttgtgaatcgcctgacttcggtcacgaggctcttcccaaattccttcaatgataaattttgtgatcagatgatgcaacatctgcgcaagtggatggaagtggtggtgatcacccacaaagggggccagaggagcgacggaaacgaaagcatttccgagtgcgggagatgtcccttgtctccattctgtcagtttgaggaaatgaagatttgctcagcaattataaacctttttcatctgatcccggctgctcctcagacactggtgaagcctttgctagaggttgtcatgaaaacggagcgggcgatgctgatcgaggcggggagtccattccgagagcccctgatcaagttcctgactcgacatccctcgcagacagtggagctgttcatgatggaagccacactgaacgatccccagtggagcagaatgtttatgagttttttaaaacacaaagacgccagacctctgcgggatgtgctggctgccaaccccaacaggttcatcaccctgctgctgccggggggtgcccagacggctgtgcgccccggttcgcccagcaccagcaccatgcgcctggacctccagttccaggccatcaagatcataagcattatagtgaaaaacgatgactcctggctggccagccagcactctctggtgagccagttgcgacgtgtgtgggtgagtgagaacttccaagagaggcaccgcaaggagaacatggcagccaccaactggaaggagcccaagctgctggcctactgcctgctgaactactgcaaaaggaattacggagatatagaattgctgttccagctgctccgagcctttactggtcgttttctctgcaacatgacattcttaaaagagtatatggaggaagagattcccaaaaattacagcatcgctcagaaacgtgccctgttctttcgctttgtagacttcaacgaccccaacttcggagatgaattaaaagctaaagttctgcagcatatcttgaatcctgctttcttgtacagctttgagaagggggaaggagagcagctcttgggacctcccaatccagaaggagataacccagaaagcatcaccagtgtgtttattaccaaggtcctggaccccgagaagcaggcggacatgctggactcgctgcggatctacctgctgcagtacgccacgctgctggtggagcacgccccccaccacatccatgacaacaacaagaaccgcaacagcaagctgcgccgcctcatgaccttcgcctggccctgcctgctctccaaggcctgcgtggacccagcctgcaagtacagcggacacttgctcctggcgcacattatcgccaaattcgccatacacaagaagatcgtcctgcaggtttttcatagtctcctcaaggctcacgcaatggaagctcgagcgatcgtcagacaggcgatggccattctgaccccggcggtgccggccaggatggaggacgggcaccagatgctgacccactggacccggaagatcattgtggaggaggggcacaccgtcccgcagctggtccacattctgcacctgatagtgcaacacttcaaggtgtactacccggtacggcaccacttggtgcagcacatggtgagcgccatgcagaggctgggcttcacgcccagtgtcaccatcgagcagaggcggctggccgtggacctgtctgaagtcgtcatcaagtgggagctgcagaggatcaaggaccagcagccggattcagatatggacccaaattccagtggagaaggagtcaattctgtctcatcctccattaagagaggcctgtccgtggattctgcccaggaagtgaaacgctttaggacggccaccggagccatcagtgcagtctttgggaggagccagtcgctacctggagcagactctctcctcgccaagcccattgacaagcagcacacagacactgtggtgaacttccttatccgcgtggcctgtcaggttaatgacaacaccaacacagcggggtcccctggggaggtgctctctcgccggtgtgtgaaccttctgaagactgcgttgcggccagacatgtggcccaagtccgaactcaagctgcagtggttcgacaagctgctgatgactgtggagcagccaaaccaagtgaactatgggaatatctgcacgggcctagaagtgctgagcttcctgctaactgtcctccagtccccagccatcctcagtagcttcaaacctctgcagcgtggaattgccgcctgcatgacatgtggaaacaccaaggtgttgcgagccgtccacagccttctctcgcgcctgatgagcattttcccaacagagccgagtacttccagtgtggcctccaaatatgaagagctggagtgcctctacgcagccgtcggaaaggtcatctatgaagggctcaccaactacgagaaggccaccaatgccaatccctcccagctcttcgggacccttatgatcctcaagtctgcctgcagcaacaaccccagctacatagacaggctgatctccgtctttatgcgctccctgcagaagatggtccgggagcatttaaaccctcaggcagcgtcaggaagcaccgaagccacctcaggtacaagcgagctggtgatgctgagtctggagctggtgaagacgcgcctggcagtgatgagcatggagatgcggaagaacttcatccaggccatcctgacatccctcatcgaaaaatcaccagatgccaaaatcctccgggctgtggtcaaaatcgtggaagaatgggtcaagaataactccccaatggcagccaatcagacacctacactccgggagaagtccattttgcttgtgaagatgatgacttacatagaaaaacgctttccggaagaccttgaattaaatgcccagtttttagatcttgttaactatgtctacagggatgagaccctctctggcagcgagctgacggcgaaacttgagcctgcctttctctctgggctgcgctgtgcccagccactcatcagggcaaagtttttcgaggtttttgacaactccatgaaacgtcgtgtctacgagcgcttgctctatgtgacctgttcgcagaactgggaagccatggggaaccacttctggatcaagcagtgcattgagctgcttctggccgtgtgtgagaagagcacccccattggcaccagctgccaaggagccatgctcccgtccatcaccaacgtcatcaacctggccgatagccacgaccgtgccgccttcgccatggtcacacatgtcaagcaggagccccgggagcgggagaacagcgagtccaaagaggaggatgtagagatagacatcgaactagctcctggggatcagaccagcacgcccaaaaccaaagaactttcagaaaaggacattggaaaccagctgcacatgctaaccaacaggcacgacaagtttctggacactctccgagaggtgaagactggagcgctgctcagcgctttcgttcagctgtgccacatttccacgacgctggcagagaagacgtgggtccagcttttccccagattgtggaagatcctctctgacagacagcagcatgcactcgcgggtgagataagtccatttctgtgcagcggcagtcaccaggtgcagcgggactgccagcccagcgcgctgaactgctttgtggaagccatgtcccagtgcgtgccgccaatccccatccgaccctgcgtcctgaagtacctggggaagacacacaacctctggttccggtccacgctgatgttggagcaccaggcttttgaaaagggtctgagtcttcagattaagccgaagcaaacaacggagttttatgagcaggagagcatcaccccgccgcagcaggagatactggattcccttgcggagctttactccctgttacaagaggaagatatgtgggctggtctgtggcagaagcggtgcaagtactcggagacagcgactgcgattgcttacgagcagcacgggttctttgagcaggcacaagaatcctatgaaaaggcaatggataaagccaaaaaagaacatgagaggagtaacgcctcccctgctattttccctgaataccagctctgggaagaccactggattcgatgctccaaggaattgaaccagtgggaagccctgacggagtacggtcagtccaaaggccacatcaacccctacctcgtcctggagtgcgcctggcgggtgtccaactggactgccatgaaggaggcgctggtgcaggtggaagtgagctgtccgaaggagatggcctggaaggtgaacatgtaccgcggatacctggccatctgccaccccgaggagcagcagctcagcttcatcgagcgcctggtggagatggccagcagcctggccatccgcgagtggcggcggctgccccacgtagtgtcccacgtgcacacgcctctcctacaggcagcccagcaaatcatcgaactccaggaagctgcacaaatcaacgcaggcttacagccaaccaacctgggaaggaacaacagcctgcacgacatgaagacggtggtgaagacctggaggaaccgactgcccatcgtgtctgacgacttgtcccactggagcagcatcttcatgtggaggcagcatcattaccaggcgattgtaactgcctatgagaatagctctcagcatgatcccagttcaaataacgctatgcttggggttcatgcatcagcttcagcgatcatccagtatggaaaaatcgcccggaaacaaggactggtcaatgtagctctggatatattaagtcggattcatactattccaactgttcctatcgtggattgcttccagaagattcgacagcaagttaaatgctacctccagctggcaggcgtcatgggcaaaaacgagtgcatgcagggccttgaagttattgaatctacaaatttaaaatacttcacaaaagagatgacagccgaattttatgcactgaagggaatgttcttggctcagatcaacaagtccgaggaggcaaacaaagccttctctgcagctgtgcagatgcacgatgtgctggtgaaagcctgggccatgtggggcgactacctggagaacatctttgtgaaggagcggcagctgcacctgggcgtgtctgccatcacctgctacctgcacgcctgccggcatcagaacgagagcaaatcgaggaaatacttagccaaggtgctgtggcttttgagttttgatgatgacaaaaacactttggcagatgccgtcgacaagtactgcattggtgtgccacccatccagtggctggcctggatcccacagctgctcacctgcctggttggctcggagggaaagctgctcttgaacctcattagccaggttggacgcgtgtatccccaagcggtctactttcccatccggaccctgtacctgaccctgaaaatagaacagcgggaacgctacaagagcgattctggacagcagcagccaagttcagtgggtaaccagtcccattctgcatcagatccagggcccataagagcaacagcacccatgtggcgctgcagccgaatcatgcacatgcagcgagagctccaccccacccttctgtcttccctggaaggcatcgtcgatcagatggtctggttcagagaaaattggcatgaagaggttctcaggcagctccaacagggcctggcgaaatgttactccgtggcgtttgagaaaagtggagcggtgtccgatgctaaaatcaccccccacactctcaattttgtgaagaagttggtgagcacgtttggggtgggcctggagaatgtgtccaacgtctcgaccatgttctccagcgcagcctctgagtctctggcccggcgggcgcaggccactgcacaagaccctgtctttcagaagctgaaaggccagttcacgacggattttgacttcagcgttccaggatccatgaagcttcataatcttatttctaagttgaaaaagtggatcaaaatcttggaggccaagaccaagcaactccccaaattcttcctcatagaggaaaagtgccggttcttgagcaatttctcggcacagacagctgaagtggaaattcctggggagtttctgatgccaaagccaacgcattattacatcaagattgcacggttcatgccccgggtagagattgtgcagaagcacaacaccgcagcccggcggctgtacatccggggacacaatggcaagatctacccatacctcgtcatgaacgacgcctgcctcacagagtcacggcgagaggagcgtgtgttgcagctgctgcgtctgctgaacccctgtttggagaagagaaaggagaccaccaagaggcacttgtttttcacagtgccccgggttgtggcagtttccccacagatgcgcctcgtggaggacaacccctcttcactttcccttgtggagatctacaagcagcgctgcgccaagaagggcatcgagcatgacaaccccatctcccgttactatgaccggctggctacggtgcaggcgcggggaacccaagccagccaccaggtcctccgcgacatcctcaaggaggttcagagtaacatggtgccgcgcagcatgctcaaggagtgggcgctgcacaccttccccaatgccacggactactggacgttccggaagatgttcaccatccagctggctctgataggcttcgcggaattcgtcctgcatttaaatagactcaaccccgagatgttacagatcgctcaggacactggcaaactgaatgttgcctactttcgatttgacataaacgacgcgactggagacctggatgccaaccgtcctgtcccatttcgactcacgcccaacatttctgagtttctgaccaccatcggggtctccggcccgttgacagcgtccatgattgcggtcgcccggtgcttcgcccagccaaactttaaggtggatggcattctgaaaacggttctccgggacgagatcattgcttggcacaaaaaaacacaagaggacacgtcctctcctctctcggccgccgggcagccagagaacatggacagccagcaactggtgtccctggttcagaaagccgtcaccgccatcatgacccgcctgcacaacctcgcccagttcgaaggcggggaaagcaaggtgaacaccctggtggccgcggcaaacagcctggacaatctgtgccgcatggaccccgcctggcacccctggctgtgactgtggccgccacggccacccggaatgtgaagggcgctccgggctctgagcccgcagcttttacgacttctccctgcctcgttccttatattcacagaagccccatagtttcactgggttgcggttattttcctggtagtttgcgtgtaagaaagggagaatatagttttagaggaagctgaactatgacgatgctgggcgaagcggttggaaatggcagagctgaaacttattccaagctttcaaaataatcttttaagaagccaggattctccggtctggaatttctgagtgagtcctttttttatggtgtcctccctctgtgaatgtacaggcggaactgtacgaacagctcccttccatccatttttaactctttcggaaataacacctcacagcagcttcgtgcttttgtacagacctttgtaacaagtgtacagaaaactcattttgtttgagaaacaggagttgatgaacccatcatgctggtttttctctgagcacaaagttttaggctgtacacagccagccttgggaatctcgttgagcgttcggcgtggatccacggggccaggccaccctgcgggagcgccacacgcatccacttcggattcagtgggtgaagacagaactctgagagtctgcaggcggctcctgtgctttttatttctggctcttcggatgtcttctagacatttactatcactgcacctgaagaaaaaatcacttttaccttcctaatttaaaaagacaaaacagaaatgtacgttccttcgctagctttagtctttctgttcccatttttataaatctgagcattgataatgttctatctaaatttgtacagtgtgatttttttttttagaataaatattttataaaagggtttattgtcccttgtttatgttaaaatgcttgtttccatgaggggtttcttccctctcaatgcccctagccccttgggaaccagaggccccagagacagtgtgggctcctcagcgtagcctcttggtgacagcatgcgctgcctgggcaggcacagtgctgctgtgatcacaggggaggccatgacttggcacctgggaagccagctcagagcatattcagtcaagttgatgaggaatggcggcccgacctcagcagcaggtcggcgtgcgggactctcagaatggcggcctgatctcagcagcgggtcggcatgccagactctcggagccctcagctatcttcatgtgtttcaggactgctgccatgtaacgtgtgtgtgtggagagtgtgcggagtgtacacgaagcatgcccggaggctcagcatgaagcactctgtacccagctctacctcctcattgtccttcatccagtgtgtaccttcagccaggcctgccctcgtgtgggaggggcagtccccaaggagcacacgccatgatgtcagaaacatcttcttcgaggaagatggccctttacaggccccaggggacgggggcagcacggagccctctctggacctctgccgcaggccacagaaccttctccagcccttgactctccttgcctttcatttaccctccattgttccaggctaccacggaatgatgattacagctgagtttacccaaatcccaccacagggtcaaatgaaagggccttgacaagatgtcccttggcagcttgagatcgcagttgtgttgctgggttatggcctgggtgcaggctggtttgcagtgggcggtactggcagctaccatcaaggtctctgtgctgggctccagccctcagcccagaggggtggttccccactttatagagagggggtttccagctcacagaaggtgagaagcttgtcccaggcctggagcagctgtggagaaactgggagggaagcccgtccagcctgattccaagcccacatgctgctcacaggtcaaggccgagggactgatttttgccggtctgactggactcaagttacttcccagttccttgcagagagctgtctttgtgagacagtgtcttgggttctggaatgatgggagccgtgctttgcaaatgaggagtgattgcgtgctcatctggcagctggtgggtgtcctgctggcatcaggcctgagcggtgaccgtgctcctctgattgtcctcactgcgtgtgacaaggcctgggccactgtgtgagtcgtcttgcgctccatgaagcctggtgtctgtgcagatgtgtgggtggcgttagggttgggggacatttgtctttcacactggagaatgggagtctggagctggtgctactggtgaggaagaggcccggcctgctgccaggttcgcccacaccttccccctggttgttgggaaaaccaaccttggaatggccaaggcaggagatagcacctccccggtgaagatccaggagctctcatgagctccacgtggaaagatcaaggatctggagtctggagcccttcaggcagcaactcagtgaccatgaacctcagctctgtccacccggcacagcattgctgggagctggacccgggaggctgccggctccagagcgaggagggtccagaccatgcagacaatatgccctttttctccaaacaccatttcaagcaaacccgcaggtctcctccacggctgtcagcagcttctcgtagagcttctcataggactcatatggtggaatgtcgatccggttaaagctgaaaaaggacaaaagagagtcaccgtgtgggcagtccagccctaggaccaacctcaaggccaaggacaggcagtgagaagtatatgtgggaggggagaggaatggggggtggggcagggttggtgatgagttctccatgtcccctgtgtttttctgcttctaatacaaagatttgtaatttgtttttgctttttggtagagacagggtctcgctaggttgcccaggctgctctcaaactccaggcctcaagtgaacctcctgccttgccctctcaacgtgctgggagccactgtgcccaatcaacacacagtaaaggggaagctcatttccagtatttgtgcaaagaaaaagacatcctttaagaagctatcgcagcaaaccaaaaaatacaaaattgtgacccagaggatgtacagtgacttctggctttctagggtgctgtggcttttgagttctgatgatgacaaaaatattttggcagagactccatctcaaaaaaaaacaacaaaaaaaaaacgtgaacgtcagcatcctctggggctcccaggacgccgtgacttcctggccgcggtgcttaccagcacacatctcagaaaaacatcccagccaccttccagctcttcctgcccacagcgcacatagacgcgtcatcgaatagccctgcctccacgtcagtcaccttgcaaagccttgaagccttggagcgggactcgcgtggacccagtcacaaactgcaggagcctggccctcctttcttcatcgaacgtctccaccgcttgccagaaccaccgcacgatgttgctgtcggccacacagtgcttcagccgcgtgttcgacttccagtcgttcaagtctattttatccaggccgcctatgatcagctgaggaggtgcagaaaggtgaattacttccaaaatgcataaacccacgtcaggatgcgcctcctaggtacccgacacacaacagtgaaaagtcgattcccaagcaaagcagcagctgtgtactaggcagatgttgagacaggaagaaagctacaaacaggaggcctgtggcacatgcttccgtccgcctcctccaaacgggtctccaaccccaaggaccgcggtgcacagctgttgatgggatgttattttataaccaaagcggggtttttgctctgcatcggtgaggagtatcaaagaaccaaccggtgacactgaacagagctaaccatgaataacggcacgtcccagggtctctccaggacactcaaggacatgtggagtttcaagtctgaagagaggagaattcagcaagagttaggtggggctggggccgatagggcatgtttccgcaattggcttgaaaagttcaacccctgctgggtgcagtggctcacgcctgtagtcccggcactttgtgggggccgaagttgggcggatcacttgagcccaggagttcaaggccagcctgggcaacatggcaaaaccccgtctctacaacagatacaaaaattagccaggcatgatgacgtgcacctgtagcctcagctactcgggaggcggaggtgggaggatggcttcagcctgggaggtcgaggctgcagtgagccatgatcgcaccactgcactccagcctgagcaacagagcgagaccgtgtctc

SEQ ID NO: 374025 - DNA, 9027 bp, Homo sapiens
cgcgccggggcctggtgctcggtcggcgggtgctgccgctttaagcgggggcgggactgcgcgcggccgagcggttgcgacgagggctcggctgggggtcgccggggtcgcgggccgggcctgcaggagccgggccgccgaggtcggggctggttgaactcatggacctgatacttttctcttgagaagcaaaccagcccaaaagaaaaatggcgtttgttgcaacacagggggccacggtggttgaccagaccactttgatgaaaaagtaccttcagtttgtggcagctctcacagatgtgaatacacctgatgaaacaaagttgaaaatgatgcaagaagttagtgaaaattttgagaatgtcacgtcatctcctcagtattctacattcctagaacatatcatccctcgattccttacatttctccaagatggagaagttcagtttcttcaggagaaaccagcacagcaactgcggaagctcgtacttgaaataattcatagaataccaaccaacgaacatcttcgtcctcacacaaaaaatgttttgtctgtgatgtttcgctttttagagacggaaaatgaagaaaatgttcttatttgtctaagaataattattgagctacacaaacagttcaggccaccgatcacacaagaaattcatcattttctggattttgtgaaacagatttacaaggagcttccaaaagtagtgaaccgctactttgagaaccctcaagtgatccccgagaacacagtgcctcccccagaaatggttggtatgataacaacgattgctgtgaaagtcaacccggagcgtgaggacagtgagactcgaacacattccatcattccgaggggatcactttctctgaaagtgttggcagaattgcccattattgttgttttaatgtatcagctctacaaactgaacatccacaatgttgttgctgagtttgtgcccttgatcatgaacaccattgccattcaggtgtctgcacaagcgaggcaacataagctttacaacaaggagttgtatgctgacttcattgctgctcagattaaaacattgtcatttttagcttacattatcaggatttaccaggagttggtgactaagtattctcagcagatggtgaaaggaatgctccagttactttcaaattgtccagcagagactgcacacctcagaaaggagcttctgattgctgccaaacacatcctcaccacagagctgagaaaccagttcattccttgcatggacaagctgtttgatgaatccatactaattggctcaggatatactgccagagagactctaaggcccctcgcctacagcacgctggccgacctcgtgcaccatgtccgccagcacctgcccctcagcgacctctccctcgccgtccagctcttcgccaagaacatcgacgatgagtccctgcccagcagcatccagaccatgtcctgcaagctcctgctgaacctggtggactgcatccgttccaagagcgagcaggagagtggcaatgggagagacgtcctgatgcggatgctggaggttttcgttctcaaattccacacaattgctcggtaccagctctctgccatttttaagaagtgtaagcctcagtcagaacttggagccgtggaagcagctctgcctggggtgcccactgcccctgcagctcctggccctgctccctccccagcccctgtccctgccccacctccacccccgcccccacccccacctgccacccctgtgaccccggcccccgtgcctcccttcgagaagcaaggagaaaaggacaaggaagacaagcagacattccaagtcacagactgtcgaagtttggtcaaaaccttggtgtgtggtgtcaagacaatcacgtggggcataacatcatgcaaagcacctggtgaagctcagttcattcccaacaagcagttacaacccaaagagacacagatttacatcaaacttgtgaaatatgcaatgcaagctttagatatttatcaggtccagatagcaggaaatggacagacatacatccgtgtggccaactgccagactgtgagaatgaaagaggagaaggaggtattggagcatttcgctggtgtgttcacaatgatgaaccccttaacgttcaaagaaatcttccaaactacggtcccttatatggtggagagaatctcaaaaaattatgctcttcagattgttgccaattccttcttggcaaatcctactacctctgctctgtttgctacgattctggtggaatatctccttgatcgcctgccagaaatgggctccaacgtggagctctccaacctgtacctcaagctgttcaagctggtctttggctctgtctccctctttgcagctgaaaatgaacaaatgctgaagcctcacttgcacaagattgtgaacagctctatggagctcgcgcagactgccaaggaaccctacaactacttcttgctgctacgggcgctgtttcgctctattggtggaggtagccacgatctcttgtatcaggagttcttgcctctccttccaaacctcctgcaagggctgaacatgcttcagagtggcctgcacaagcagcacatgaaggacctctttgtggagctgtgtctcaccgtccctgtgcggctgagctcgcttttgccgtacctgcccatgcttatggatcccttggtgtctgcactcaatgggtctcagacattggtcagccaaggcctcaggacgctggagctgtgtgtggacaacctgcagcccgacttcctctacgaccacatccagccggtgcgcgcagagctcatgcaggctctgtggcgcaccttacgcaaccctgctgacagcatctcccacgtggcctaccgtgtgctcggtaagtttggcggcagtaacaggaagatgctgaaggagtcgcagaagctgcactacgttgtgaccgaggttcagggccccagcatcactgtggagttttccgactgcaaagcttctctccagctccccatggagaaggccattgaaactgctctggactgcctgaaaagcgccaacactgagccctactaccggaggcaggcgtgggaagtgatcaaatgcttcctggtggccatgatgagcctggaggacaacaagcacgcactctaccagctcctggcacaccccaactttacagaaaagaccatccccaatgttatcatctcacatcgctacaaagcccaggacactccagcccggaagacttttgagcaggccctgacaggcgccttcatgtctgctgtcattaaggacctgcggcccagcgccctgccctttgtcgccagcttgatccgccactatacgatggtggcagtcgcccagcagtgtggccctttcttgctgccttgctaccaggtgggcagccagcccagcacagccatgtttcacagtgaagaaaatggctcgaaaggaatggatcctttggttctcattgatgcaattgctatttgtatggcatatgaagaaaaggagctttgcaaaatcggggaggtggccctagctgtgatatttgatgttgcaagtatcatcctgggctccaaggagagggcctgccagctgcccctgttttcttacatcgtggagcgcctgtgtgcatgttgttatgaacaggcgtggtatgcaaagctggggggtgtggtgtctattaagtttctcatggagcggctgcctctcacttgggttctccagaaccagcagacattcctgaaagcacttctctttgtcatgatggacttaactggagaggtttccaatggggcagtcgctatggcaaagaccacgctggagcagcttctgatgcggtgcgcaacgcctttaaaagacgaggagagagccgaagagatcgtggccgcccaggaaaagtctttccaccatgtgacacacgacttggttcgagaagtcacctctccaaactccactgtgaggaagcaggccatgcattcgctgcaggtgttggcccaggtcactgggaagagtgtcacggtgatcatggaaccccacaaagaggtcctgcaggatatggtcccccctaagaagcacctgctccgacaccagcctgccaacgcacagattggcctgatggaggggaacacgttctgtaccacgttgcagcccaggctcttcacaatggaccttaacgtggtggagcataaggtgttctacacagagctgttgaatttgtgtgaggctgaagattcagctttaacaaagctgccctgttataaaagccttccgtcactcgtacctttacgaattgcggcattaaatgcacttgctgcctgcaattaccttcctcagtccagggagaaaatcatcgctgcactcttcaaagccctgaattccaccaatagtgagctccaagaggccggagaagcctgtatgagaaagtttttagaaggtgctaccatagaagtcgatcaaatccacacacatatgcgacctttgctgatgatgctgggagattaccggagcttgacgctgaatgttgtgaatcgcctgacttcggtcacgaggctcttcccaaattccttcaatgataaattttgtgatcagatgatgcaacatctgcgcaagtggatggaagtggtggtgatcacccacaaagggggccagaggagcgacggaaacgaaagcatttccgagtgcgggagatgtcccttgtctccattctgtcagtttgaggaaatgaagatttgctcagcaattataaacctttttcatctgatcccggctgctcctcagacactggtgaagcctttgctagaggttgtcatgaaaacggagcgggcgatgctgatcgaggcggggagtccattccgagagcccctgatcaagttcctgactcgacatccctcgcagacagtggagctgttcatgatggaagccacactgaacgatccccagtggagcagaatgtttatgagttttttaaaacacaaagacgccagacctctgcgggatgtgctggctgccaaccccaacaggttcatcaccctgctgctgccggggggtgcccagacggctgtgcgccccggttcgcccagcaccagcaccatgcgcctggacctccagttccaggccatcaagatcataagcattatagtgaaaaacgatgactcctggctggccagccagcactctctggtgagccagttgcgacgtgtgtgggtgagtgagaacttccaagagaggcaccgcaaggagaacatggcagccaccaactggaaggagcccaagctgctggcctactgcctgctgaactactgcaaaaggaattacggagatatagaattgctgttccagctgctccgagcctttactggtcgttttctctgcaacatgacattcttaaaagagtatatggaggaagagattcccaaaaattacagcatcgctcagaaacgtgccctgttctttcgctttgtagacttcaacgaccccaacttcggagatgaattaaaagctaaagttctgcagcatatcttgaatcctgctttcttgtacagctttgagaagggggaaggagagcagctcttgggacctcccaatccagaaggagataacccagaaagcatcaccagtgtgtttattaccaaggtcctggaccccgagaagcaggcggacatgctggactcgctgcggatctacctgctgcagtacgccacgctgctggtggagcacgccccccaccacatccatgacaacaacaagaaccgcaacagcaagctgcgccgcctcatgaccttcgcctggccctgcctgctctccaaggcctgcgtggacccagcctgcaagtacagcggacacttgctcctggcgcacattatcgccaaattcgccatacacaagaagatcgtcctgcaggtttttcatagtctcctcaaggctcacgcaatggaagctcgagcgatcgtcagacaggcgatggccattctgaccccggcggtgccggccaggatggaggacgggcaccagatgctgacccactggacccggaagatcattgtggaggaggggcacaccgtcccgcagctggtccacattctgcacctgatagtgcaacacttcaaggtgtactacccggtacggcaccacttggtgcagcacatggtgagcgccatgcagaggctgggcttcacgcccagtgtcaccatcgagcagaggcggctggccgtggacctgtctgaagtcgtcatcaagtgggagctgcagaggatcaaggaccagcagccggattcagatatggacccaaattccagtggagaaggagtcaattctgtctcatcctccattaagagaggcctgtccgtggattctgcccaggaagtgaaacgctttaggacggccaccggagccatcagtgcagtctttgggaggagccagtcgctacctggagcagactctctcctcgccaagcccattgacaagcagcacacagacactgtggtgaacttccttatccgcgtggcctgtcaggttaatgacaacaccaacacagcggggtcccctggggaggtgctctctcgccggtgtgtgaaccttctgaagactgcgttgcggccagacatgtggcccaagtccgaactcaagctgcagtggttcgacaagctgctgatgactgtggagcagccaaaccaagtgaactatgggaatatctgcacgggcctagaagtgctgagcttcctgctaactgtcctccagtccccagccatcctcagtagcttcaaacctctgcagcgtggaattgccgcctgcatgacatgtggaaacaccaaggtgttgcgagccgtccacagccttctctcgcgcctgatgagcattttcccaacagagccgagtacttccagtgtggcctccaaatatgaagagctggagtgcctctacgcagccgtcggaaaggtcatctatgaagggctcaccaactacgagaaggccaccaatgccaatccctcccagctcttcgggacccttatgatcctcaagtctgcctgcagcaacaaccccagctacatagacaggctgatctccgtctttatgcgctccctgcagaagatggtccgggagcatttaaaccctcaggcagcgtcaggaagcaccgaagccacctcaggtacaagcgagctggtgatgctgagtctggagctggtgaagacgcgcctggcagtgatgagcatggagatgcggaagaacttcatccaggccatcctgacatccctcatcgaaaaatcaccagatgccaaaatcctccgggctgtggtcaaaatcgtggaagaatgggtcaagaataactccccaatggcagccaatcagacacctacactccgggagaagtccattttgcttgtgaagatgatgacttacatagaaaaacgctttccggaagaccttgaattaaatgcccagtttttagatcttgttaactatgtctacagggatgagaccctctctggcagcgagctgacggcgaaacttgagcctgcctttctctctgggctgcgctgtgcccagccactcatcagggcaaagtttttcgaggtttttgacaactccatgaaacgtcgtgtctacgagcgcttgctctatgtgacctgttcgcagaactgggaagccatggggaaccacttctggatcaagcagtgcattgagctgcttctggccgtgtgtgagaagagcacccccattggcaccagctgccaaggagccatgctcccgtccatcaccaacgtcatcaacctggccgatagccacgaccgtgccgccttcgccatggtcacacatgtcaagcaggagccccgggagcgggagaacagcgagtccaaagaggaggatgtagagatagacatcgaactagctcctggggatcagaccagcacgcccaaaaccaaagaactttcagaaaaggacattggaaaccagctgcacatgctaaccaacaggcacgacaagtttctggacactctccgagaggtgaagactggagcgctgctcagcgctttcgttcagctgtgccacatttccacgacgctggcagagaagacgtgggtccagcttttccccagattgtggaagatcctctctgacagacagcagcatgcactcgcgggtgagataagtccatttctgtgcagcggcagtcaccaggtgcagcgggactgccagcccagcgcgctgaactgctttgtggaagccatgtcccagtgcgtgccgccaatccccatccgaccctgcgtcctgaagtacctggggaagacacacaacctctggttccggtccacgctgatgttggagcaccaggcttttgaaaagggtctgagtcttcagattaagccgaagcaaacaacggagttttatgagcaggagagcatcaccccgccgcagcaggtgagggtgcgcctcagtttgttaattacctcttccctgccagtgacttcacactttaaataaatactcctcccaaatgatttcaaatgacagcacagtgaaactatttttaggggggaaaaaaagtctctgtctcaagcactcaggaaccttactttgtgttttcaggagatactggattcccttgcggagctttactccctgttacaagaggaagatatgtgggctggtctgtggcagaagcggtgcaagtactcggagacagcgactgcgattgcttacgagcagcacgggttctttgagcaggtaaacctcagaccactgacggtcttgggtgtgtaatgagaggtcatttataacggttctttaataaaatgtcctcaagtcggagttcacgttctctttttttgagatggagtcttgctctgtcgcccagcctggagtgcagtggcacaatctcggctcactgcaacctccacctcccaggttcaagcgattctcctgcctcagcctcccaagtagctgggattacggggccacacaatccaggtatctgggatttacgtggggtttgccggtggcgtgtgttcgt

SEQ ID NO: 374026 - DNA, 4131 bp, Homo sapiens
cgcgccggggcctggtgctcggtcggcgggtgctgccgctttaagcgggggcgggactgcgcgcggccgagcggttgcgacgagggctcggctgggggtcgccggggtcgcgggccgggcctgcaggagccgggccgccgaggtcggggctggttgaactcatggacctgatacttttctcttgagaagcaaaccagcccaaaagaaaaatggcgtttgttgcaacacagggggccacggtggttgaccagaccactttgatgaaaaagtaccttcagtttgtggcagctctcacagatgtgaatacacctgatgaaacaaagttgaaaatgatgcaagaagttagtgaaaattttgagaatgtcacgtcatctcctcagtattctacattcctagaacatatcatccctcgattccttacatttctccaagatggagaagttcagtttcttcaggagaaaccagcacagcaactgcggaagctcgtacttgaaataattcatagaataccaaccaacgaacatcttcgtcctcacacaaaaaatgttttgtctgtgatgtttcgctttttagagacggaaaatgaagaaaatgttcttatttgtctaagaataattattgagctacacaaacagttcaggccaccgatcacacaagaaattcatcattttctggattttgtgaaacagatttacaaggagcttccaaaagtagtgaaccgctactttgagaaccctcaagtgatccccgagaacacagtgcctcccccagaaatggttggtatgataacaacgattgctgtgaaagtcaacccggagcgtgaggacagtgagactcgaacacattccatcattccgaggggatcactttctctgaaagtgttggcagaattgcccattattgttgttttaatgtatcagctctacaaactgaacatccacaatgttgttgctgagtttgtgcccttgatcatgaacaccattgccattcaggtgtctgcacaagcgaggcaacataagctttacaacaaggagttgtatgctgacttcattgctgctcagattaaaacattgtcatttttagcttacattatcaggatttaccaggagttggtgactaagtattctcagcagatggtgaaaggaatgctccagttactttcaaattgtccagcagagactgcacacctcagaaaggagcttctgattgctgccaaacacatcctcaccacagagctgagaaaccagttcattccttgcatggacaagctgtttgatgaatccatactaattggctcaggatatactgccagagagactctaaggcccctcgcctacagcacgctggccgacctcgtgcaccatgtccgccagcacctgcccctcagcgacctctccctcgccgtccagctcttcgccaagaacatcgacgatgagtccctgcccagcagcatccagaccatgtcctgcaagctcctgctgaacctggtggactgcatccgttccaagagcgagcaggagagtggcaatgggagagacgtcctgatgcggatgctggaggttttcgttctcaaattccacacaattgctcggtaccagctctctgccatttttaagaagtgtaagcctcagtcagaacttggagccgtggaagcagctctgcctggggtgcccactgcccctgcagctcctggccctgctccctccccagcccctgtccctgccccacctccacccccgcccccacccccacctgccacccctgtgaccccggcccccgtgcctcccttcgagaagcaaggagaaaaggacaaggaagacaagcagacattccaagtcacagactgtcgaagtttggtcaaaaccttggtgtgtggtgtcaagacaatcacgtggggcataacatcatgcaaagcacctggtgaagctcagttcattcccaacaagcagttacaacccaaagagacacagatttacatcaaacttgtgaaatatgcaatgcaagctttagatatttatcaggtccagatagcaggaaatggacagacatacatccgtgtggccaactgccagactgtgagaatgaaagaggagaaggaggtattggagcatttcgctggtgtgttcacaatgatgaaccccttaacgttcaaagaaatcttccaaactacggtcccttatatggtggagagaatctcaaaaaattatgctcttcagattgttgccaattccttcttggcaaatcctactacctctgctctgtttgctacgattctggtggaatatctccttgatcgcctgccagaaatgggctccaacgtggagctctccaacctgtacctcaagctgttcaagctggtctttggctctgtctccctctttgcagctgaaaatgaacaaatgctgaagcctcacttgcacaagattgtgaacagctctatggagctcgcgcagactgccaaggaaccctacaactacttcttgctgctacgggcgctgtttcgctctattggtggaggtagccacgatctcttgtatcaggagttcttgcctctccttccaaacctcctgcaagggctgaacatgcttcagagtggcctgcacaagcagcacatgaaggacctctttgtggagctgtgtctcaccgtccctgtgcggctgagctcgcttttgccgtacctgcccatgcttatggatcccttggtgtctgcactcaatgggtctcagacattggtcagccaaggcctcaggacgctggagctgtgtgtggacaacctgcagcccgacttcctctacgaccacatccagccggtgcgcgcagagctcatgcaggctctgtggcgcaccttacgcaaccctgctgacagcatctcccacgtggcctaccgtgtgctcggtaagtttggcggcagtaacaggaagatgctgaaggagtcgcagaagctgcactacgttgtgaccgaggttcagggccccagcatcactgtggagttttccgactgcaaagcttctctccagctccccatggagaaggccattgaaactgctctggactgcctgaaaagcgccaacactgagccctactaccggaggcaggcgtgggaagtgatcaaatgcttcctggtggccatgatgagcctggaggacaacaagcacgcactctaccagctcctggcacaccccaactttacagaaaagaccatccccaatgttatcatctcacatcgctacaaagcccaggacactccagcccggaagacttttgagcaggccctgacaggcgccttcatgtctgctgtcattaaggacctgcggcccagcgccctgccctttgtcgccagcttgatccgccactatacgatggtggcagtcgcccagcagtgtggccctttcttgctgccttgctaccaggtgggcagccagcccagcacagccatgtttcacagtgaagaaaatggctcgaaaggaatggatcctttggttctcattgatgcaattgctatttgtatggcatatgaagaaaaggagctttgcaaaatcggggaggtggccctagctgtgatatttgatgttgcaagtatcatcctgggctccaaggagagggcctgccagctgcccctgttttcttacatcgtggagcgcctgtgtgcatgttgttatgaacaggcgtggtatgcaaagctggggggtgtggtgtctattaagtttctcatggagcggctgcctctcacttgggttctccagaaccagcagacattcctgaaagcacttctctttgtcatgatggacttaactggagaggtttccaatggggcagtcgctatggcaaagaccacgctggagcagcttctgatgcggtgcgcaacgcctttaaaagacgaggagagagccgaagagatcgtggccgcccaggaaaagtctttccaccatgtgacacacgacttggttcgagaagtcacctctccaaactccactgtgaggaagcaggccatgcattcgctgcaggtgttggcccaggtcactgggaagagtgtcacggtgatcatggaaccccacaaagaggtcctgcaggatatgtccccctaagaagcacctgctccaacacaccaacacacatagaagtccggtaccg

SEQ ID NO: 374027 - DNA, 253 bp, Homo sapiens
caatggacaggaatgctgaaggccacgggcagtcagtttccttaggacacagcacagttagaacctaaggctagtaagttgtggcttttacatgtgaacccttcgcttcactgcctagccttgccaacatagttagactatagtagggtctgtagtgacgttgacctctgtcacttgcaaaattaatcgacctgtttataatttctggttttcttgatcaggaaatgaagatttgctcagcaattataaacct

SEQ ID NO: 374028 - DNA, 494 bp, Homo sapiens
cgtccatgattgcggtcgcccggtgcttcgcccagccaaactttaaggtgggtctccacgtcgtcctatcacaggcgcaggctagagccactcagatgcccgcgcgtcacggccttgcaggagctgctgatgtgcctcacgggctctgcgctctccacagtggccagcacccctgtgtgttatgtcctttgctgtgagggcaagggatggttttctctttggttcactcttgtctgtagtgcttggaacgggcctgcctgacactcggcagatgccggaaggtgtcaagtgaacaaataaacagattgggcctcagtcgcagcatggctgcctttgtcatctaggtccgcgctgcccaacactgaggccttctggctgctgctccaagtggaggaaggggtttgtcccccagcggcttccccagcccgtcctgagggcacacagcctggcctggtgctgaaactcgactggcccttggtggccctgagcggccg

SEQ ID NO: 374029 - DNA, 385 bp, Homo sapiens
agggccccagcatcactgtggagttttccgactgcaaagcttctctccagctccccatggagaaggtaagctctgtgacaatgtcgtttcgttttaagccttgtgaagatactatgtttcagtctatgtgaaatgttaattagacctgtgtcttaggcaatctctgagtagaaccagttgtatcaggtgatcggcctggttggcacaggggctttcctaatgccaggagaccagtggaggggtgtcacctgagaacttggtactctggagcagccccctctcctggtgaccaagaggagatgccagcccatcccgccgtgaactccttccattctgatgcctggcaggcttactgagaacctgagttgagtccatgcctgtctgt

SEQ ID NO: 374030 - DNA, 374 bp, Homo sapiens
gaccagaccactttgatgaaaaagtaccttcagtttgtggcagctctcacagatgtgaatacacgtgagttgatcctttttatcattaagaaatgcataaataaggccggatgcggtggctcacgtctgtaatcccagcactttgggaggccgaggcgggtggatcacctgatgtcaggagtttgggactagcctggccaacatggtgaaaccacgtctctactaaaatacaaaaattagccaggtgtggtggctcacgcctgtagtcccagctacttgggaggctgaggcaggaggatcgcttgaacccaggaggcagaggttgcagtgagctgagatcgcaccactgcactccagcctgggtgacagagcga

SEQ ID NO: 374031 - DNA, 395 bp, Homo sapiens
caacatgacattcttaaaagagtatatggaggaagagattcccaaaaattacagcatcgctcagaaacgtgccctgttctttcgctttgtagacttcaacgaccccaacttcggagatgaattaaaagctaaagtgagtcccactcttatgctgtagaagggtatgggtatttggtctggttttctagggaactttgggcccttttctttttttgctgtgtcactcttgaataaatagtagagtgagccaggtgctgtggcatgtgcctgtaatcccaggtactcaggaggccacagcgggaggattgcttgagctcaggagttggaggctgcaccgagctataatcacaccactgcatcccagcatgggtgacacaatgagactctgtctcaag

SEQ ID NO: 374032 - DNA, 231 bp, Homo sapiens
ggacccttatgatcctcaagtctgcctgcagcaacaaccccagctacatagacaggctgatctccgtctttatgcgctccctgcagaagatggtccgggagcatttaaaccctcaggcagcgtcaggaagcaccgaagccacctcaggtgatgtgctggccaccgggggcctttcctcagactctgttgaacagagaacagactctgttgtgcaggctggggctgaactct

SEQ ID NO: 374033 - DNA, 533 bp, Homo sapiens
ttcggtgtggttggtggctaaacgggttcatgtgcagctccaagctttggagccactgagactgggggcggttcccccatagctccctccccgggatcttggctaagctggcctcacagacactctgaaggcccctgctgtccagaccctcttggctttttggaagcagtgaggagggggaatccaggtgccctggagtggctccacagtctttgctcagcggggccccacacctgctcacacacggcccctgccaggtaaccacctctgtagggcagagcattagctactggagaacattccttatgccattttctagcacacatctcagaaaaacatcccagccaccttccagctcttcctgcccacagcgcacatagacgcgtcatcgaatagccctgcctccacgtcagtcaccttgcaaagccttgaagccttggagcgggactcgcgtggacccagtcacaaactgcaggagcctggccctcctttcttcatcgaacgtctccaccgcttgccagaaccaccgcacg

SEQ ID NO: 374034 - DNA, 7403 bp, Homo sapiens
gttctttgagcaggcacaagaatcctatgaaaaggcaatggataaagccaactgggaagaccactggattcgatgctccaaggaattgaaccagtgggaagccctgacggagtacggtcagtccaaaggccacatcaacccctacctcgtcctggagtgcgcctggcgggtgtccaactggactgccatgaaggaggcgctggtgcaggtggaagtgagctgtccgaaggagatggcctggaaggtgaacatgtaccgcggatacctggccatctgccaccccgaggagcagcagctcagcttcatcgagcgcctggtggagatggccagcagcctggccatccgcgagtggcggcggctgccccacgtagtgtcccacgtgcacacgcctctcctacaggcagcccagcaaatcatcgaactccaggaagctgcacaaatcaacgcaggcttacagccaaccaacctgggaaggaacaacagcctgcacgacatgaagacggtggtgaagacctggaggaaccgactgcccatcgtgtctgacgacttgtcccactggagcagcatcttcatgtggaggcagcatcattaccaggcgattgtaactgcctatgagaatagctctcagcatgatcccagttcaaataacgctatgcttggggttcatgcatcagcttcagcgatcatccagtatggaaaaatcgcccggaaacaaggactggtcaatgtagctctggatatattaagtcggattcatactattccaactgttcctatcgtggattgcttccagaagattcgacagcaagttaaatgctacctccagctggcaggcgtcatgggcaaaaacgagtgcatgcagggccttgaagttattgaatctacaaatttaaaatacttcacaaaagagatgacagccgaattttatgcactgaagggaatgttcttggctcagatcaacaagtccgaggaggcaaacaaagccttctctgcagctgtgcagatgcacgatgtgctggtgaaagcctgggccatgtggggcgactacctggagaacatctttgtgaaggagcggcagctgcacctgggcgtgtctgccatcacctgctacctgcacgcctgccggcatcagaacgagagcaaatcgaggaaatacttagccaaggtgctgtggcttttgagttttgatgatgacaaaaacactttggcagatgccgtcgacaagtactgcattggtgtgccacccatccagtggctggcctggatcccacagctgctcacctgcctggttggctcggagggaaagctgctcttgaacctcattagccaggttggacgcgtgtatccccaagcggtctactttcccatccggaccctgtacctgaccctgaaaatagaacagcgggaacgctacaagagcgattctggacagcagcagccaagttcagtgggtaaccagtcccattctgcatcagatccagggcccataagagcaacagcacccatgtggcgctgcagccgaatcatgcacatgcagcgagagctccaccccacccttctgtcttccctggaaggcatcgtcgatcagatggtctggttcagagaaaattggcatgaagaggttctcaggcagctccaacagggcctggcgaaatgttactccgtggcgtttgagaaaagtggagcggtgtccgatgctaaaatcaccccccacactctcaattttgtgaagaagttggtgagcacgtttggggtgggcctggagaatgtgtccaacgtctcgaccatgttctccagcgcagcctctgagtctctggcccggcgggcgcaggccactgcacaagaccctgtctttcagaagctgaaaggccagttcacgacggattttgacttcagcgttccaggatccatgaagcttcataatcttatttctaagttgaaaaagtggatcaaaatcttggaggccaagaccaagcaactccccaaattcttcctcatagaggaaaagtgccggttcttgagcaatttctcggcacagacagctgaagtggaaattcctggggagtttctgatgccaaagccaacgcattattacatcaagattgcacggttcatgccccgggtagagattgtgcagaagcacaacaccgcagcccggcggctgtacatccggggacacaatggcaagatctacccatacctcgtcatgaacgacgcctgcctcacagagtcacggcgagaggagcgtgtgttgcagctgctgcgtctgctgaacccctgtttggagaagagaaaggagaccaccaagaggcacttgtttttcacagtgccccgggttgtggcagtttccccacagatgcgcctcgtggaggacaacccctcttcactttcccttgtggagatctacaagcagcgctgcgccaagaagggcatcgagcatgacaaccccatctcccgttactatgaccggctggctacggtgcaggcgcggggaacccaagccagccaccaggtcctccgcgacatcctcaaggaggttcagagtaacatggtgccgcgcagcatgctcaaggagtgggcgctgcacaccttccccaatgccacggactactggacgttccggaagatgttcaccatccagctggctctgataggcttcgcggaattcgtcctgcatttaaatagactcaaccccgagatgttacagatcgctcaggacactggcaaactgaatgttgcctactttcgatttgacataaacgacgcgactggagacctggatgccaaccgtcctgtcccatttcgactcacgcccaacatttctgagtttctgaccaccatcggggtctccggcccgttgacagcgtccatgattgcggtcgcccggtgcttcgcccagccaaactttaaggtggatggcattctgaaaacggttctccgggacgagatcattgcttggcacaaaaaaacacaagaggacacgtcctctcctctctcggccgccgggcagccagagaacatggacagccagcaactggtgtccctggttcagaaagccgtcaccgccatcatgacccgcctgcacaacctcgcccagttcgaaggcggggaaagcaaggtgaacaccctggtggccgcggcaaacagcctggacaatctgtgccgcatggaccccgcctggcacccctggctgtgactgtggccgccacggccacccggaatgtgaagggcgctccgggctctgagcccgcagcttttacgacttctccctgcctcgttccttatattcacagaagccccatagtttcactgggttgcggttattttcctggtagtttgcgtgtaagaaagggagaatatagttttagaggaagctgaactatgacgatgctgggcgaagcggttggaaatggcagagctgaaacttattccaagctttcaaaataatcttttaagaagccaggattctccggtctggaatttctgagtgagtcctttttttatggtgtcctccctctgtgaatgtacaggcggaactgtacgaacagctcccttccatccatttttaactctttcggaaataacacctcacagcagcttcgtgcttttgtacagacctttgtaacaagtgtacagaaaactcattttgtttgagaaacaggagttgatgaacccatcatgctggtttttctctgagcacaaagttttaggctgtacacagccagccttgggaatctcgttgagcgttcggcgtggatccacggggccaggccaccctgcgggagcgccacacgcatccacttcggattcagtgggtgaagacagaactctgagagtctgcaggcggctcctgtgctttttatttctggctcttcggatgtcttctagacatttactatcactgcacctgaagaaaaaatcacttttaccttcctaatttaaaaagacaaaacagaaatgtacgttccttcgctagctttagtctttctgttcccatttttataaatctgagcattgataatgttctatctaaatttgtacagtgtgatttttttttttagaataaatattttataaaagggtttattgtcccttgtttatgttaaaatgcttgtttccatgaggggtttcttccctctcaatgcccctagccccttgggaaccagaggccccagagacagtgtgggctcctcagcgtagcctcttggtgacagcatgcgctgcctgggcaggcacagtgctgctgtgatcacaggggaggccatgacttggcacctgggaagccagctcagagcatattcagtcaagttgatgaggaatggcggcccgacctcagcagcaggtcggcgtgcgggactctcagaatggcggcctgatctcagcagcgggtcggcatgccagactctcggagccctcagctatcttcatgtgtttcaggactgctgccatgtaacgtgtgtgtgtggagagtgtgcggagtgtacacgaagcatgcccggaggctcagcatgaagcactctgtacccagctctacctcctcattgtccttcatccagtgtgtaccttcagccaggcctgccctcgtgtgggaggggcagtccccaaggagcacacgccatgatgtcagaaacatcttcttcgaggaagatggccctttacaggccccaggggacgggggcagcacggagccctctctggacctctgccgcaggccacagaaccttctccagcccttgactctccttgcctttcatttaccctccattgttccaggctaccacggaatgatgattacagctgagtttacccaaatcccaccacagggtcaaatgaaagggccttgacaagatgtcccttggcagcttgagatcgcagttgtgttgctgggttatggcctgggtgcaggctggtttgcagtgggcggtactggcagctaccatcaaggtctctgtgctgggctccagccctcagcccagaggggtggttccccactttatagagagggggtttccagctcacagaaggtgagaagcttgtcccaggcctggagcagctgtggagaaactgggagggaagcccgtccagcctgattccaagcccacatgctgctcacaggtcaaggccgagggactgatttttgccggtctgactggactcaagttacttcccagttccttgcagagagctgtctttgtgagacagtgtcttgggttctggaatgatgggagccgtgctttgcaaatgaggagtgattgcgtgctcatctggcagctggtgggtgtcctgctggcatcaggcctgagcggtgaccgtgctcctctgattgtcctcactgcgtgtgacaaggcctgggccactgtgtgagtcgtcttgcgctccatgaagcctggtgtctgtgcagatgtgtgggtggcgttagggttgggggacatttgtctttcacactggagaatgggagtctggagctggtgctactggtgaggaagaggcccggcctgctgccaggttcgcccacaccttccccctggttgttgggaaaaccaaccttggaatggccaaggcaggagatagcacctccccggtgaagatccaggagctctcatgagctccacgtggaaagatcaaggatctggagtctggagcccttcaggcagcaactcagtgaccatgaacctcagctctgtccacccggcacagcattgctgggagctggacccgggaggctgccggctccagagcgaggagggtccagaccatgcagacaatatgccctttttctccaaacaccatttcaagcaaacccgcaggtctcctccacggctgtcagcagcttctcgtagagcttctcataggactcatatggtggaatgtcgatccggttaaagctgaaaaaggacaaaagagagtcaccgtgtgggcagtccagccctaggaccaacctcaaggccaaggacaggcaagacagggtctcgctaggttgcccaggctgctctcaaactccaggcctcaagtgaacctcctgccttgccctctcaacgtgctgggagccactgtgcccaatcaacacacagtaaaggggaagctcatttccagtatttgtgcaaagaaaaagacatcctttaagaagctatcgcagcaaaccaaaaaatacaaaattgtgacccagaggatgtacagtgacttctggctttctagggtgctgtggcttttgagttctgatgatgacaaaaatattttggcagagactccatctcaaaaaaaaacaacaaaaaaaaaacgtgaacgtcagcatcctctggggctcccaggacgccgtgacttcctggccgcggtgcttaccagcacacatctcagaaaaacatcccagccaccttccagctcttcctgcccacagcgcacatagacgcgtcatcgaatagccctgcctccacgtcagtcaccttgcaaagccttgaagccttggagcgggactcgcgtggacccagtcacaaactgcaggagcctggccctcctttcttcatcgaacgtctccaccgcttgccagaaccaccgcacgatgttgctgtcggccacacagtgcttcagccgcgtgttcgacttccagtcgttcaagtctattttatccaggccgcctatgatcagctgaggaggtgcagaaaggtgaattacttccaaaatgcataaacccacgtcaggatgcgcctcctaggtacccgacacacaacagtgaaaagtcgattcccaagcaaagcagcagctgtgtactaggcagatgttgagacaggaagaaagctacaaacaggaggcctgtggcacatgcttccgtccgcctcctccaaacgggtctccaaccccaaggaccgcggtgcacagctgttgatgggatgttattttataaccaaagcggggtttttgctctgcatcggtgaggagtatcaaagaaccaaccggtgacactgaacagagctaaccatgaataacggcacgtcccagggtctctccaggacactcaaggacatgtggagtttcaagtctgaagagaggagaattcagcaagagttaggtggggctggggccgatagggcatgtttccgcaattggcttgaaaagttcaacccctgctgggtgcagtggctcacgcctgtagtcccggcactttgtgggggccgaagttgggcggatcacttgagcccaggagttcaaggccagcctgggcaacatggcaaaaccccgtctctacaacagatacaaaaattagccaggcatgatgacgtgcacctgtagcctcagctactcgggaggcggaggtgggaggatggcttcagcctgggaggtcgaggctgcagtgagccatgatcgcaccactgcactccagcctgagcaacagagcgagaccgtgtctc

SEQ ID NO: 374035 - DNA, 5638 bp, Homo sapiens
tgcaaggttgtcgactggtgctgtcgtagacaacgttcgggacttggtgaaaacgcgtgggcgcaggccactgcacaagaccctgtctttcagaagctgaaaggccagttcacgacggattttgacttcagcgttccaggatccatgaagcttcataatcttatttctaagttgaaaaagtggatcaaaatcttggaggccaagaccaagcaactccccaaattcttcctcatagaggaaaagtgccggttcttgagcaatttctcggcacagacagctgaagtggaaattcctggggagtttctgatgccaaagccaacgcattattacatcaagattgcacggttcatgccccgggtagagattgtgcagaagcacaacaccgcagcccggcggctgtacatccggggacacaatggcaagatctacccatacctcgtcatgaacgacgcctgcctcacagagtcacggcgagaggagcgtgtgttgcagctgctgcgtctgctgaacccctgtttggagaagagaaaggagaccaccaagaggcacttgtttttcacagtgccccgggttgtggcagtttccccacagatgcgcctcgtggaggacaacccctcttcactttcccttgtggagatctacaagcagcgctgcgccaagaagggcatcgagcatgacaaccccatctcccgttactatgaccggctggctacggtgcaggcgcggggaacccaagccagccaccaggtcctccgcgacatcctcaaggaggttcagagtaacatggtgccgcgcagcatgctcaaggagtgggcgctgcacaccttccccaatgccacggactactggacgttccggaagatgttcaccatccagctggctctgataggcttcgcggaattcgtcctgcatttaaatagactcaaccccgagatgttacagatcgctcaggacactggcaaactgaatgttgcctactttcgatttgacataaacgacgcgactggagacctggatgccaaccgtcctgtcccatttcgactcacgcccaacatttctgagtttctgaccaccatcggggtctccggcccgttgacagcgtccatgattgcggtcgcccggtgcttcgcccagccaaactttaaggtggatggcattctgaaaacggttctccgggacgagatcattgcttggcacaaaaaaacacaagaggacacgtcctctcctctctcggccgccgggcagccagagaacatggacagccagcaactggtgtccctggttcagaaagccgtcaccgccatcatgacccgcctgcacaacctcgcccagttcgaaggcggggaaagcaaggtgaacaccctggtggccgcggcaaacagcctggacaatctgtgccgcatggaccccgcctggcacccctggctgtgactgtggccgccacggccacccggaatgtgaagggcgctccgggctctgagcccgcagcttttacgacttctccctgcctcgttccttatattcacagaagccccatagtttcactgggttgcggttattttcctggtagtttgcgtgtaagaaagggagaatatagttttagaggaagctgaactatgacgatgctgggcgaagcggttggaaatggcagagctgaaacttattccaagctttcaaaataatcttttaagaagccaggattctccggtctggaatttctgagtgagtcctttttttatggtgtcctccctctgtgaatgtacaggcggaactgtacgaacagctcccttccatccatttttaactctttcggaaataacacctcacagcagcttcgtgcttttgtacagacctttgtaacaagtgtacagaaaactcattttgtttgagaaacaggagttgatgaacccatcatgctggtttttctctgagcacaaagttttaggctgtacacagccagccttgggaatctcgttgagcgttcggcgtggatccacggggccaggccaccctgcgggagcgccacacgcatccacttcggattcagtgggtgaagacagaactctgagagtctgcaggcggctcctgtgctttttatttctggctcttcggatgtcttctagacatttactatcactgcacctgaagaaaaaatcacttttaccttcctaatttaaaaagacaaaacagaaatgtacgttccttcgctagctttagtctttctgttcccatttttataaatctgagcattgataatgttctatctaaatttgtacagtgtgatttttttttttagaataaatattttataaaagggtttattgtcccttgtttatgttaaaatgcttgtttccatgaggggtttcttccctctcaatgcccctagccccttgggaaccagaggccccagagacagtgtgggctcctcagcgtagcctcttggtgacagcatgcgctgcctgggcaggcacagtgctgctgtgatcacaggggaggccatgacttggcacctgggaagccagctcagagcatattcagtcaagttgatgaggaatggcggcccgacctcagcagcaggtcggcgtgcgggactctcagaatggcggcctgatctcagcagcgggtcggcatgccagactctcggagccctcagctatcttcatgtgtttcaggactgctgccatgtaacgtgtgtgtgtggagagtgtgcggagtgtacacgaagcatgcccggaggctcagcatgaagcactctgtacccagctctacctcctcattgtccttcatccagtgtgtaccttcagccaggcctgccctcgtgtgggaggggcagtccccaaggagcacacgccatgatgtcagaaacatcttcttcgaggaagatggccctttacaggccccaggggacgggggcagcacggagccctctctggacctctgccgcaggccacagaaccttctccagcccttgactctccttgcctttcatttaccctccattgttccaggctaccacggaatgatgattacagctgagtttacccaaatcccaccacagggtcaaatgaaagggccttgacaagatgtcccttggcagcttgagatcgcagttgtgttgctgggttatggcctgggtgcaggctggtttgcagtgggcggtactggcagctaccatcaaggtctctgtgctgggctccagccctcagcccagaggggtggttccccactttatagagagggggtttccagctcacagaaggtgagaagcttgtcccaggcctggagcagctgtggagaaactgggagggaagcccgtccagcctgattccaagcccacatgctgctcacaggtcaaggccgagggactgatttttgccggtctgactggactcaagttacttcccagttccttgcagagagctgtctttgtgagacagtgtcttgggttctggaatgatgggagccgtgctttgcaaatgaggagtgattgcgtgctcatctggcagctggtgggtgtcctgctggcatcaggcctgagcggtgaccgtgctcctctgattgtcctcactgcgtgtgacaaggcctgggccactgtgtgagtcgtcttgcgctccatgaagcctggtgtctgtgcagatgtgtgggtggcgttagggttgggggacatttgtctttcacactggagaatgggagtctggagctggtgctactggtgaggaagaggcccggcctgctgccaggttcgcccacaccttccccctggttgttgggaaaaccaaccttggaatggccaaggcaggagatagcacctccccggtgaagatccaggagctctcatgagctccacgtggaaagatcaaggatctggagtctggagcccttcaggcagcaactcagtgaccatgaacctcagctctgtccacccggcacagcattgctgggagctggacccgggaggctgccggctccagagcgaggagggtccagaccatgcagacaatatgccctttttctccaaacaccatttcaagcaaacccgcaggtctcctccacggctgtcagcagcttctcgtagagcttctcataggactcatatggtggaatgtcgatccggttaaagctgaaaaaggacaaaagagagtcaccgtgtgggcagtccagccctaggaccaacctcaaggccaaggacaggcaagacagggtctcgctaggttgcccaggctgctctcaaactccaggcctcaagtgaacctcctgccttgccctctcaacgtgctgggagccactgtgcccaatcaacacacagtaaaggggaagctcatttccagtatttgtgcaaagaaaaagacatcctttaagaagctatcgcagcaaaccaaaaaatacaaaattgtgacccagaggatgtacagtgacttctggctttctagggtgctgtggcttttgagttctgatgatgacaaaaatattttggcagagactccatctcaaaaaaaaacaacaaaaaaaaaacgtgaacgtcagcatcctctggggctcccaggacgccgtgacttcctggccgcggtgcttaccagcacacatctcagaaaaacatcccagccaccttccagctcttcctgcccacagcgcacatagacgcgtcatcgaatagccctgcctccacgtcagtcaccttgcaaagccttgaagccttggagcgggactcgcgtggacccagtcacaaactgcaggagcctggccctcctttcttcatcgaacgtctccaccgcttgccagaaccaccgcacgatgttgctgtcggccacacagtgcttcagccgcgtgttcgacttccagtcgttcaagtctattttatccaggccgcctatgatcagctgaggaggtgcagaaaggtgaattacttccaaaatgcataaacccacgtcaggatgcgcctcctaggtacccgacacacaacagtgaaaagtcgattcccaagcaaagcagcagctgtgtactaggcagatgttgagacaggaagaaagctacaaacaggaggcctgtggcacatgcttccgtccgcctcctccaaacgggtctccaaccccaaggaccgcggtgcacagctgttgatgggatgttattttataaccaaagcggggtttttgctctgcatcggtgaggagtatcaaagaaccaaccggtgacactgaacagagctaaccatgaataacggcacgtcccagggtctctccaggacactcaaggacatgtggagtttcaagtctgaagagaggagaattcagcaagagttaggtggggctggggccgatagggcatgtttccgcaattggcttgaaaagttcaacccctgctgggtgcagtggctcacgcctgtagtcccggcactttgtgggggccgaagttgggcggatcacttgagcccaggagttcaaggccagcctgggcaacatggcaaaaccccgtctctacaacagatacaaaaattagccaggcatgatgacgtgcacctgtagcctcagctactcgggaggcggaggtgggaggatggcttcagcctgggaggtcgaggctgcagtgagccatgatcgcaccactgcactccagcctgagcaacagagcgagaccgtgtctc

SEQ ID NO: 374036 - DNA, 15297 bp, Homo sapiens
cgcgccggggcctggtgctcggtcggcgggtgctgccgctttaagcgggggcgggactgcgcgcggccgagcggttgcgacgagggctcggctgggggtcgccggggtcgcgggccgggcctgcaggagccgggccgccgaggtcggggctggttgaactcatggacctgatacttttctcttgagaagcaaaccagcccaaaagaaaaatggcgtttgttgcaacacagggggccacggtggttgaccagaccactttgatgaaaaagtaccttcagtttgtggcagctctcacagatgtgaatacacctgatgaaacaaagttgaaaatgatgcaagaagttagtgaaaattttgagaatgtcacgtcatctcctcagtattctacattcctagaacatatcatccctcgattccttacatttctccaagatggagaagttcagtttcttcaggagaaaccagcacagcaactgcggaagctcgtacttgaaataattcatagaataccaaccaacgaacatcttcgtcctcacacaaaaaatgttttgtctgtgatgtttcgctttttagagacggaaaatgaagaaaatgttcttatttgtctaagaataattattgagctacacaaacagttcaggccaccgatcacacaagaaattcatcattttctggattttgtgaaacagatttacaaggagcttccaaaagtagtgaaccgctactttgagaaccctcaagtgatccccgagaacacagtgcctcccccagaaatggttggtatgataacaacgattgctgtgaaagtcaacccggagcgtgaggacagtgagactcgaacacattccatcattccgaggggatcactttctctgaaagtgttggcagaattgcccattattgttgttttaatgtatcagctctacaaactgaacatccacaatgttgttgctgagtttgtgcccttgatcatgaacaccattgccattcaggtgtctgcacaagcgaggcaacataagctttacaacaaggagttgtatgctgacttcattgctgctcagattaaaacattgtcatttttagcttacattatcaggatttaccaggagttggtgactaagtattctcagcagatggtgaaaggaatgctccagttactttcaaattgtccagcagagactgcacacctcagaaaggagcttctgattgctgccaaacacatcctcaccacagagctgagaaaccagttcattccttgcatggacaagctgtttgatgaatccatactaattggctcaggatatactgccagagagactctaaggcccctcgcctacagcacgctggccgacctcgtgcaccatgtccgccagcacctgcccctcagcgacctctccctcgccgtccagctcttcgccaagaacatcgacgatgagtccctgcccagcagcatccagaccatgtcctgcaagctcctgctgaacctggtggactgcatccgttccaagagcgagcaggagagtggcaatgggagagacgtcctgatgcggatgctggaggttttcgttctcaaattccacacaattgctcggtaccagctctctgccatttttaagaagtgtaagcctcagtcagaacttggagccgtggaagcagctctgcctggggtgcccactgcccctgcagctcctggccctgctccctccccagcccctgtccctgccccacctccacccccgcccccacccccacctgccacccctgtgaccccggcccccgtgcctcccttcgagaagcaaggagaaaaggacaaggaagacaagcagacattccaagtcacagactgtcgaagtttggtcaaaaccttggtgtgtggtgtcaagacaatcacgtggggcataacatcatgcaaagcacctggtgaagctcagttcattcccaacaagcagttacaacccaaagagacacagatttacatcaaacttgtgaaatatgcaatgcaagctttagatatttatcaggtccagatagcaggaaatggacagacatacatccgtgtggccaactgccagactgtgagaatgaaagaggagaaggaggtattggagcatttcgctggtgtgttcacaatgatgaaccccttaacgttcaaagaaatcttccaaactacggtcccttatatggtggagagaatctcaaaaaattatgctcttcagattgttgccaattccttcttggcaaatcctactacctctgctctgtttgctacgattctggtggaatatctccttgatcgcctgccagaaatgggctccaacgtggagctctccaacctgtacctcaagctgttcaagctggtctttggctctgtctccctctttgcagctgaaaatgaacaaatgctgaagcctcacttgcacaagattgtgaacagctctatggagctcgcgcagactgccaaggaaccctacaactacttcttgctgctacgggcgctgtttcgctctattggtggaggtagccacgatctcttgtatcaggagttcttgcctctccttccaaacctcctgcaagggctgaacatgcttcagagtggcctgcacaagcagcacatgaaggacctctttgtggagctgtgtctcaccgtccctgtgcggctgagctcgcttttgccgtacctgcccatgcttatggatcccttggtgtctgcactcaatgggtctcagacattggtcagccaaggcctcaggacgctggagctgtgtgtggacaacctgcagcccgacttcctctacgaccacatccagccggtgcgcgcagagctcatgcaggctctgtggcgcaccttacgcaaccctgctgacagcatctcccacgtggcctaccgtgtgctcggtaagtttggcggcagtaacaggaagatgctgaaggagtcgcagaagctgcactacgttgtgaccgaggttcagggccccagcatcactgtggagttttccgactgcaaagcttctctccagctccccatggagaaggccattgaaactgctctggactgcctgaaaagcgccaacactgagccctactaccggaggcaggcgtgggaagtgatcaaatgcttcctggtggccatgatgagcctggaggacaacaagcacgcactctaccagctcctggcacaccccaactttacagaaaagaccatccccaatgttatcatctcacatcgctacaaagcccaggacactccagcccggaagacttttgagcaggccctgacaggcgccttcatgtctgctgtcattaaggacctgcggcccagcgccctgccctttgtcgccagcttgatccgccactatacgatggtggcagtcgcccagcagtgtggccctttcttgctgccttgctaccaggtgggcagccagcccagcacagccatgtttcacagtgaagaaaatggctcgaaaggaatggatcctttggttctcattgatgcaattgctatttgtatggcatatgaagaaaaggagctttgcaaaatcggggaggtggccctagctgtgatatttgatgttgcaagtatcatcctgggctccaaggagagggcctgccagctgcccctgttttcttacatcgtggagcgcctgtgtgcatgttgttatgaacaggcgtggtatgcaaagctggggggtgtggtgtctattaagtttctcatggagcggctgcctctcacttgggttctccagaaccagcagacattcctgaaagcacttctctttgtcatgatggacttaactggagaggtttccaatggggcagtcgctatggcaaagaccacgctggagcagcttctgatgcggtgcgcaacgcctttaaaagacgaggagagagccgaagagatcgtggccgcccaggaaaagtctttccaccatgtgacacacgacttggttcgagaagtcacctctccaaactccactgtgaggaagcaggccatgcattcgctgcaggtgttggcccaggtcactgggaagagtgtcacggtgatcatggaaccccacaaagaggtcctgcaggatatggtcccccctaagaagcacctgctccgacaccagcctgccaacgcacagattggcctgatggaggggaacacgttctgtaccacgttgcagcccaggctcttcacaatggaccttaacgtggtggagcataaggtgttctacacagagctgttgaatttgtgtgaggctgaagattcagctttaacaaagctgccctgttataaaagccttccgtcactcgtacctttacgaattgcggcattaaatgcacttgctgcctgcaattaccttcctcagtccagggagaaaatcatcgctgcactcttcaaagccctgaattccaccaatagtgagctccaagaggccggagaagcctgtatgagaaagtttttagaaggtgctaccatagaagtcgatcaaatccacacacatatgcgacctttgctgatgatgctgggagattaccggagcttgacgctgaatgttgtgaatcgcctgacttcggtcacgaggctcttcccaaattccttcaatgataaattttgtgatcagatgatgcaacatctgcgcaagtggatggaagtggtggtgatcacccacaaagggggccagaggagcgacggaaacgaaagcatttccgagtgcgggagatgtcccttgtctccattctgtcagtttgaggaaatgaagatttgctcagcaattataaacctttttcatctgatcccggctgctcctcagacactggtgaagcctttgctagaggttgtcatgaaaacggagcgggcgatgctgatcgaggcggggagtccattccgagagcccctgatcaagttcctgactcgacatccctcgcagacagtggagctgttcatgatggaagccacactgaacgatccccagtggagcagaatgtttatgagttttttaaaacacaaagacgccagacctctgcgggatgtgctggctgccaaccccaacaggttcatcaccctgctgctgccggggggtgcccagacggctgtgcgccccggttcgcccagcaccagcaccatgcgcctggacctccagttccaggccatcaagatcataagcattatagtgaaaaacgatgactcctggctggccagccagcactctctggtgagccagttgcgacgtgtgtgggtgagtgagaacttccaagagaggcaccgcaaggagaacatggcagccaccaactggaaggagcccaagctgctggcctactgcctgctgaactactgcaaaaggaattacggagatatagaattgctgttccagctgctccgagcctttactggtcgttttctctgcaacatgacattcttaaaagagtatatggaggaagagattcccaaaaattacagcatcgctcagaaacgtgccctgttctttcgctttgtagacttcaacgaccccaacttcggagatgaattaaaagctaaagttctgcagcatatcttgaatcctgctttcttgtacagctttgagaagggggaaggagagcagctcttgggacctcccaatccagaaggagataacccagaaagcatcaccagtgtgtttattaccaaggtcctggaccccgagaagcaggcggacatgctggactcgctgcggatctacctgctgcagtacgccacgctgctggtggagcacgccccccaccacatccatgacaacaacaagaaccgcaacagcaagctgcgccgcctcatgaccttcgcctggccctgcctgctctccaaggcctgcgtggacccagcctgcaagtacagcggacacttgctcctggcgcacattatcgccaaattcgccatacacaagaagatcgtcctgcaggtttttcatagtctcctcaaggctcacgcaatggaagctcgagcgatcgtcagacaggcgatggccattctgaccccggcggtgccggccaggatggaggacgggcaccagatgctgacccactggacccggaagatcattgtggaggaggggcacaccgtcccgcagctggtccacattctgcacctgatagtgcaacacttcaaggtgtactacccggtacggcaccacttggtgcagcacatggtgagcgccatgcagaggctgggcttcacgcccagtgtcaccatcgagcagaggcggctggccgtggacctgtctgaagtcgtcatcaagtgggagctgcagaggatcaaggaccagcagccggattcagatatggacccaaattccagtggagaaggagtcaattctgtctcatcctccattaagagaggcctgtccgtggattctgcccaggaagtgaaacgctttaggacggccaccggagccatcagtgcagtctttgggaggagccagtcgctacctggagcagactctctcctcgccaagcccattgacaagcagcacacagacactgtggtgaacttccttatccgcgtggcctgtcaggttaatgacaacaccaacacagcggggtcccctggggaggtgctctctcgccggtgtgtgaaccttctgaagactgcgttgcggccagacatgtggcccaagtccgaactcaagctgcagtggttcgacaagctgctgatgactgtggagcagccaaaccaagtgaactatgggaatatctgcacgggcctagaagtgctgagcttcctgctaactgtcctccagtccccagccatcctcagtagcttcaaacctctgcagcgtggaattgccgcctgcatgacatgtggaaacaccaaggtgttgcgagccgtccacagccttctctcgcgcctgatgagcattttcccaacagagccgagtacttccagtgtggcctccaaatatgaagagctggagtgcctctacgcagccgtcggaaaggtcatctatgaagggctcaccaactacgagaaggccaccaatgccaatccctcccagctcttcgggacccttatgatcctcaagtctgcctgcagcaacaaccccagctacatagacaggctgatctccgtctttatgcgctccctgcagaagatggtccgggagcatttaaaccctcaggcagcgtcaggaagcaccgaagccacctcaggtacaagcgagctggtgatgctgagtctggagctggtgaagacgcgcctggcagtgatgagcatggagatgcggaagaacttcatccaggccatcctgacatccctcatcgaaaaatcaccagatgccaaaatcctccgggctgtggtcaaaatcgtggaagaatgggtcaagaataactccccaatggcagccaatcagacacctacactccgggagaagtccattttgcttgtgaagatgatgacttacatagaaaaacgctttccggaagaccttgaattaaatgcccagtttttagatcttgttaactatgtctacagggatgagaccctctctggcagcgagctgacggcgaaacttgagcctgcctttctctctgggctgcgctgtgcccagccactcatcagggcaaagtttttcgaggtttttgacaactccatgaaacgtcgtgtctacgagcgcttgctctatgtgacctgttcgcagaactgggaagccatggggaaccacttctggatcaagcagtgcattgagctgcttctggccgtgtgtgagaagagcacccccattggcaccagctgccaaggagccatgctcccgtccatcaccaacgtcatcaacctggccgatagccacgaccgtgccgccttcgccatggtcacacatgtcaagcaggagccccgggagcgggagaacagcgagtccaaagaggaggatgtagagatagacatcgaactagctcctggggatcagaccagcacgcccaaaaccaaagaactttcagaaaaggacattggaaaccagctgcacatgctaaccaacaggcacgacaagtttctggacactctccgagaggtgaagactggagcgctgctcagcgctttcgttcagctgtgccacatttccacgacgctggcagagaagacgtgggtccagcttttccccagattgtggaagatcctctctgacagacagcagcatgcactcgcgggtgagataagtccatttctgtgcagcggcagtcaccaggtgcagcgggactgccagcccagcgcgctgaactgctttgtggaagccatgtcccagtgcgtgccgccaatccccatccgaccctgcgtcctgaagtacctggggaagacacacaacctctggttccggtccacgctgatgttggagcaccaggcttttgaaaagggtctgagtcttcagattaagccgaagcaaacaacggagttttatgagcaggagagcatcaccccgccgcagcaggagatactggattcccttgcggagctttactccctgttacaagaggaagatatgtgggctggtctgtggcagaagcggtgcaagtactcggagacagcgactgcgattgcttacgagcagcacgggttctttgagcaggcacaagaatcctatgaaaaggcaatggataaagccaaaaaagaacatgagaggagtaacgcctcccctgctattttccctgaataccagctctgggaagaccactggattcgatgctccaaggaattgaaccagtgggaagccctgacggagtacggtcagtccaaaggccacatcaacccctacctcgtcctggagtgcgcctggcgggtgtccaactggactgccatgaaggaggcgctggtgcaggtggaagtgagctgtccgaaggagatggcctggaaggtgaacatgtaccgcggatacctggccatctgccaccccgaggagcagcagctcagcttcatcgagcgcctggtggagatggccagcagcctggccatccgcgagtggcggcggctgccccacgtagtgtcccacgtgcacacgcctctcctacaggcagcccagcaaatcatcgaactccaggaagctgcacaaatcaacgcaggcttacagccaaccaacctgggaaggaacaacagcctgcacgacatgaagacggtggtgaagacctggaggaaccgactgcccatcgtgtctgacgacttgtcccactggagcagcatcttcatgtggaggcagcatcattaccaggcgattgtaactgcctatgagaatagctctcagcatgatcccagttcaaataacgctatgcttggggttcatgcatcagcttcagcgatcatccagtatggaaaaatcgcccggaaacaaggactggtcaatgtagctctggatatattaagtcggattcatactattccaactgttcctatcgtggattgcttccagaagattcgacagcaagttaaatgctacctccagctggcaggcgtcatgggcaaaaacgagtgcatgcagggccttgaagttattgaatctacaaatttaaaatacttcacaaaagagatgacagccgaattttatgcactgaagggaatgttcttggctcagatcaacaagtccgaggaggcaaacaaagccttctctgcagctgtgcagatgcacgatgtgctggtgaaagcctgggccatgtggggcgactacctggagaacatctttgtgaaggagcggcagctgcacctgggcgtgtctgccatcacctgctacctgcacgcctgccggcatcagaacgagagcaaatcgaggaaatacttagccaaggtgctgtggcttttgagttttgatgatgacaaaaacactttggcagatgccgtcgacaagtactgcattggtgtgccacccatccagtggctggcctggatcccacagctgctcacctgcctggttggctcggagggaaagctgctcttgaacctcattagccaggttggacgcgtgtatccccaagcggtctactttcccatccggaccctgtacctgaccctgaaaatagaacagcgggaacgctacaagagcgattctggacagcagcagccaagttcagtgggtaaccagtcccattctgcatcagatccagggcccataagagcaacagcacccatgtggcgctgcagccgaatcatgcacatgcagcgagagctccaccccacccttctgtcttccctggaaggcatcgtcgatcagatggtctggttcagagaaaattggcatgaagaggttctcaggcagctccaacagggcctggcgaaatgttactccgtggcgtttgagaaaagtggagcggtgtccgatgctaaaatcaccccccacactctcaattttgtgaagaagttggtgagcacgtttggggtgggcctggagaatgtgtccaacgtctcgaccatgttctccagcgcagcctctgagtctctggcccggcgggcgcaggccactgcacaagaccctgtctttcagaagctgaaaggccagttcacgacggattttgacttcagcgttccaggatccatgaagcttcataatcttatttctaagttgaaaaagtggatcaaaatcttggaggccaagaccaagcaactccccaaattcttcctcatagaggaaaagtgccggttcttgagcaatttctcggcacagacagctgaagtggaaattcctggggagtttctgatgccaaagccaacgcattattacatcaagattgcacggttcatgccccgggtagagattgtgcagaagcacaacaccgcagcccggcggctgtacatccggggacacaatggcaagatctacccatacctcgtcatgaacgacgcctgcctcacagagtcacggcgagaggagcgtgtgttgcagctgctgcgtctgctgaacccctgtttggagaagagaaaggagaccaccaagaggcacttgtttttcacagtgccccgggttgtggcagtttccccacagatgcgcctcgtggaggacaacccctcttcactttcccttgtggagatctacaagcagcgctgcgccaagaagggcatcgagcatgacaaccccatctcccgttactatgaccggctggctacggtgcaggcgcggggaacccaagccagccaccaggtcctccgcgacatcctcaaggaggttcagagtaacatggtgccgcgcagcatgctcaaggagtgggcgctgcacaccttccccaatgccacggactactggacgttccggaagatgttcaccatccagctggctctgataggcttcgcggaattcgtcctgcatttaaatagactcaaccccgagatgttacagatcgctcaggacactggcaaactgaatgttgcctactttcgatttgacataaacgacgcgactggagacctggatgccaaccgtcctgtcccatttcgactcacgcccaacatttctgagtttctgaccaccatcggggtctccggcccgttgacagcgtccatgattgcggtcgcccggtgcttcgcccagccaaactttaaggtggatggcattctgaaaacggttctccgggacgagatcattgcttggcacaaaaaaacacaagaggacacgtcctctcctctctcggccgccgggcagccagagaacatggacagccagcaactggtgtccctggttcagaaagccgtcaccgccatcatgacccgcctgcacaacctcgcccagttcgaaggcggggaaagcaaggtgaacaccctggtggccgcggcaaacagcctggacaatctgtgccgcatggaccccgcctggcacccctggctgtgactgtggccgccacggccacccggaatgtgaagggcgctccgggctctgagcccgcagcttttacgacttctccctgcctcgttccttatattcacagaagccccatagtttcactgggttgcggttattttcctggtagtttgcgtgtaagaaagggagaatatagttttagaggaagctgaactatgacgatgctgggcgaagcggttggaaatggcagagctgaaacttattccaagctttcaaaataatcttttaagaagccaggattctccggtctggaatttctgagtgagtcctttttttatggtgtcctccctctgtgaatgtacaggcggaactgtacgaacagctcccttccatccatttttaactctttcggaaataacacctcacagcagcttcgtgcttttgtacagacctttgtaacaagtgtacagaaaactcattttgtttgagaaacaggagttgatgaacccatcatgctggtttttctctgagcacaaagttttaggctgtacacagccagccttgggaatctcgttgagcgttcggcgtggatccacggggccaggccaccctgcgggagcgccacacgcatccacttcggattcagtgggtgaagacagaactctgagagtctgcaggcggctcctgtgctttttatttctggctcttcggatgtcttctagacatttactatcactgcacctgaagaaaaaatcacttttaccttcctaatttaaaaagacaaaacagaaatgtacgttccttcgctagctttagtctttctgttcccatttttataaatctgagcattgataatgttctatctaaatttgtacagtgtgatttttttttttagaataaatattttataaaagggtttattgtcccttgtttatgttaaaatgcttgtttccatgaggggtttcttccctctcaatgcccctagccccttgggaaccagaggccccagagacagtgtgggctcctcagcgtagcctcttggtgacagcatgcgctgcctgggcaggcacagtgctgctgtgatcacaggggaggccatgacttggcacctgggaagccagctcagagcatattcagtcaagttgatgaggaatggcggcccgacctcagcagcaggtcggcgtgcgggactctcagaatggcggcctgatctcagcagcgggtcggcatgccagactctcggagccctcagctatcttcatgtgtttcaggactgctgccatgtaacgtgtgtgtgtggagagtgtgcggagtgtacacgaagcatgcccggaggctcagcatgaagcactctgtacccagctctacctcctcattgtccttcatccagtgtgtaccttcagccaggcctgccctcgtgtgggaggggcagtccccaaggagcacacgccatgatgtcagaaacatcttcttcgaggaagatggccctttacaggccccaggggacgggggcagcacggagccctctctggacctctgccgcaggccacagaaccttctccagcccttgactctccttgcctttcatttaccctccattgttccaggctaccacggaatgatgattacagctgagtttacccaaatcccaccacagggtcaaatgaaagggccttgacaagatgtcccttggcagcttgagatcgcagttgtgttgctgggttatggcctgggtgcaggctggtttgcagtgggcggtactggcagctaccatcaaggtctctgtgctgggctccagccctcagcccagaggggtggttccccactttatagagagggggtttccagctcacagaaggtgagaagcttgtcccaggcctggagcagctgtggagaaactgggagggaagcccgtccagcctgattccaagcccacatgctgctcacaggtcaaggccgagggactgatttttgccggtctgactggactcaagttacttcccagttccttgcagagagctgtctttgtgagacagtgtcttgggttctggaatgatgggagccgtgctttgcaaatgaggagtgattgcgtgctcatctggcagctggtgggtgtcctgctggcatcaggcctgagcggtgaccgtgctcctctgattgtcctcactgcgtgtgacaaggcctgggccactgtgtgagtcgtcttgcgctccatgaagcctggtgtctgtgcagatgtgtgggtggcgttagggttgggggacatttgtctttcacactggagaatgggagtctggagctggtgctactggtgaggaagaggcccggcctgctgccaggttcgcccacaccttccccctggttgttgggaaaaccaaccttggaatggccaaggcaggagatagcacctccccggtgaagatccaggagctctcatgagctccacgtggaaagatcaaggatctggagtctggagcccttcaggcagcaactcagtgaccatgaacctcagctctgtccacccggcacagcattgctgggagctggacccgggaggctgccggctccagagcgaggagggtccagaccatgcagacaatatgccctttttctccaaacaccatttcaagcaaacccgcaggtctcctccacggctgtcagcagcttctcgtagagcttctcataggactcatatggtggaatgtcgatccggttaaagctgaaaaaggacaaaagagagtcaccgtgtgggcagtccagccctaggaccaacctcaaggccaaggacaggcagtgagaagtatatgtgggaggggagaggaatggggggtggggcagggttggtgatgagttctccatgtcccctgtgtttttctgcttctaatacaaagatttgtaatttgtttttgctttttggtagagacagggtctcgctaggttgcccaggctgctctcaaactccaggcctcaagtgaacctcctgccttgccctctcaacgtgctgggagccactgtgcccaatcaacacacagtaaaggggaagctcatttccagtatttgtgcaaagaaaaagacatcctttaagaagctatcgcagcaaaccaaaaaatacaaaattgtgacccagaggatgtacagtgacttctggctttctagggtgctgtggcttttgagttctgatgatgacaaaaatattttggcagagactccatctcaaaaaaaaacaacaaaaaaaaaacgtgaacgtcagcatcctctggggctcccaggacgccgtgacttcctggccgcggtgcttaccagcacacatctcagaaaaacatcccagccaccttccagctcttcctgcccacagcgcacatagacgcgtcatcgaatagccctgcctccacgtcagtcaccttgcaaagccttgaagccttggagcgggactcgcgtggacccagtcacaaactgcaggagcctggccctcctttcttcaagacacttcctaaatatattcgttatttccatcgtc

SEQ ID NO: 374037 - DNA, 6276 bp, Homo sapiens
  misc_feature (5618)..(5618): n is a, c, g, or t
  misc_feature (5940)..(5941): n is a, c, g, or t
  misc_feature (6020)..(6020): n is a, c, g, or t
cgcgccggggcctggtgctcggtcggcgggtgctgccgctttaagcgggggcgggactgcgcgcggccgagcggttgcgacgagggctcggctgggggtcgccggggtcgcgggccgggcctgcaggagccgggccgccgaggtcggggctggttgaactcatggacctgatacttttctcttgagaagcaaaccagcccaaaagaaaaatggcgtttgttgcaacacagggggccacggtggttgaccagaccactttgatgaaaaagtaccttcagtttgtggcagctctcacagatgtgaatacacctgatgaaacaaagttgaaaatgatgcaagaagttagtgaaaattttgagaatgtcacgtcatctcctcagtattctacattcctagaacatatcatccctcgattccttacatttctccaagatggagaagttcagtttcttcaggagaaaccagcacagcaactgcggaagctcgtacttgaaataattcatagaataccaaccaacgaacatcttcgtcctcacacaaaaaatgttttgtctgtgatgtttcgctttttagagacggaaaatgaagaaaatgttcttatttgtctaagaataattattgagctacacaaacagttcaggccaccgatcacacaagaaattcatcattttctggattttgtgaaacagatttacaaggagcttccaaaagtagtgaaccgctactttgagaaccctcaagtgatccccgagaacacagtgcctcccccagaaatggttggtatgataacaacgattgctgtgaaagtcaacccggagcgtgaggacagtgagactcgaacacattccatcattccgaggggatcactttctctgaaagtgttggcagaattgcccattattgttgttttaatgtatcagctctacaaactgaacatccacaatgttgttgctgagtttgtgcccttgatcatgaacaccattgccattcaggtgtctgcacaagcgaggcaacataagctttacaacaaggagttgtatgctgacttcattgctgctcagattaaaacattgtcatttttagcttacattatcaggatttaccaggagttggtgactaagtattctcagcagatggtgaaaggaatgctccagttactttcaaattgtccagcagagactgcacacctcagaaaggagcttctgattgctgccaaacacatcctcaccacagagctgagaaaccagttcattccttgcatggacaagctgtttgatgaatccatactaattggctcaggatatactgccagagagactctaaggcccctcgcctacagcacgctggccgacctcgtgcaccatgtccgccagcacctgcccctcagcgacctctccctcgccgtccagctcttcgccaagaacatcgacgatgagtccctgcccagcagcatccagaccatgtcctgcaagctcctgctgaacctggtggactgcatccgttccaagagcgagcaggagagtggcaatgggagagacgtcctgatgcggatgctggaggttttcgttctcaaattccacacaattgctcggtaccagctctctgccatttttaagaagtgtaagcctcagtcagaacttggagccgtggaagcagctctgcctggggtgcccactgcccctgcagctcctggccctgctccctccccagcccctgtccctgccccacctccacccccgcccccacccccacctgccacccctgtgaccccggcccccgtgcctcccttcgagaagcaaggagaaaaggacaaggaagacaagcagacattccaagtcacagactgtcgaagtttggtcaaaaccttggtgtgtggtgtcaagacaatcacgtggggcataacatcatgcaaagcacctggtgaagctcagttcattcccaacaagcagttacaacccaaagagacacagatttacatcaaacttgtgaaatatgcaatgcaagctttagatatttatcaggtccagatagcaggaaatggacagacatacatccgtgtggccaactgccagactgtgagaatgaaagaggagaaggaggtattggagcatttcgctggtgtgttcacaatgatgaaccccttaacgttcaaagaaatcttccaaactacggtcccttatatggtggagagaatctcaaaaaattatgctcttcagattgttgccaattccttcttggcaaatcctactacctctgctctgtttgctacgattctggtggaatatctccttgatcgcctgccagaaatgggctccaacgtggagctctccaacctgtacctcaagctgttcaagctggtctttggctctgtctccctctttgcagctgaaaatgaacaaatgctgaagcctcacttgcacaagattgtgaacagctctatggagctcgcgcagactgccaaggaaccctacaactacttcttgctgctacgggcgctgtttcgctctattggtggaggtagccacgatctcttgtatcaggagttcttgcctctccttccaaacctcctgcaagggctgaacatgcttcagagtggcctgcacaagcagcacatgaaggacctctttgtggagctgtgtctcaccgtccctgtgcggctgagctcgcttttgccgtacctgcccatgcttatggatcccttggtgtctgcactcaatgggtctcagacattggtcagccaaggcctcaggacgctggagctgtgtgtggacaacctgcagcccgacttcctctacgaccacatccagccggtgcgcgcagagctcatgcaggctctgtggcgcaccttacgcaaccctgctgacagcatctcccacgtggcctaccgtgtgctcggtaagtttggcggcagtaacaggaagatgctgaaggagtcgcagaagctgcactacgttgtgaccgaggttcagggccccagcatcactgtggagttttccgactgcaaagcttctctccagctccccatggagaaggccattgaaactgctctggactgcctgaaaagcgccaacactgagccctactaccggaggcaggcgtgggaagtgatcaaatgcttcctggtggccatgatgagcctggaggacaacaagcacgcactctaccagctcctggcacaccccaactttacagaaaagaccatccccaatgttatcatctcacatcgctacaaagcccaggacactccagcccggaagacttttgagcaggccctgacaggcgccttcatgtctgctgtcattaaggacctgcggcccagcgccctgccctttgtcgccagcttgatccgccactatacgatggtggcagtcgcccagcagtgtgacagagtctcactctgttgcccaggctgaagtgcagtggcacaatctcggttcactgcaagctccacctcccaggttcaagccattctcctgcctcagcctacccagtagctgggactacaggcgcccgccaccacacccagctaattttttgtatttctactagagacgaggtttcactgtgttagtcaggatggtctcaatctcctgacctcgtgatccgccccacctcagcctcccaaagtgctgagattacaggtgtgagccaccgcgcccagctaattttttgtatttctagtagagacggggtttcaccgtgttagccaggatggtctcaacctcctgacctcgtgatctgcctcagcctcccaaagtgctgggattcaggcgtgagccacggcgccaggccatcttcactatctttgcactgaatttcgctctgtgtctattcattgactggttgaaatatccctcatttttaacagtcttttttttttttccaaataacaaacatggaaataaactctgaaacctgtaacaaaagtattcaaattttgaaagattgcttctcaacatcccagaagtgagaattcaaacttcccttaaccagaaagatgagactaaaacctattccaccgtcaacaaacttctagttcaaacctttcgaggtaaactaaggttccacgtactggcattgcatgtgtaccattaccgctaaaccgcaatcctattgtaaggatgatcacactcacaaatcctctcaaaccattcataacatctactgaaagggaaagggaaagggaaaaggtgtttcagaaacaacactcatcacctgatccttccctatcaaatgtcatccaaaaattcctcaaagcattcttgcttcgataatctaaattcctaaatccaaaaataatttggtaggaggagaaaccaagtcctccctttcaaggctcaggcttggcaaataggattgattaatatacatacaccagacataaacatttcaattaaaacctattccttctaaaacattcatcatatttctaacacaaaatcagttgctttcgcttttaacaagataactgaaaccaatctgatgtcaattacagactgagctgtaaatcagaaccaagttaaaagctttacaagtattacaatctcaaaaatgttacttttatcttaccacataaataaaaatgtatctacattgtatctacaaagtgagaagcgtttcctatcagccctggcataaagaaatgtatttccccagaagcaaagatcccagaggaaactacctcctacgttacaaaaccagggtctgggtttgggtccaaatcattatttgatatctttatacaaaaaaacaaaaccttctcttaagacaaaagttgggccatgcaacaactatgggctctcaaagtaaattttagtttaaaaaaattacctattgtttgcatggattttaccgatgactttatggctgcgcatctgccataaagtgttcaaaacgctcattctctctttgaaaggacctgaccaaaccaggactttggagttctcacccgactgagccactgaacagaaaaatccaggggaaaatccctgacggggattagaatgaactttttagtttccttccagagctggaaatattcgagtttggaaagtcccggagcagagccgcatttgcaacacggccatcctgctttagggatgaattgaaactggaaagagagtagtaccaatgagagtgagaaagggaagacgaggatgcagcctggtccagaacctctggagcccggggggaaacaggttggcatcacatccgcgccaccaagtcgcaggcccgcggcagagcgttgcgctcacccttgaaggtggcactacagagccacccaggaaacacggacttttcattgaagacaaaatgaatcaaggagcctgcgtgtgggcagcttccaaagcctccagtgagtgtgggagtagggatcagagcctcacggcgctctgggttgctgagtgtgggggtgatggtgaaacaaaatgcagaaaaggtaaaaattgaagaagcagagttaaaagtagctagcggtctggcctaagagacaggaagtggcccagactgagactgaagagggctggaccagggggaagtgaagagagcaggactgggagcagctacaagataggattgaggaatttcaggctgaaggaaagaaagggtggaggccncgccagacagcagcgagggggcggggctaggcaggaatgagggcggggcttgaaagtgaggggcggggctaggggaagaagggaggaggacggtgtgggggggtgagggagaaacgaaagaggatgggggagtgagaagagggtgggtgggggcaggaggggagaagcaagggggcaagtggaaggggaggtagcaaatagcttggaagtggtgggaaagaccaggaggatgaggggagggagcaggtgggagggaaaacaggaaagcaagagagatgatgggaaagtggtgagaagtgagggatgggaccaggggaacagnngcaaggccaggagggaaaagcgagggggcaggtgggcggagaggatgggaagcgaggagaaggagggagggggtaaaancggcggaggagaaaaaaaggagagaagcaagggggcgggaccaggaagaagtgagggccgatgctaggaaagaagtgaggaggcgggaccaggaagaagtgagggcccaggctaggaaagaagtgaggaggcgggaccagagagaagcgagggagctggacgcagggagaagcgagggggcggggacagaaagttaggaggcgggagcagagaggagcgagggggtggggccagagagatgggcggggtcaggttt

SEQ ID NO: 374038 - DNA, 4540 bp, Homo sapiens
cgcgccggggcctggtgctcggtcggcgggtgctgccgctttaagcgggggcgggactgcgcgcggccgagcggttgcgacgagggctcggctgggggtcgccggggtcgcgggccgggcctgcaggagccgggccgccgaggtcggggctggttgaactcatggacctgatacttttctcttgagaagcaaaccagcccaaaagaaaaatggcgtttgttgcaacacagggggccacggtggttgaccagaccactttgatgaaaaagtaccttcagtttgtggcagctctcacagatgtgaatacacctgatgaaacaaagttgaaaatgatgcaagaagttagtgaaaattttgagaatgtcacgtcatctcctcagtattctacattcctagaacatatcatccctcgattccttacatttctccaagatggagaagttcagtttcttcaggagaaaccagcacagcaactgcggaagctcgtacttgaaataattcatagaataccaaccaacgaacatcttcgtcctcacacaaaaaatgttttgtctgtgatgtttcgctttttagagacggaaaatgaagaaaatgttcttatttgtctaagaataattattgagctacacaaacagttcaggccaccgatcacacaagaaattcatcattttctggattttgtgaaacagatttacaaggagcttccaaaagtagtgaaccgctactttgagaaccctcaagtgatccccgagaacacagtgcctcccccagaaatggttggtatgataacaacgattgctgtgaaagtcaacccggagcgtgaggacagtgagactcgaacacattccatcattccgaggggatcactttctctgaaagtgttggcagaattgcccattattgttgttttaatgtatcagctctacaaactgaacatccacaatgttgttgctgagtttgtgcccttgatcatgaacaccattgccattcaggtgtctgcacaagcgaggcaacataagctttacaacaaggagttgtatgctgacttcattgctgctcagattaaaacattgtcatttttagcttacattatcaggatttaccaggagttggtgactaagtattctcagcagatggtgaaaggaatgctccagttactttcaaattgtccagcagagactgcacacctcagaaaggagcttctgattgctgccaaacacatcctcaccacagagctgagaaaccagttcattccttgcatggacaagctgtttgatgaatccatactaattggctcaggatatactgccagagagactctaaggcccctcgcctacagcacgctggccgacctcgtgcaccatgtccgccagcacctgcccctcagcgacctctccctcgccgtccagctcttcgccaagaacatcgacgatgagtccctgcccagcagcatccagaccatgtcctgcaagctcctgctgaacctggtggactgcatccgttccaagagcgagcaggagagtggcaatgggagagacgtcctgatgcggatgctggaggttttcgttctcaaattccacacaattgctcggtaccagctctctgccatttttaagaagtgtaagcctcagtcagaacttggagccgtggaagcagctctgcctggggtgcccactgcccctgcagctcctggccctgctccctccccagcccctgtccctgccccacctccacccccgcccccacccccacctgccacccctgtgaccccggcccccgtgcctcccttcgagaagcaaggagaaaaggacaaggaagacaagcagacattccaagtcacagactgtcgaagtttggtcaaaaccttggtgtgtggtgtcaagacaatcacgtggggcataacatcatgcaaagcacctggtgaagctcagttcattcccaacaagcagttacaacccaaagagacacagatttacatcaaacttgtgaaatatgcaatgcaagctttagatatttatcaggtccagatagcaggaaatggacagacatacatccgtgtggccaactgccagactgtgagaatgaaagaggagaaggaggtattggagcatttcgctggtgtgttcacaatgatgaaccccttaacgttcaaagaaatcttccaaactacggtcccttatatggtggagagaatctcaaaaaattatgctcttcagattgttgccaattccttcttggcaaatcctactacctctgctctgtttgctacgattctggtggaatatctccttgatcgcctgccagaaatgggctccaacgtggagctctccaacctgtacctcaagctgttcaagctggtctttggctctgtctccctctttgcagctgaaaatgaacaaatgctgaagcctcacttgcacaagattgtgaacagctctatggagctcgcgcagactgccaaggaaccctacaactacttcttgctgctacgggcgctgtttcgctctattggtggaggtagccacgatctcttgtatcaggagttcttgcctctccttccaaacctcctgcaagggctgaacatgcttcagagtggcctgcacaagcagcacatgaaggacctctttgtggagctgtgtctcaccgtccctgtgcggctgagctcgcttttgccgtacctgcccatgcttatggatcccttggtgtctgcactcaatgggtctcagacattggtcagccaaggcctcaggacgctggagctgtgtgtggacaacctgcagcccgacttcctctacgaccacatccagccggtgcgcgcagagctcatgcaggctctgtggcgcaccttacgcaaccctgctgacagcatctcccacgtggcctaccgtgtgctcggtaagtttggcggcagtaacaggaagatgctgaaggagtcgcagaagctgcactacgttgtgaccgaggttcagggccccagcatcactgtggagttttccgactgcaaagcttctctccagctccccatggagaaggccattgaaactgctctggactgcctgaaaagcgccaacactgagccctactaccggaggcaggcgtgggaagtgatcaaatgcttcctggtggccatgatgagcctggaggacaacaagcacgcactctaccagctcctggcacaccccaactttacagaaaagaccatccccaatgttatcatctcacatcgctacaaagcccaggacactccagcccggaagacttttgagcaggccctgacaggcgccttcatgtctgctgtcattaaggacctgcggcccagcgccctgccctttgtcgccagcttgatccgccactatacgatggtggcagtcgcccagcagtgtggccctttcttgctgccttgctaccaggtgggcagccagcccagcacagccatgtttcacagtgaagaaaatggctcgaaaggaatggatcctttggttctcattgatgcaattgctatttgtatggcatatgaagaaaaggagctttgcaaaatcggggaggtggccctagctgtgatatttgatgttgcaagtatcatcctgggctccaaggagagggcctgccagctgcccctgttttcttacatcgtggagcgcctgtgtgcatgttgttatgaacaggcgtggtatgcaaagctggggggtgtggtgtctattaagtttctcatggagcggctgcctctcacttgggttctccagaaccagcagacattcctgaaagcacttctctttgtcatgatggacttaactggagaggtttccaatggggcagtcgctatggcaaagaccacgctggagcagcttctgatgcggtgcgcaacgcctttaaaagacgaggagagagccgaagagatcgtggccgcccaggaaaagtctttccaccatgtgacacacgacttggttcgagaagtcacctctccaaactccactgtgaggaagcaggccatgcattcgctgcaggtgttggcccaggtcactgggaagagtgtcacggtgatcatggaaccccacaaagaggtcctgcaggatatggtcccccctaagaagcacctgctccgacaccagcctgccaacgcacagattggcctgatggaggggaacacgttctgtaccacgttgcagcccaggctcttcacaatggaccttaacgtggtggagcataaggtgttctacacagagctgttgaatttgtgtgaggctgaagattcagctttaacaaagctgccctgttataaaagccttccgtcactcgtacctttacgaattgcggcattaaatgcacttgctgcctgcaattaccttcctcagtccagggagaaaatcatcgctgcactcttcaaagccctgaattccaccaatagtgagctccaagagtctccagcgctgtaacttcggagcctcgggaggggcagccggggagtcagatgattgggaagacgaccgtactgaagagggattcgggggtcactgaacgtggtagctcgactggggtaccg

SEQ ID NO: 374039 - DNA, 520 bp, Homo sapiens
accctctctggcagcgagctgacggcgaaacttgagcctgcctttctctctgggctgcgctgtgcccagccactcatcagggcaaagtttttcgaggtttttgacaactccatgaaacgtcgtgtctacgagcgcttgctctatgtgacctgttcgcagaactgggaagccatggggaaccacttctggatcaagcagtgcattgaggtaggaagactcggctcacatctgtggccgggggcagctgtgggttttctgagttggggctccaaagccaggaggtgttcacacacactgagatgaattggaaatctccagcacaaacctgcttctgatctccaggaagaaaataaagacttcagggcaagcgttcatctaaagcgtttttgggctgatttaaaatcctgtgtcagaaagttgaatagtatatttttgtaggtgaagattcattttttcttcaaatataaaaaagtttgaattctgtctgcgtgccctagaaaataaaactgtggacttgtca

SEQ ID NO: 374040 - DNA, 823 bp, Homo sapiens
gaatttcttgcggggatgaggctgattgaactcctggattcagataggcaggaacatcaagatttgggactgtatcatttgaaacaaatcaactcacccatgatgactgtaagcgcctacaacaattttttgaactatgtctccagcctcccttcaacaaaagcagggcccaaaattgtgtctcatttgctccatttagtggataacaaagagtcattggagaatatatctgaaaatgatgactacttaaagcaccagccagaaatttcactgcagatgcagttacttaggggattgtggcaaatttgtccacaagcttacttttcaatggtttcagaacatttactggttcttgccctgaaaactgcttatcaaagcaacactgttgctgcgtgttctccatttgttttgcaattccttcaagggagaacactgactttgggtgcgcttaacttacagtactttttcgaccacccagaaagcttgtcattgttgaggagcatccacttctcaatacgaggaaataagacatcacccagagcacatttttcagttctggaaacatgttttgacaaatcacaggtgccaactatagatcaggactatgcttctgcctttgaacctatgaatgaatggggaggcgaaatttagctggaaaaagaggataatgtaaagagctatatggatatggcagcgcagggcatcaccagaccttagtactggctattgggaaacttttctccaaaggcagtacaagattccctgtctagaagtcgatgtgaatgatattgatgttgtaggccaggatatgcttgagattcta

SEQ ID NO: 374041 - DNA, 395 bp, Homo sapiens
gaggttatgttgataccagctattccatccaataggaaatagaatccgtggtatgcctttcaaaagatgttatgttatcaaatattattccacacctttaattcttaattttaaacctctagagcagggcacagtggtgtgtgcctctagtctcagccactggtaagtctgaagtaggaggatcacttgagcccaggtgttcaaggctgcagtgagctatgactgcaccagtgcacttcaacctgggcaacagagtgagaccctgtcttcactaaatttacacttctagaaaattgagtcttcttaaaacagctgaaactgtgacagtttttcagtaaacagttaagtcatagcctctttctattactaggggattaaacattattaatatttgc

SEQ ID NO: 374042 - DNA, 460 bp, Homo sapiens
ttcatgcttttaaatgtgtatatatgttatgcccttacgtgtatggaacgctccttgagaatggggactgttagtgtcttacatagatagtagcttgtgcatgaaaggcattcagtacatgattaaagattatgatgactgattttccaccacagaagccaaatggcacactgagtcataaaagtggtaggaggcgttggggtcagactatcttcaagtctggagatagctgggaagagttggaggactatgatttcggagcctcccattccaagaagccaagcatgggtgtttttaaagaaaaaaggaaaaaagattctccatttcggtaagatttcaaattcctcagaaaaatatttttgccatgcattaactttattttactcattaaatataaatgcatgtagaccctaaaagaagaaaagtttgcttaacaggccaggtgtagtggctcaggcct

SEQ ID NO: 374043 - DNA, 3962 bp, Homo sapiens
agacgccggagcttcacaagggagcgaacgagggtgtttataagaatggaagtgttgtttccttgcccgattccttcatgctatatctcatgaacctctgtaatcttgggggagagactatatttaatgatgacaaacctgtcaccagtgtagcaacaacagtgtgaggacaaaagcaaataaaaattaagaagcgttcaaatttatattcaacaaggaagtcatttcaatcaacaacttctgctgcattatttttccaagatgaaccgatacacaaccatgagacagttgggggacggcacgtatgggagtgtgcttatgggcaagagtaatgaatccggggagctggtggccatcaaaaggatgaagagaaagttctattcttgggatgaatgcatgaacttgagagaagttaagtctctgaagaaacttaatcatgccaatgttattaaattgaaagaagttatcagagaaaatgaccatctttattttatatttgaatatatgaaagaaaacctctatcaattaatgaaagacagaaacaagttgttccctgaatcagtcatcagaaatattatgtatcaaatattgcaagggctggcttttatccataaacatggcttttttcatagggacatgaaaccagaaaacttgctttgtatgggtccagagcttgtgaaaattgctgattttggacttgcaagagaattaaggtcacagccaccatacactgattatgtatctaccagatggtatcgtgcccctgaagttttactgagatcttcagtttatagttctcccattgatgtgtgggctgttggaagtatcatggctgaactctatatgttaaggccacttttcccagggacaagtgaggtcgatgaaatctttaaaatttgccaagttttagggactcccaaaaaaagtgactggccagaaggataccagctggcatcctctatgaacttccgttttccccagtgtgttcctataaacttaaaaactcttattcccaatgccagtaatgaagctattcagctcatgaccgaaatgttgaattgggatccaaagaaacgaccgacagcaagccaggcattgaaacacccatattttcaagttggtcaggtattaggcccttcgtcaaatcatctggaatcaaaacagtctttaaataagcagctgcaaccattagaatcaaagccatctttagttgaggtagagcctaagcctctgccggatataatcgatcaggttgttggacaaccccagccaaaaactagccagcagccactgcagcccattcagccgccacagaacctgagcgtccagcaacctccaaagcaacagagtcaggagaaaccgccacaaacgctattcccgagcatcgtcaaaaacatgccaactaagccaaatggcacactgagtcataaaagtggtaggaggcgttggggtcagactatcttcaagtctggagatagctgggaagagttggaggactatgatttcggagcctcccattccaagaagccaagcatgggtgtttttaaagaaaaaaggaaaaaagattctccatttcggcttccagagccagtaccctcaggctccaaccactcgacaggggaaaacaagagcttacctgctgttacttccctaaaatctgattccgaattgtcaactgctccaacctctaaacagtactacttgaaacaatcaagatatcttccaggtgtgaatcccaagaaggtgtccttgatagccagtggaaaggaaataaacccccacacttggagcaaccagttattccccaagtcactgggacccgttggggcagaacttgctttcaaaaggagcaatgcaggaaatcttggaagttatgctacttacaatcagtcaggatatattccttcctttctcaaaaaagaagtgcagtcagctggccagaggatccacttagcacctctcaatgcaacggcttcagaatatacctggaacacaaaaactggtcgggggcagttttcaggacgtacttataatcctacagcaaaaaacctaaatattgtgaaccgtgcacagcccattccctcagtgcacgggaggacagactgggtggccaagtatggaggccaccggtaggagtctatggtgtgaaaccctacagcattgctccgtagagtacgtgcaagttccttgaccctgggaaatgtctacaaatgtctatttctactgagttctggaagaaatatgcaaaagtgggtacttggaagggcaaaaatcatcccctattttacttatttccaagaaatgcattttcttagcatcattgcccacagtgttgatatatgggtaggatgttacaaagtattgaataaactatttgccaaagtatgaagtatttgatctacaatttaataaatagtaaatccaataagaacccttaaaaaaaaacaacttccagaaaatgtttagagtgttttagttttcatttgttgtatgtgcccaaatggtttagtagttcttcactttgctgtggttggcttaagaggtttgtcttttgtttttgtacagcagttgggccaacctttgctggctgtcagctgtggttcttatttgactaaggctctgcgctgccattttgtcaatgacagaaagattgcaattatttgtttttctactttgaagctatgggagcgatggtaatttcaatcttgagcaggatatctttttttttttttttgaggcgatgtttcactcttgtgtccaggctggagtgcagtggcactatcttggcttactgcaacctccacctcctgggttcaagtgattctcctgcctcagcctcccgagtagctgggattagaggcgtgtgccaccatgcctggctaatttttgtagtattagtagagacagggtttcaccatgttggtcaggctcaggctggtctcaaactcctgacctcaggtgatccacctgcctcggcctcccaaagtgcagggcttacaggtgtgagccacagtgcccagctttttttttttttttttagaaataaatttatctttaacatagagaatatcaaagttatgccacttgattttagtggacggcttgtgttttgatcttgaccagtacagttcccatgaattcaaggtgacaatcaagcccaatggcttgatgacttcaatagtaaccaagtcaaggttctcttggctggacatcattaagaaagttctggaaactgtgtttgtttgatgctggttcattggacttttcaaattgttttgtttctgtgtccctaccagacacaaagatgaagtgtgccagctggttcccccaagccagctcatgctgctgaccactgactcagctctgaccttcacatttgctctgaagcaagtgcgttcagctgctggggcagtgatatcacatagtacatatattatttccttagtttatttccaaactggtattttaaatagacacttcgaactttgggctactctgtttaaatctgccactttctggactggaccttagtactgtaaattctttttaaagaataataatgttaccaactgctgagatttttatgtattttgtgactttgtaacaactgctattgtaataagtgtcatcttgtgggcattatacaaaggcatattataaaataataatgatatttttgtatagaagagtcaactgttcagatgtaagatgttgaaaaatgttaaaatctaaagagtaatttatcctagtggtaatggttatatgtatttgtacagtttaaattaatgtctcaaagctgtgcagtcttttgttactgggacacttttaaactctgaataggcattaaaaaaaatatggctaactagtgtgttttcattatgtttttaaaccttatatcctgaattctatttgttgttgttgttttaattagtagtctttaaaaaaagcagttttagggccag

SEQ ID NO: 374044 - DNA, 3900 bp, Homo sapiens
agacgccggagcttcacaagggagcgaacgagggtgtttataagaatggaagtgttgtttccttgcccgattccttcatgctatatctcatgaacctctgtaatcttgggggagagactatatttaatgatgacaaacctgtcaccagtgtagcaacaacagtgtgaggacaaaagcaaataaaaattaagaagcgttcaaatttatattcaacaaggaagtcatttcaatcaacaacttctgctgcattatttttccaagatgaaccgatacacaaccatgagacagttgggggacggcacgtatgggagtgtgcttatgggcaagagtaatgaatccggggagctggtggccatcaaaaggatgaagagaaagttctattcttgggatgaatgcatgaacttgagagaagttaagtctctgaagaaacttaatcatgccaatgttattaaattgaaagaagttatcagagaaaatgaccatctttattttatatttgaatatatgaaagaaaacctctatcaattaatgaaagacagaaacaagttgttccctgaatcagtcatcagaaatattatgtatcaaatattgcaagggctggcttttatccataaacatggcttttttcatagggacatgaaaccagaaaacttgctttgtatgggtccagagcttgtgaaaattgctgattttggacttgcaagagaattaaggtcacagccaccatacactgattatgtatctaccagatggtatcgtgcccctgaagttttactgagatcttcagtttatagttctcccattgatgtgtgggctgttggaagtatcatggctgaactctatatgttaaggccacttttcccagggacaagtgaggtcgatgaaatctttaaaatttgccaagttttagggactcccaaaaaaagtgactggccagaaggataccagctggcatcctctatgaacttccgttttccccagtgtgttcctataaacttaaaaactcttattcccaatgccagtaatgaagctattcagctcatgaccgaaatgttgaattgggatccaaagaaacgaccgacagcaagccaggcattgaaacacccatattttcaagttggtcaggtattaggcccttcgtcaaatcatctggaatcaaaacagtctttaaataagcagctgcaaccattagaatcaaagccatctttagttgaggtagagcctaagcctctgccggatataatcgatcaggttgttggacaaccccagccaaaaactagccagcagccactgcagcccattcagccgccacagaacctgagcgtccagcaacctccaaagcaacagagtcaggagaaaccgccacaaacgctattcccgagcatcgtcaaaaacatgccaactaagccaaatggcacactgagtcataaaagtggtaggaggcgttggggtcagactatcttcaagtctggagatagctgggaagagttggaggactatgatttcggagcctcccattccaagaagccaagcatgggtgtttttaaagaaaaaaggaaaaaagattctccatttcggcttccagagccagtaccctcaggctccaaccactcgacaggggaaaacaagagcttacctgctgttacttccctaaaatctgattccgaattgtcaactgctccaacctctaaacagtactacttgaaacaatcaagatatcttccaggtgtgaatcccaagaaggtgtccttgatagccagtggaaaggaaataaacccccacacttggagcaaccagttattccccaagtcactgggacccgttggggcagaacttgctttcaaaaggagcaatgcaggaaatcttggaagttatgctacttacaatcagtcaggatatattccttcctttctcaaaaaagaagtgcagtcagctggccagaggatccacttagcacctctcaatgcaacggcttcagaatatacctggaacacaaaaactggtcgggggcagttttcaggacgtacttataatcctacagcaaaaaacctaaatattgtgaaccgtgcacagcccattccctcagtgcacgggaggacagactgggtggccaagtatggaggccaccggtaggagtctatggtgtgaaaccctacagcattgctccgtagagtacgtgcaagttccttgaccctgggaaatgtctacaaatgtctatttctactgagttctggaagaaatatgcaaaagtgggtacttggaagggcaaaaatcatcccctattttacttatttccaagaaatgcattttcttagcatcattgcccacagtgttgatatatgggtaggatgttacaaagtattgaataaactatttgccaaagtatgaagtatttgatctacaatttaataaatagtaaatccaataagaacccttaaaaaaaaacaacttccagaaaatgtttagagtgttttagttttcatttgttgtatgtgcccaaatggtttagtagttcttcactttgctgtggttggcttaagaggtttgtcttttgtttttgtacagcagttgggccaacctttgctggctgtcagctgtggttcttatttgactaaggctctgcgctgccattttgtcaatgacttgagcaggatatctttttttttttttttgaggcgatgtttcactcttgtgtccaggctggagtgcagtggcactatcttggcttactgcaacctccacctcctgggttcaagtgattctcctgcctcagcctcccgagtagctgggattagaggcgtgtgccaccatgcctggctaatttttgtagtattagtagagacagggtttcaccatgttggtcaggctcaggctggtctcaaactcctgacctcaggtgatccacctgcctcggcctcccaaagtgcagggcttacaggtgtgagccacagtgcccagctttttttttttttttttagaaataaatttatctttaacatagagaatatcaaagttatgccacttgattttagtggacggcttgtgttttgatcttgaccagtacagttcccatgaattcaaggtgacaatcaagcccaatggcttgatgacttcaatagtaaccaagtcaaggttctcttggctggacatcattaagaaagttctggaaactgtgtttgtttgatgctggttcattggacttttcaaattgttttgtttctgtgtccctaccagacacaaagatgaagtgtgccagctggttcccccaagccagctcatgctgctgaccactgactcagctctgaccttcacatttgctctgaagcaagtgcgttcagctgctggggcagtgatatcacatagtacatatattatttccttagtttatttccaaactggtattttaaatagacacttcgaactttgggctactctgtttaaatctgccactttctggactggaccttagtactgtaaattctttttaaagaataataatgttaccaactgctgagatttttatgtattttgtgactttgtaacaactgctattgtaataagtgtcatcttgtgggcattatacaaaggcatattataaaataataatgatatttttgtatagaagagtcaactgttcagatgtaagatgttgaaaaatgttaaaatctaaagagtaatttatcctagtggtaatggttatatgtatttgtacagtttaaattaatgtctcaaagctgtgcagtcttttgttactgggacacttttaaactctgaataggcattaaaaaaaatatggctaactagtgtgttttcattatgtttttaaaccttatatcctgaattctatttgttgttgttgttttaattagtagtctttaaaaaaagcagttttagggccag

SEQ ID NO: 374045 - DNA, 1656 bp, Homo sapiens
agacgccggagcttcacaagggagcgaacgagggtgtttataagaatggaagtgttgtttccttgcccgattccttcatgctatatctcatgaacctctgtaatcttgggggagagactatatttaatgatgacaaacctgtcaccagtgtagcaacaacagtgtgaggacaaaagcaaataaaaattaagaagcgttcaaatttatattcaacaaggaagtcatttcaatcaacaacttctgctgcattatttttccaagatgaaccgatacacaaccatgagacagttgggggacggcacgtatgggagtgtgcttatgggcaagagtaatgaatccggggagctggtggccatcaaaaggatgaagagaaagttctattcttgggatgaatgcatgaacttgagagaagttaagtctctgaagaaacttaatcatgccaatgttattaaattgaaagaagttatcagagaaaatgaccatctttattttatatttgaatatatgaaagaaaacctctatcaattaatgaaagacagaaacaagttgttccctgaatcagtcatcagaaatattatgtatcaaatattgcaagggctggcttttatccataaacatggcttttttcatagggacatgaaaccagaaaacttgctttgtatgggtccagagcttgtgaaaattgctgattttggacttgcaagagaattaaggtcacagccaccatacactgattatgtatctaccagatggtatcgtgcccctgaagttttactgagatcttcagtttatagttctcccattgatgtgtgggctgttggaagtatcatggctgaactctatatgttaaggccacttttcccagggacaagtgaggtcgatgaaatctttaaaatttgccaagttttagggactcccaaaaaaagtgactggccagaaggataccagctggcatcctctatgaacttccgttttccccagtgtgttcctataaacttaaaaactcttattcccaatgccagtaatgaagctattcagctcatgaccgaaatgttgaattgggatccaaagaaacgaccgacagcaagccaggcattgaaacacccatattttcaagttggtcaggtattaggcccttcgtcaaatcatctggaatcaaaacagtctttaaataagcagctgcaaccattagaatcaaagccatctttagttgaggtagagcctaagcctctgccggatataatcgatcaggttgttggacaaccccagccaaaaactagccagcagccactgcagcccattcagccgccacagaacctgagcgtccagcaacctccaaagcaacagagtcaggagaaaccgccacaaacgctattcccgagcatcgtcaaaaacatgccaactgtgagtagccagtcatgacacttgcaatgaaatagtttgactcgtgcaattaagatttttttcgaggcatttctaataatgttggaaaagatataaaagatttttctttgttaaagaccctgagtcctctggttggagcttgacatgagatcacttaaaattctaatatggtttataaaaagaaaaactttcaggataaaagtaaccaagtttacatgctacagtcttcagtcttttttctttttctttttt

SEQ ID NO: 374046 - DNA, 168 bp, Homo sapiens
gtgtgcttatgggcaagagtaatgaatccggggagctggtggccatcaaaaggtactgtgtgtgacactgccaacttcacctttgaaaactctgctctttattttcctgtcctcgcttaagaatatataccagcacaggccagcgcggtggctcatgcctgtaatccc

SEQ ID NO: 374047 - DNA, 378 bp, Homo sapiens
tataaatcaaataaagctatgtttaaacgtaatgatttactgtatttttttttctccgtatatcatcaaggcttttttcatagggacatgaaaccagaaaacttgctttgtatgggtccagagcttgtgaaaattgctgattttggacttgcaagagaattaaggtcacagccaccatacactgattatgtatctaccagatggtgagtaggggttatgcagccctcctgaggcataagcctatggtgaaattttcctacgatggattgttacatatttctggaagttccatattgaatatttaaaacacagaattgaattttatattctttaaagaaagcgaaggattggtttattgctattctgatcactgaaaaa

SEQ ID NO: 374048 - DNA, 4067 bp, Homo sapiens
atccccagcgggctgcagggccaccaccctctgtccgacccagccggagcccgacctgcgaggctggccgggcatgtcccctcggcgccctgtgctaccagggccaatctccgcccggagaccggtccctgacgccgggtgtttataagaatggaagtgttgtttccttgcccgattccttcatgctatatctcatgaacctctgtaatcttgggggagagactatatttaatgatgacaaacctgtcaccagtgtagcaacaacagtgtgaggacaaaagcaaataaaaattaagaagcgttcaaatttatattcaacaaggaagtcatttcaatcaacaacttctgctgcattatttttccaagatgaaccgatacacaaccatgagacagttgggggacggcacgtatgggagtgtgcttatgggcaagagtaatgaatccggggagctggtggccatcaaaaggatgaagagaaagttctattcttgggatgaatgcatgaacttgagagaagttaagtctctgaagaaacttaatcatgccaatgttattaaattgaaagaagttatcagagaaaatgaccatctttattttatatttgaatatatgaaagaaaacctctatcaattaatgaaagacagaaacaagttgttccctgaatcagtcatcagaaatattatgtatcaaatattgcaagggctggcttttatccataaacatggcttttttcatagggacatgaaaccagaaaacttgctttgtatgggtccagagcttgtgaaaattgctgattttggacttgcaagagaattaaggtcacagccaccatacactgattatgtatctaccagatggtatcgtgcccctgaagttttactgagatcttcagtttatagttctcccattgatgtgtgggctgttggaagtatcatggctgaactctatatgttaaggccacttttcccagggacaagtgaggtcgatgaaatctttaaaatttgccaagttttagggactcccaaaaaaagtgactggccagaaggataccagctggcatcctctatgaacttccgttttccccagtgtgttcctataaacttaaaaactcttattcccaatgccagtaatgaagctattcagctcatgaccgaaatgttgaattgggatccaaagaaacgaccgacagcaagccaggcattgaaacacccatattttcaagttggtcaggtattaggcccttcgtcaaatcatctggaatcaaaacagtctttaaataagcagctgcaaccattagaatcaaagccatctttagttgaggtagagcctaagcctctgccggatataatcgatcaggttgttggacaaccccagccaaaaactagccagcagccactgcagcccattcagccgccacagaacctgagcgtccagcaacctccaaagcaacagagtcaggagaaaccgccacaaacgctattcccgagcatcgtcaaaaacatgccaactaagccaaatggcacactgagtcataaaagtggtaggaggcgttggggtcagactatcttcaagtctggagatagctgggaagagttggaggactatgatttcggagcctcccattccaagaagccaagcatgggtgtttttaaagaaaaaaggaaaaaagattctccatttcggcttccagagccagtaccctcaggctccaaccactcgacaggggaaaacaagagcttacctgctgttacttccctaaaatctgattccgaattgtcaactgctccaacctctaaacagtactacttgaaacaatcaagatatcttccaggtgtgaatcccaagaaggtgtccttgatagccagtggaaaggaaataaacccccacacttggagcaaccagttattccccaagtcactgggacccgttggggcagaacttgctttcaaaaggagcaatgcaggaaatcttggaagttatgctacttacaatcagtcaggatatattccttcctttctcaaaaaagaagtgcagtcagctggccagaggatccacttagcacctctcaatgcaacggcttcagaatatacctggaacacaaaaactggtcgggggcagttttcaggacgtacttataatcctacagcaaaaaacctaaatattgtgaaccgtgcacagcccattccctcagtgcacgggaggacagactgggtggccaagtatggaggccaccggtaggagtctatggtgtgaaaccctacagcattgctccgtagagtacgtgcaagttccttgaccctgggaaatgtctacaaatgtctatttctactgagttctggaagaaatatgcaaaagtgggtacttggaagggcaaaaatcatcccctattttacttatttccaagaaatgcattttcttagcatcattgcccacagtgttgatatatgggtaggatgttacaaagtattgaataaactatttgccaaagtatgaagtatttgatctacaatttaataaatagtaaatccaataagaacccttaaaaaaaaacaacttccagaaaatgtttagagtgttttagttttcatttgttgtatgtgcccaaatggtttagtagttcttcactttgctgtggttggcttaagaggtttgtcttttgtttttgtacagcagttgggccaacctttgctggctgtcagctgtggttcttatttgactaaggctctgcgctgccattttgtcaatgacagaaagattgcaattatttgtttttctactttgaagctatgggagcgatggtaatttcaatcttgagcaggatatctttttttttttttttgaggcgatgtttcactcttgtgtccaggctggagtgcagtggcactatcttggcttactgcaacctccacctcctgggttcaagtgattctcctgcctcagcctcccgagtagctgggattagaggcgtgtgccaccatgcctggctaatttttgtagtattagtagagacagggtttcaccatgttggtcaggctcaggctggtctcaaactcctgacctcaggtgatccacctgcctcggcctcccaaagtgcagggcttacaggtgtgagccacagtgcccagctttttttttttttttttagaaataaatttatctttaacatagagaatatcaaagttatgccacttgattttagtggacggcttgtgttttgatcttgaccagtacagttcccatgaattcaaggtgacaatcaagcccaatggcttgatgacttcaatagtaaccaagtcaaggttctcttggctggacatcattaagaaagttctggaaactgtgtttgtttgatgctggttcattggacttttcaaattgttttgtttctgtgtccctaccagacacaaagatgaagtgtgccagctggttcccccaagccagctcatgctgctgaccactgactcagctctgaccttcacatttgctctgaagcaagtgcgttcagctgctggggcagtgatatcacatagtacatatattatttccttagtttatttccaaactggtattttaaatagacacttcgaactttgggctactctgtttaaatctgccactttctggactggaccttagtactgtaaattctttttaaagaataataatgttaccaactgctgagatttttatgtattttgtgactttgtaacaactgctattgtaataagtgtcatcttgtgggcattatacaaaggcatattataaaataataatgatatttttgtatagaagagtcaactgttcagatgtaagatgttgaaaaatgttaaaatctaaagagtaatttatcctagtggtaatggttatatgtatttgtacagtttaaattaatgtctcaaagctgtgcagtcttttgttactgggacacttttaaactctgaataggcattaaaaaaaatatggctaactagtgtgttttcattatgtttttaaaccttatatcctgaattctatttgttgttgttgttttaattagtagtctttaaaaaaagcagttttagggccag

SEQ ID NO: 374049 - DNA, 3443 bp, Homo sapiens
cttaatatatcagatggcacttatttccatatctattcagttgagttcctgtcttaggcttgatggacatttcatagacatttgtctccagccccactcattgtctgtgatcagggaacatgtgttgtgtcctattatccccagaacattgtacaaatgcctgacacacagatggaacagggtctgaatacctgttccttgatggaaatgcatgaccacacagcgtagaatgctactgcccatccacctttgaaattgcaatcaaaattacctcttttgttctctattttcataggtatcgtgcccctgaagttttactgagatcttcagtttatagttctcccattgatgtgtgggctgttggaagtatcatggctgaactctatatgttaaggccacttttcccagggacaagtgaggtcgatgaaatctttaaaatttgccaagttttagggactcccaaaaaaagtgactggccagaaggataccagctggcatcctctatgaacttccgttttccccagtgtgttcctataaacttaaaaactcttattcccaatgccagtaatgaagctattcagctcatgaccgaaatgttgaattgggatccaaagaaacgaccgacagcaagccaggcattgaaacacccatattttcaagttggtcaggtattaggcccttcgtcaaatcatctggaatcaaaacagtctttaaataagcagctgcaaccattagaatcaaagccatctttagttgaggtagagcctaagcctctgccggatataatcgatcaggttgttggacaaccccagccaaaaactagccagcagccactgcagcccattcagccgccacagaacctgagcgtccagcaacctccaaagcaacagagtcaggagaaaccgccacaaacgctattcccgagcatcgtcaaaaacatgccaactaagccaaatggcacactgagtcataaaagtggtaggaggcgttggggtcagactatcttcaagtctggagatagctgggaagagttggaggactatgatttcggagcctcccattccaagaagccaagcatgggtgtttttaaagaaaaaaggaaaaaagattctccatttcggcttccagagccagtaccctcaggctccaaccactcgacaggggaaaacaagagcttacctgctgttacttccctaaaatctgattccgaattgtcaactgctccaacctctaaacagtactacttgaaacaatcaagatatcttccaggtgtgaatcccaagaaggtgtccttgatagccagtggaaaggaaataaacccccacacttggagcaaccagttattccccaagtcactgggacccgttggggcagaacttgctttcaaaaggagcaatgcaggaaatcttggaagttatgctacttacaatcagtcaggatatattccttcctttctcaaaaaagaagtgcagtcagctggccagaggatccacttagcacctctcaatgcaacggcttcagaatatacctggaacacaaaaactggtcgggggcagttttcaggacgtacttataatcctacagcaaaaaacctaaatattgtgaaccgtgcacagcccattccctcagtgcacgggaggacagactgggtggccaagtatggaggccaccggtaggagtctatggtgtgaaaccctacagcattgctccgtagagtacgtgcaagttccttgaccctgggaaatgtctacaaatgtctatttctactgagttctggaagaaatatgcaaaagtgggtacttggaagggcaaaaatcatcccctattttacttatttccaagaaatgcattttcttagcatcattgcccacagtgttgatatatgggtaggatgttacaaagtattgaataaactatttgccaaagtatgaagtatttgatctacaatttaataaatagtaaatccaataagaacccttaaaaaaaaacaacttccagaaaatgtttagagtgttttagttttcatttgttgtatgtgcccaaatggtttagtagttcttcactttgctgtggttggcttaagaggtttgtcttttgtttttgtacagcagttgggccaacctttgctggctgtcagctgtggttcttatttgactaaggctctgcgctgccattttgtcaatgacttgagcaggatatctttttttttttttttgaggcgatgtttcactcttgtgtccaggctggagtgcagtggcactatcttggcttactgcaacctccacctcctgggttcaagtgattctcctgcctcagcctcccgagtagctgggattagaggcgtgtgccaccatgcctggctaatttttgtagtattagtagagacagggtttcaccatgttggtcaggctcaggctggtctcaaactcctgacctcaggtgatccacctgcctcggcctcccaaagtgcagggcttacaggtgtgagccacagtgcccagctttttttttttttttttagaaataaatttatctttaacatagagaatatcaaagttatgccacttgattttagtggacggcttgtgttttgatcttgaccagtacagttcccatgaattcaaggtgacaatcaagcccaatggcttgatgacttcaatagtaaccaagtcaaggttctcttggctggacatcattaagaaagttctggaaactgtgtttgtttgatgctggttcattggacttttcaaattgttttgtttctgtgtccctaccagacacaaagatgaagtgtgccagctggttcccccaagccagctcatgctgctgaccactgactcagctctgaccttcacatttgctctgaagcaagtgcgttcagctgctggggcagtgatatcacatagtacatatattatttccttagtttatttccaaactggtattttaaatagacacttcgaactttgggctactctgtttaaatctgccactttctggactggaccttagtactgtaaattctttttaaagaataataatgttaccaactgctgagatttttatgtattttgtgactttgtaacaactgctattgtaataagtgtcatcttgtgggcattatacaaaggcatattataaaataataatgatatttttgtatagaagagtcaactgttcagatgtaagatgttgaaaaatgttaaaatctaaagagtaatttatcctagtggtaatggttatatgtatttgtacagtttaaattaatgtctcaaagctgtgcagtcttttgttactgggacacttttaaactctgaataggcattaaaaaaaatatggctaactagtgtgttttcattatgtttttaaaccttatatcctgaattctatttgttgttgttgttttaattagtagtctttaaaaaaagcagttttagggccag

SEQ ID NO: 374050 - DNA, 448 bp, Homo sapiens
cttgtgtcccctctgtcttctccagatgaaacattcctacttccttcctcaaatgatggggtcactgtctctcattattctagctgctttcctgtggacatgcctcaccctctcttaaaggatggccaataggctggatcacaaatctcctgcatggtttgacccgcaggactattactttctctgttctgaactggagttgcatcacactgttgactcatatggagcacaaagtcaactgaaaccacagcccttcttttttgacgtggtctactgatggtggtgagtcatctttctcccactttgtactcagtacttaagccaagatgtgttttctttgtttattttaagcccaagtatatccctgttaaattttatcctcctgttaagttttatggtctacctttcatttgccgagatcttttcatattctcagttctgattaaaa

SEQ ID NO: 374051 - DNA, 174 bp, Homo sapiens
gatttagaataaagccaaataaagcctgtgtttagaagttaaagtagcacaatttttatagaataagtatgatttgtttgcgatttggtaataaaataaacactcagagataaagcttagtgaaatgacctgtgatccaaaaggctgtgttatcatgcttttcaaatgttgtat

SEQ ID NO: 374052 - DNA, 1327 bp, Homo sapiens
cgcgcctccagcccagcgctcggagccgctttcgctgccactgtctgctcccccgggccgccgccgcctccccccgcaggcccggggctctgtccgctgggcccgcgctgctcgccccgagccaggagaacgagctcgaggaggatgcctgggcccgtcccgcgcggccccgggtgaggcacgcccgcgcgcccgccggcgccatgggaaggagcgggcgccgctgctgtcccccgccggcgcgcgcacgacttgagacctgccacgggcagcccccggccgcgggtccccgagtgacgctggcggcacctgagagtgtggcgcgggcccggggccacgcagcggagcccagtgtccagtgaagcgtctgaggacccgccgcccgtgccgccgccatggtgatgtcccagggcacctacacgttcctcacgtgcttcgccggcttctggctcatctggggtctcatcgtcctgctctgctgcttctgcagcttcctgcgccgccgcctcaaacggcgccaggaggagcgactgcgcgagcagaacctgcgcgccctagagctggagcccctcgaactcgagggcagtctggccgggagccccccgggcctggcgccgccgcagccaccaccacaccgtagccgcctggaggcgccggctcacgcgcaacgcgcacccacacccgcaccaccacgcgctcccgcacccgccgcctacgcacctgtcggtgccgccacggccctggagctacccgcgccaagcggaatcggacatgtccaaaccaccgtgttacgaagaggcggtgctgatggcagagccgccgccgccctatagcgaggtgctcacggacacgcgcggcctctaccgcaagatcgtcacgcccttcctgagtcgccgcgacagcgcggagaagcaggagcagccgcctcccagctacaagccgctcttcctggaccggggctacacctcggcgctgcacctgcccagcgcccctcggcccgcgccgccctgcccagccctctgcctgcaggccgaccgtggccgccgggtcttccccagctggaccgactcagagctcagcagccgcgagcccctggagcacggagcttggcgtctgccggtctccatccccttgttcgggaggactacagccgtatagaggggcgcccggcgccccgggccccaccggcggactcctggcctgactgcggggctttttaaatgcttccctggactgcggggaggggcggggggagggagggatttcttatcccgtttgttacattttgaggataataaaggtgtgtgatctggtttggtacaaaaaa

SEQ ID NO: 374053 - DNA, 1389 bp, Homo sapiens
cgcgcctccagcccagcgctcggagccgctttcgctgccactgtctgctcccccgggccgccgccgcctccccccgcaggcccggggctctgtccgctgggcccgcgctgctcgccccgagccaggagaacgagctcgaggaggatgcctgggcccgtcccgcgcggccccgggtgaggcacgcccgcgcgcccgccggcgccatgggaaggagcgggcgccgctgctgtcccccgccggcgcgcgcacgacttgagacctgccacgggcagcccccggccgcgggtccccgagtgacgctggcggcacctgagagtgtggcgcgggcccggggccacgcagcggagcccagtgtccagtgaagcgtctgaggacccgccgcccgtgccgccgccatggtgatgtcccagggcacctacacgttcctcacgtgcttcgccggcttctggctcatctggggtctcatcgtcctgctctgctgcttctgcagcttcctgcgccgccgcctcaaacggcgccaggaggagcgactgcgcgagcagaacctgcgcgccctagagctggagcccctcgaactcgagggcagtctggccgggagccccccgggcctggcgccgccgcagccaccaccacaccgtagccgcctggaggcgccggctcacgcgcactcgcatccgcacgtgcacgtgcacccgctgctgcaccacgggcccgcgcagccgcacgcgcacgcgcacccacacccgcaccaccacgcgctcccgcacccgccgcctacgcacctgtcggtgccgccacggccctggagctacccgcgccaagcggaatcggacatgtccaaaccaccgtgttacgaagaggcggtgctgatggcagagccgccgccgccctatagcgaggtgctcacggacacgcgcggcctctaccgcaagatcgtcacgcccttcctgagtcgccgcgacagcgcggagaagcaggagcagccgcctcccagctacaagccgctcttcctggaccggggctacacctcggcgctgcacctgcccagcgcccctcggcccgcgccgccctgcccagccctctgcctgcaggccgaccgtggccgccgggtcttccccagctggaccgactcagagctcagcagccgcgagcccctggagcacggagcttggcgtctgccggtctccatccccttgttcgggaggactacagccgtatagaggggcgcccggcgccccgggccccaccggcggactcctggcctgactgcggggctttttaaatgcttccctggactgcggggaggggcggggggagggagggatttcttatcccgtttgttacattttgaggataataaaggtgtgtgatctggtttggtacaaaaaa

SEQ ID NO: 374054 - DNA, 715 bp, Homo sapiens
gcccaggccaaatgggagcgacccagcccattgtctggatcacaagtgcccctttcttgtctgagcacaatgccccaactgtactgagtagcatgcaggttggccggcagggaggcacgcgccacatggaggtgcctggtccgccaggggagctcctctgggaggagaatggcctctgactcagaggaaatgacctctggctcccctcccaacctcccctcagcgggcatcatgctggagagagaaatggccctcctgccagctctcccaggcctgactcagcagatgccagccccgaccgcgggcttcagatccaggatcccagcgaccacaaccgtccttgggtttcctttcccatccggggaggcatcctagaggtgactggcatctggggcattggaggccttggcataagatgcccttagatgggtggtgccctggaggtcaggcctgagtctcctgcaggcaggggcgcctggggaattactcacgggtgcctttcattcccttcctgctctgtgagacctgtgttgagtgctctgcatccattatctcctaatttttttttacaacagttgcgcaaggtaagtttattatccccattttagagatgaagactctaaagggaggctcagggaggtgagtgacttgcccaaggtcacactaccagtaagtggcagagctgagtctacactgcaggcttctctgggggcaa

SEQ ID NO: 374055 - DNA, 727 bp, Homo sapiens
ggcttccatccgcagcctccgggagaacacgggcggcggcgggctcgggttcgggctagggctggggcgcgggcggcccctggccggggcctctgcgagaggctgggaaccggcggcctcacctcctccgaccgcctcccactccgcagcggaatcggacatgtccaaaccaccgtgttacgaagaggcggtgctgatggcagagccgccgccgccctatagcgaggtgctcacggacacgcgcggcctctaccgcaagatcgtcacgcccttcctgagtcgccgcgacagcgcggagaagcaggagcagccgcctcccagctacaagccgctcttcctggaccggggctacacctcggcgctgcacctgcccagcgcccctcggcccgcgccgccctgcccagccctctgcctgcaggccgaccgtggccgccgggtcttccccagctggaccgactcagagctcagcagccgcgagcccctggagcacggagcttggcgtctgccggtctccatccccttgttcgggaggactacagccgtatagaggggcgcccggcgccccgggccccaccggcggactcctggcctgactgcggggctttttaaatgcttccctggactgcggggaggggcggggggagggagggatttcttatcccgtttgttacattttgaggataataaaggtgtgtgatctggtttggtacaaaaaagggtgcaccgg

SEQ ID NO: 374056 - DNA, 1352 bp, Homo sapiens
  misc_feature (35)..(35): n is a, c, g, or t
aaactgataaccggctaggtacgaggctgggtggngcattcccttcctgctctgtgagacctgtgttgagtgctctgcatccattatctcctaatttttttttacaacagttgcgcaaggtcccgcgcggccccgggtgaggcacgcccgcgcgcccgccggcgccatgggaaggagcgggcgccgctgctgtcccccgccggcgcgcgcacgacttgagacctgccacgggcagcccccggccgcgggtccccgagtgacgctggcggcacctgagagtgtggcgcgggcccggggccacgcagcggagcccagtgtccagtgaagcgtctgaggacccgccgcccgtgccgccgccatggtgatgtcccagggcacctacacgttcctcacgtgcttcgccggcttctggctcatctggggtctcatcgtcctgctctgctgcttctgcagcttcctgcgccgccgcctcaaacggcgccaggaggagcgactgcgcgagcagaacctgcgcgccctagagctggagcccctcgaactcgagggcagtctggccgggagccccccgggcctggcgccgccgcagccaccaccacaccgtagccgcctggaggcgccggctcacgcgcactcgcatccgcacgtgcacgtgcacccgctgctgcaccacgggcccgcgcagccgcacgcgcacgcgcacccacacccgcaccaccacgcgctcccgcacccgccgcctacgcacctgtcggtgccgccacggccctggagctacccgcgccaagcggaatcggacatgtccaaaccaccgtgttacgaagaggcggtgctgatggcagagccgccgccgccctatagcgaggtgctcacggacacgcgcggcctctaccgcaagatcgtcacgcccttcctgagtcgccgcgacagcgcggagaagcaggagcagccgcctcccagctacaagccgctcttcctggaccggggctacacctcggcgctgcacctgcccagcgcccctcggcccgcgccgccctgcccagccctctgcctgcaggccgaccgtggccgccgggtcttccccagctggaccgactcagagctcagcagccgcgagcccctggagcacggagcttggcgtctgccggtctccatccccttgttcgggaggactacagccgtatagaggggcgcccggcgccccgggccccaccggcggactcctggcctgactgcggggctttttaaatgcttccctggactgcggggaggggcggggggagggagggatttcttatcccgtttgttacattttgaggataataaaggtgtgtgatctggtttggtacaaaaaa

SEQ ID NO: 374057 - DNA, 388 bp, Homo sapiens
aataatccttgacagcagcaaccttttcacaaagttactttggaatgtggaatatctaaagagaaaataaagaaaataaacatctggaggcacacactgaaatatctgttcttctcaacttcatttataaagcttgacaaagataatagtctttcacaattactgctcctgatgggtgccagaattcttcgaaaatcaaaggcatggatctctgagtttaagatatctggattctctaacagttgcataagaatttctagagggacttcatcagaaatagacttcttaagcttccttttctgaatatgttttgggtcaataatacattattatttttccctctcagaagacagttcatagtgagagtccatctctacaaaaaaattaa

SEQ ID NO: 374058 - DNA, 1174 bp, Homo sapiens
ggcagagaggccgccgtagtttgcgttttcacctggtcgcccggcggccatggcggccgttctgaagccggtgctgctgggccttcgagatgcgccggtgcacggcagccccacagggccgggtgcctggactgctagcaagctgggcggcattccggatgctctgcccaccgtggctgcgcccaggcccgtgtgtcagcgctgcgggcagccgctcgctctggtcgtgcaggtgtattgcccgctggaaggctccccgtttcaccgtctgctgcacgtgttcgcgtgcgcctgccccggctgtagcaccggcggtgcgcgcagctggaaggtgttccgctcccagtgcctgcaggtgccagagagagaggcgcaggacgctcagaaacagggaaacagccttgcagctgaggactggtgtgaaggtgctgatgactggggaagtgatactgaggaggggccttcaccacagtttaccttggattttgggaatgatgccagcagtgccaaagacgtagactggactgctcggctccaagacctccgcctgcaggatgctgtcctgggtgctgcccatcctgtgcctcctgggctgccgctcttcctgccctactacatctgtgttgcagatgaggatgattacagggactttgtcaacctggatcatgcccacagccttctgagggactatcagcagagagaaggcattgccatggatcagttgctttcccaaagccttcctaatgatggtgatgaaaaatatgagaagaccataattaaaagtggagatcagacgttttacaaattcatgaagcgaattgctgcttgtcaggagcagattttgaggtattcctggagtggagagccactctttttgacctgccctacatcagaagtcaccgagctcccagcctgcagccagtgtggaggccaaaggatatttgagtttcagcttatgccagcactggtcagcatgctcaagagtgctaatttaggtctttctgtggaatttggaacaattctagtttacacatgtgagaagagttgctggcccccaaatcatcagactcccatggaagaattttgtattatacaagaagacccagatgaattattgtttaagtagagcatttccttttattaatataaattaaaacaaatgtttacatccaaa

SEQ ID NO: 374059 - DNA, 412 bp, Homo sapiens
aagaaaggttgcaaagcatggccttagatgctagaatgcgacttgtgtggctctgattcggggttctttgtttccttgtcctaggtattcctggagtggagagccactctttttgacctgccctacatcagaagtcaccgagctcccagcctgcagccagtgtggaggccaaaggatatttgagtttcagcttatgccagcactggtcagcatgctcaagagtgctaatttaggtctttctgtggaatttggaacaattctagtttacacatgtgagaagagttgctggcccccaaatcatcagactcccatggaagaattttgtattatacaagaagacccagatgaattattgtttaagtagagcatttccttttattaatataaattaaaacaaatgtttacatccaaa

SEQ ID NO: 374060 - DNA, 1288 bp, Homo sapiens
ggcagagaggccgccgtagtttgcgttttcacctggtcgcccggcggccatggcggccgttctgaagccggtgctgctgggccttcgagatgcgccggtgcacggcagccccacagggccgggtgcctggactgctagcaagctgggcggcattccggatgctctgcccaccgtggctgcgcccaggcccgtgtgtcagcgctgcgggcagccgctcgctctggtcgtgcaggtgtattgcccgctggaaggctccccgtttcaccgtctgctgcacgtgttcgcgtgcgcctgccccggctgtagcaccggcggtgcgcgcaggtaggcggggaagtcccagagctgctccaggggtgtcctttccagcgggctggggcgggccggcgggctggagtcggggtgcagccctcacggccctttgtcttcaccccgaagctggaaggtgttccgctcccagtgcctgcaggtgccagagagagaggcgcaggacgctcagaaacagggaaacagccttgcagctgaggactggtgtgaaggtgctgatgactggggaagtgatactgaggaggggccttcaccacagtttaccttggattttgggaatgatgccagcagtgccaaagacgtagactggactgctcggctccaagacctccgcctgcaggatgctgtcctgggtgctgcccatcctgtgcctcctgggctgccgctcttcctgccctactacatctgtgttgcagatgaggatgattacagggactttgtcaacctggatcatgcccacagccttctgagggactatcagcagagagaaggcattgccatggatcagttgctttcccaaagccttcctaatgatggtgatgaaaaatatgagaagaccataattaaaagtggagatcagacgttttacaaattcatgaagcgaattgctgcttgtcaggagcagattttgaggtattcctggagtggagagccactctttttgacctgccctacatcagaagtcaccgagctcccagcctgcagccagtgtggaggccaaaggatatttgagtttcagcttatgccagcactggtcagcatgctcaagagtgctaatttaggtctttctgtggaatttggaacaattctagtttacacatgtgagaagagttgctggcccccaaatcatcagactcccatggaagaattttgtattatacaagaagacccagatgaattattgtttaagtagagcatttccttttattaatataaattaaaacaaatgtttacatccaaa

SEQ ID NO: 374061 - DNA, 827 bp, Homo sapiens
ggcagagaggccgccgtagtttgcgttttcacctggtcgcccggcggccatggcggccgttctgaagccggtgctgctgggccttcgagatgcgccggtgcacggcagccccacagggccgggtgcctggactgctagcaagctgggcggcattccggatgctctgcccaccgtggctgcgcccaggcccgtgtgtcagcgctgcgggcagccgctcgctctggtcgtgcaggtgtattgcccgctggaaggctccccgtttcaccgtctgctgcacgtgttcgcgtgcgcctgccccggctgtagcaccggcggtgcgcgcaggtaggcggggaagtcccagagctgctccaggggtgtcctttccagcgggctggggcgggccggcgggctggagtcggggtgcagccctcacggccctttgtcttcaccccgaagctggaaggtgttccgctcccagtgcctgcaggtgccagagagagaggcgcaggacgctcaggtattcctggagtggagagccactctttttgacctgccctacatcagaagtcaccgagctcccagcctgcagccagtgtggaggccaaaggatatttgagtttcagcttatgccagcactggtcagcatgctcaagagtgctaatttaggtctttctgtggaatttggaacaattctagtttacacatgtgagaagagttgctggcccccaaatcatcagactcccatggaagaattttgtattatacaagaagacccagatgaattattgtttaagtagagcatttccttttattaatataaattaaaacaaatgtttacatccaaa

SEQ ID NO: 374062 - DNA, 305 bp, Homo sapiens
gaaagcagtaagcactgtttttgctttacctaattactttttcagcttataaggtaaaatcattccttttagtaacatcagtctcataactctttttgctggaagcctgaatatgtggtatttttcaggtctttctgtggaatttggaacaattctagtttacacatgtgagaagagttgctggcccccaaatcatcagactcccatggaagaattttgtattatacaagaagacccagatgaattattgtttaagtagagcatttccttttattaatataaattaaaacaaatgtttacatcca

SEQ ID NO: 374063 - DNA, 1654 bp, Homo sapiens
ggcagagaggccgccgtagtttgcgttttcacctggtcgcccggcggccatggcggccgttctgaagccggtgctgctgggccttcgagatgcgccggtgcacggcagccccacagggccgggtgcctggactgctagcaagctgggcggcattccggatgctctgcccaccgtggctgcgcccaggcccgtgtgtcagcgctgcgggcagccgctcgctctggtcgtgcaggtgtattgcccgctggaaggctccccgtttcaccgtctgctgcacgtgttcgcgtgcgcctgccccggctgtagcaccggcggtgcgcgcagctggaaggtgttccgctcccagtgcctgcaggtgccagagagagaggcgcaggacgctcagaaacagggaaacagccttgcagctgaggactggtgtgaaggtgctgatgactggggaagtgatactgaggaggggccttcaccacagtttaccttggattttgggaatgatgccagcagtgccaaagacgtagactggactgctcggctccaagacctccgcctgcaggatgctgtcctgggtgctgcccatcctgtgcctcctgggctgccgctcttcctgccctactacatctgtgttgcagatgaggatgattacagggactttgtcaacctggatcatgcccacagccttctgagggactatcagcagagagaaggcattgccatggatcagttgctttcccaaagccttcctaatgatggtgatgaaaaatatgagaagaccataattaaaagtggagatcagacgttttacaaattcatgaagcgaattgctgcttgtcaggagcagattttgaggtattcctggagtggagagccactctttttgacctgccctacatcagaagtcaccgagctcccagcctgcagccagtgtggaggccaaaggatatttgagtttcagcttatgccagcactggtcagcatgctcaagagtgctaatttaggtctttctgtggaatttggaacaattctagtttacacatgtgagaagagttgctggcccccaaatcatcagactcccatggaagaattttgtattatacaagaagacccagatgaattattgtttaagtagagcatttccttttattaatataaattaaaacaaatgtttacatccaaaaaaaaaaaaaaaaaaaaaaaaaaaaaaaaaaaaaaaaaaaaaaaaaaaaaaaaaaaaaaaaaaaaaaaaaaaaaaaaaaaaaaaaaaaaaaaaggaaaaaaaaaaaaaaaaaaaaaaaaaaaaaaacttttggcccgttttgcccaatcattttttaactcgggaaaatttttctatggggcccaaattggggcttatttgggcaatttcccctttaggggggtgttttaaaattaaatgggcgggtttttaaaaaggggtaattgggaaaaccctggggatacccaatttaaatcccttgggaaaaattccctttttcccaagtttgggtaaactaaaaaggccccacccgtaggccttttcaaaaaattggccactcttaaagggaaagggaaatttgggggccgaaattttggttaaaattcgggtgaaaaattttgtaaaatcgctttatttttaaccctgggcctgcggcccttt

SEQ ID NO: 374064 - DNA, 1218 bp, Homo sapiens
ccacgcgtcgatgggaaatacatcaccaaatctggaacccgtgtggaccaccagacaggccccattgtgtggggggagccagggaccaatggccagcatgctttttaccagctcatccaccaaggcaccaagatgataccctgtgacttcctcatcccggtccagacccagcaccccatacggaagggtctgcatcacaaggatgctctgcccaccgtggctgcgcccaggcccgtgtgtcagcgctgcgggcagccgctcgctctggtcgtgcaggtgtattgcccgctggaaggctccccgtttcaccgtctgctgcacgtgttcgcgtgcgcctgccccggctgtagcaccggcggtgcgcgcagctggaaggtgttccgctcccagtgcctgcaggtgccagagagagaggcgcaggacgctcagaaacagggaaacagccttgcagctgaggactggtgtgaaggtgctgatgactggggaagtgatactgaggaggggccttcaccacagtttaccttggattttgggaatgatgccagcagtgccaaagacgtagactggactgctcggctccaagacctccgcctgcaggatgctgtcctgggtgctgcccatcctgtgcctcctgggctgccgctcttcctgccctactacatctgtgttgcagatgaggatgattacagggactttgtcaacctggatcatgcccacagccttctgagggactatcagcagagagaaggcattgccatggatcagttgctttcccaaagccttcctaatgatggtgatgaaaaatatgagaagaccataattaaaagtggagatcagacgttttacaaattcatgaagcgaattgctgcttgtcaggagcagattttgaggtattcctggagtggagagccactctttttgacctgccctacatcagaagtcaccgagctcccagcctgcagccagtgtggaggccaaaggatatttgagtttcagcttatgccagcactggtcagcatgctcaagagtgctaatttaggtctttctgtggaatttggaacaattctagtttacacatgtgagaagagttgctggcccccaaatcatcagactcccatggaagaattttgtattatacaagaagacccagatgaattattgtttaagtagagcatttccttttattaatataaattaaaacaaatgtttacatccaaa

SEQ ID NO: 374065 - DNA, 2528 bp, Homo sapiens
acacacactcagaggagagaggaagaattgaaagacttgagaagactttgataacctccctgctggcccttctgtgttccggaaagatcctggatgttggctaccttttcaagtcatcttggcatgtctctagtgttttgtaagccgctttccagctagctgcgtgtgtgtgtgcgcgcgcgtgtgtacgcgcgcgcctatctgatgcatttgactgtcttttatccaactgcccagaagcaaatgtgttaactcggcgatgccccttcatgcccgggttcttgcagagctctgaggacgcccagacccattttcctggctggatttggagcggctgctgggctgtggacccaggtgtgtggatcgctttacccagaagcttggaaagcgccaatattaacctgcttccaggtacatcacaaggtcaagagagtgtcttgcagccctcttgtttccgtgtatctacaccttcttctcttggccagaaggatatttacgttttggttcacagcatattgaagccaaaagttcagcccttcgaactggtttgctatacaaaacaaaacaaaacaaataaggtaatgaggattgcttattaaactgcttaacaaaatccccgactcttcctcagccctttctcggctccctcctccccaccaaaatgtcaccagctcttgaattacgtggattcgggttggaggagaacttgaaggaaacgtgattaaagggctatgcgagaacgctctctttgctgcccgcggtccggtgggcttcgaagccaatcgtgagaaggaccggttccctccgtgctgcttcctccccgtgcagtgctgggtgtgcgtgtgcgagtgtgagtgcaagtgcgcgcgcgcccgggtgcgagtgtgtgtgagtgtgagcgtgtgtctgtgtgtgcgtgcgcggccgccctgcctctgcccgctccccgggcgcggagccgcgggtttcatggggcgattgcagcgattcccccacccagagcgacctgcgggcagcggcggcagtggcaggagccgcctttccgattccctacgatgcgggtgctgagctatggcaaagggcagcgaagtgacgagcgagacccgcgtacgactgtgaaagccacctggagccaccttgccgggattgtacctgcaggcagaaagtcttcctacgaccgtcttttcccttagaggcaccaggtgttgagaagatatgtagcagccgagcacccatcttttgacaccgtcctctgaaatcagctttggagatgctttcactctgtccgtcttctgcagcagccaggcagagtgccgactccttcacagccgtgaggaactcttcaggctccagaagctcttaaacctgatctacaatggaaaaaattcttttttatctgtttctcattggcatagcagtgaaagctcagatctgtccaaagcgttgtgtctgtcagattttgtctcctaatcttgcaaccctttgtgccaagaaagggcttttatttgttccaccaaacattgacagaagaactgtggaactgcggttggcagacaattttgttacaaatattaaaaggaaagattttgccaatatgaccagcttggtggacctgactctatccaggaatacaataagttttattacacctcatgctttcgctgacctacgaaatttgagggctttgcatttgaatagcaacagattgactaaaattacaaatgatatgttcagtggtctttccaatcttcatcatttgatactgaacaacaatcagctgactttaatttcctctacagcgtttgatgatgtcttcgcccttgaggagctggatctgtcctataataatctagaaaccattccttgggatgctgttgagaagatggttagcttgcatacccttagtttggatcacaatatgattgataacattcctaaggggaccttctcccatttgcacaagatgactcggttagatgtgacatcaaataaattgcagaagctaccacctgaccctctctttcagcgagctcaggtactagcaacctcaggaatcataagcccatctacttttgcattaagttttggtggaaaccccttgcattgcaattgtgaattgttgtggttgaggcgtctgtccagagaagatgacttagagacctgtgcttctcctccacttttaactggccgctacttttggtcaattcctgaagaagagtttttgtgtgagcctcctctcattactcgtcatacacatgagatgagagtcctggagggacaaagggcaacactgaggtgcaaagccaggggagaccctgagcctgcaattcactggatttctcctgaagggaagcttatttcaaatgccacaagatctctggtgtatgatcacggaacacttgacattcttatcaccactgtaaaggatacaggtgcttttacctgccttgcttcccatcctgctggggaagcacacctaatagtggatcttcatataattaagatcccgatgacttactaaatagtac

SEQ ID NO: 374066 - DNA, 2551 bp, Homo sapiens
acacacactcagaggagagaggaagaattgaaagacttgagaagactttgataacctccctgctggcccttctgtgttccggaaagatcctggatgttggctaccttttcaagtcatcttggcatgtctctagtgttttgtaagccgctttccagctagctgcgtgtgtgtgtgcgcgcgcgtgtgtacgcgcgcgcctatctgatgcatttgactgtcttttatccaactgcccagaagcaaatgtgttaactcggcgatgccccttcatgcccgggttcttgcagagctctgaggacgcccagacccattttcctggctggatttggagcggctgctgggctgtggacccaggtgtgtggatcgctttacccagaagcttggaaagcgccaatattaacctgcttccaggtacatcacaaggtcaagagagtgtcttgcagccctcttgtttccgtgtatctacaccttcttctcttggccagaaggatatttacgttttggttcacagcatattgaagccaaaagttcagcccttcgaactggtttgctatacaaaacaaaacaaaacaaataaggtaatgaggattgcttattaaactgcttaacaaaatccccgactcttcctcagccctttctcggctccctcctccccaccaaaatgtcaccagctcttgaattacgtggattcgggttggaggagaacttgaaggaaacgtgattaaagggctatgcgagaacgctctctttgctgcccgcggtccggtgggcttcgaagccaatcgtgagaaggaccggttccctccgtgctgcttcctccccgtgcagtgctgggtgtgcgtgtgcgagtgtgagtgcaagtgcgcgcgcgcccgggtgcgagtgtgtgtgagtgtgagcgtgtgtctgtgtgtgcgtgcgcggccgccctgcctctgcccgctccccgggcgcggagccgcgggtttcatggggcgattgcagcgattcccccacccagagcgacctgcgggcagcggcggcagtggcaggagccgcctttccgattccctacgatgcgggtgctgagctatggcaaagggcagcgaagtgacgagcgagacccgcgtacgactgtgaaagccacctggagccaccttgccgggattgtacctgcaggcagaaagtcttcctacgaccgtcttttcccttagaggcaccagaatccctgtaaccattcatccaggtgttgagaagatatgtagcagccgagcacccatcttttgacaccgtcctctgaaatcagctttggagatgctttcactctgtccgtcttctgcagcagccaggcagagtgccgactccttcacagccgtgaggaactcttcaggctccagaagctcttaaacctgatctacaatggaaaaaattcttttttatctgtttctcattggcatagcagtgaaagctcagatctgtccaaagcgttgtgtctgtcagattttgtctcctaatcttgcaaccctttgtgccaagaaagggcttttatttgttccaccaaacattgacagaagaactgtggaactgcggttggcagacaattttgttacaaatattaaaaggaaagattttgccaatatgaccagcttggtggacctgactctatccaggaatacaataagttttattacacctcatgctttcgctgacctacgaaatttgagggctttgcatttgaatagcaacagattgactaaaattacaaatgatatgttcagtggtctttccaatcttcatcatttgatactgaacaacaatcagctgactttaatttcctctacagcgtttgatgatgtcttcgcccttgaggagctggatctgtcctataataatctagaaaccattccttgggatgctgttgagaagatggttagcttgcatacccttagtttggatcacaatatgattgataacattcctaaggggaccttctcccatttgcacaagatgactcggttagatgtgacatcaaataaattgcagaagctaccacctgaccctctctttcagcgagctcaggtactagcaacctcaggaatcataagcccatctacttttgcattaagttttggtggaaaccccttgcattgcaattgtgaattgttgtggttgaggcgtctgtccagagaagatgacttagagacctgtgcttctcctccacttttaactggccgctacttttggtcaattcctgaagaagagtttttgtgtgagcctcctctcattactcgtcatacacatgagatgagagtcctggagggacaaagggcaacactgaggtgcaaagccaggggagaccctgagcctgcaattcactggatttctcctgaagggaagcttatttcaaatgccacaagatctctggtgtatgatcacggaacacttgacattcttatcaccactgtaaaggatacaggtgcttttacctgccttgcttcccatcctgctggggaagcacacctaatagtggatcttcatataattaagatcccgatgacttactaaatagtac

SEQ ID NO: 374067 - DNA, 873 bp, Homo sapiens
  misc_feature (516)..(516): n is a, c, g, or t
  misc_feature (552)..(552): n is a, c, g, or t
  misc_feature (568)..(568): n is a, c, g, or t
  misc_feature (571)..(571): n is a, c, g, or t
  misc_feature (606)..(606): n is a, c, g, or t
  misc_feature (652)..(652): n is a, c, g, or t
  misc_feature (654)..(654): n is a, c, g, or t
  misc_feature (668)..(668): n is a, c, g, or t
  misc_feature (671)..(671): n is a, c, g, or t
  misc_feature (674)..(675): n is a, c, g, or t
  misc_feature (681)..(681): n is a, c, g, or t
  misc_feature (873)..(873): n is a, c, g, or t
ggccatctgcacggcagacggcaccatgaggcttggggagcccacctccaatgagactctgtcctgcgtcatcatctttgtcatcgtgtactacgccctgatggctggtgtggtacaccatgaggcttggggagcccacctccaatgagactctgtcctgcgtcatcatctttgtcatcgtgtactacgccctgatggctggtgtggtttggtttgtggtcctcacctatgcctggcacacttccttcaaagccctgggcaccacctaccagcctctctcgggcaagacctcctacttccacctgctcacctggtcactcccctttgtcctcactgtggcaatccttgctgtggcgcaggtggatggggactctgtgagtggcatttgttttgtgggctacaagaactaccgataccgtgcgggcttcgtgctggccccaatcggcctggtgctcatcgtggcagccttctcactcagcagcccggggtggttgtcttgatgaatcaccatggggntgggaccctgtacacgtatcctgaaaactggagggncttaaggtctcatcgntgntcagtacagggggctcaggtccgcgtgctctccgnagccacccacttccattttggccaaacaacggaccctgaattctcngnaattcctgcggganggnccnncattgngggagatggctcggggtctgaaacaccgctgcctatatgtggaagggcgcgggggagacccaagagcccgggggagggggccggggcccaattgccccacacgggggcccggtgtcccacaaaggaaggagggcgcgggggcttcaccggcagcgaaaccgggaaccaccccctggggcgacaacatggccn

SEQ ID NO: 374068 - DNA, 3999 bp, Homo sapiens
  misc_feature (4)..(4): n is a, c, g, or t
  misc_feature (6)..(8): n is a, c, g, or t
ggcncnnnggggctgaagacaacttggattgcgaggctagggcttggggagtcgtgcatcccgttccgggcctccgcagcccaacatgggccccgggttccaaagtttgcgaagttgggcgccgaggggccggggcgcgcggagcgtccgggggggcccgggcccggattctctgggcgcacaggtcgcctgagccgcctccgcggccgccgaggtcgtgcgtgtggccggggggctccgaggagcaggcgggggcgccggggcttttgctgagttggcggggttggccatggccgctgcccgcccagcgcgggggccggagctcccgctcctggggctgctgctgctgctgctgctgggggacccgggccggggggcggcctcgagcgggaacgcgaccgggcctgggcctcggagcgcgggcgggagcgcgaggaggagcgcggcggtgactggccctccgccgccgctgagccactgcggccgggctgccccctgcgagccgctgcgctacaacgtgtgcctgggctcggtgctgccctacggggccacctccacactgctggccggagactcggactcccaggaggaagcgcacggcaagctcgtgctctggtcgggcctccggaatgccccccgctgctgggcagtgatccagcccctgctgtgtgccgtatacatgcccaagtgtgagaatgaccgggtggagctgcccagccgtaccctctgccaggccacccgaggcccctgtgccatcgtggagagggagcggggctggcctgacttcctgcgctgcactcctgaccgcttccctgaaggctgcacgaatgaggtgcagaacatcaagttcaacagttcaggccagtgcgaagtgcccttggttcggacagacaaccccaagagctggtacgaggacgtggagggctgcggcatccagtgccagaacccgctcttcacagaggctgagcaccaggacatgcacagctacatcgcggccttcggggccgtcacgggcctctgcacgctcttcaccctggccacattcgtggctgactggcggaactcgaatcgctaccctgctgttattctcttctacgtcaatgcgtgcttctttgtgggcagcattggctggctggcccagttcatggatggtgcccgccgagagatcgtctgccgtgcagatggcaccatgaggcttggggagcccacctccaatgagactctgtcctgcgtcatcatctttgtcatcgtgtactacgccctgatggctggtgtggtttggtttgtggtcctcacctatgcctggcacacttccttcaaagccctgggcaccacctaccagcctctctcgggcaagacctcctacttccacctgctcacctggtcactcccctttgtcctcactgtggcaatccttgctgtggcgcaggtggatggggactctgtgagtggcatttgttttgtgggctacaagaactaccgataccgtgcgggcttcgtgctggccccaatcggcctggtgctcatcgtgggaggctacttcctcatccgaggagtcatgactctgttctccatcaagagcaaccaccccgggctgctgagtgagaaggctgccagcaagatcaacgagaccatgctgcgcctgggcatttttggcttcctggcctttggctttgtgctcattaccttcagctgccacttctacgacttcttcaaccaggctgagtgggagcgcagcttccgggactatgtgctatgtcaggccaatgtgaccatcgggctgcccaccaagcagcccatccctgactgtgagatcaagaatcgcccgagccttctggtggagaagatcaacctgtttgccatgtttggaactggcatcgccatgagcacctgggtctggaccaaggccacgctgctcatctggaggcgtacctggtgcaggttgactgggcagagtgacgatgagccaaagcggatcaagaagagcaagatgattgccaaggccttctctaagcggcacgagctcctgcagaacccaggccaggagctgtccttcagcatgcacactgtgtcccacgacgggcccgtggcgggcttggcctttgacctcaatgagccctcagctgatgtctcctctgcctgggcccagcatgtcaccaagatggtggctcggagaggagccatactgccccaggatatttctgtcacccctgtggcaactccaggtatgagagttcaagcttctggaggaaggtggggggagcacagaggctgggggcttctgggactggagtacaggggctgtcggaggaggaggaagaggaaggaaaggccccagaggatctgaagagtggggctgaggctctaagagtctagagacctgggccccagaactaacaggttaagtgctcccaggggagcgggggtggcatggacagagccagggccccaggctcgtgttgtctctcctcctgtcagtgcccccagaggaacaagccaacctgtggctggttgaggcagagatctccccagagctgcagaagcgcctgggccggaagaagaagaggaggaagaggaagaaggaggtgtgcccgctggcgccgccccctgagcttcacccccctgcccctgcccccagtaccattcctcgactgcctcagctgccccggcagaaatgcctggtggctgcaggtgcctggggagctggggactcttgccgacagggagcgtggaccctggtctccaacccattctgcccagagcccagtccccctcaggatccatttctgcccagtgcaccggcccccgtggcatgggctcatggccgccgacagggcctggggcctattcactcccgcaccaacctgatggacacagaactcatggatgcagactcggacttctgagcctgcagagcaggacctgggacaggaaagagaggaaccaataccttcaaggctcttcttcctcaccgagcatgcttccctaggatcccgtcttccagagaacctgtgggctgactgccctccgaagagagttctggatgtctggctcaaagcagcaggactgtgggaaagagcctaacatctccatggggaggcctcaccccagggacagggccctggagctcagggtccttgtttctgccctgccagctgcagcctggttggcagcatctgctccatcggggcagggggtatgcagagcttgtggtggggcaggaacggtggaggcagaggtgacagttcccagagtgggctttggtggccagggaggcagcctagcctatgtctggcagatgagggctggctgccgttttctgggctgatgggtgccctttcctggcagtctcagtccaaaagtgttgactgtgtcattagtcctttgtctaagtagggccagggcaccgtattcctctcccaggtgtttgtggggctggaaggacctgctcccacaggggccatgtcctctcttaataggtggcactaccccaaacccatcttttgttctcctatatcctccttctcctgttccatttcagttcagtttcagcggtgccaacctctttgcgtttcctttttgttgatgaggacccagagctgctgcacacactcacctctaaccccctcccctcgctgctgggccccatctccacaggagagactggttcggctctagggcctcagtctggagtgggataggagcagtgagtgacaaagcctctgaaagatgcatcatctcttcctcacacccatttagtgggggatgggtcctctagacttgaggggctaccctgggaagctgccgtagcttcagccaggcaagaaagcttccttcaacctgcatagccggtgggtgaggagattcccaccttccatagcctccaaacatgttcccaaggccccactttcaagaatcagacagcaggaagccatagatgctggctgggttccaggttatggggagaagaaatacagtcaataaaaggtttttgtataa

SEQ ID NO: 374069 - DNA, 3637 bp, Homo sapiens
  misc_feature (4)..(4): n is a, c, g, or t
  misc_feature (6)..(8): n is a, c, g, or t
ggcncnnnggggctgaagacaacttggattgcgaggctagggcttggggagtcgtgcatcccgttccgggcctccgcagcccaacatgggccccgggttccaaagtttgcgaagttgggcgccgaggggccggggcgcgcggagcgtccgggggggcccgggcccggattctctgggcgcacaggtcgcctgagccgcctccgcggccgccgaggtcgtgcgtgtggccggggggctccgaggagcaggcgggggcgccggggcttttgctgagttggcggggttggccatggccgctgcccgcccagcgcgggggccggagctcccgctcctggggctgctgctgctgctgctgctgggggacccgggccggggggcggcctcgagcgggaacgcgaccgggcctgggcctcggagcgcgggcgggagcgcgaggaggagcgcggcggtgactggccctccgccgccgctgagccactgcggccgggctgccccctgcgagccgctgcgctacaacgtgtgcctgggctcggtgctgccctacggggccacctccacactgctggccggagactcggactcccaggaggaagcgcacggcaagctcgtgctctggtcgggcctccggaatgccccccgctgctgggcagtgatccagcccctgctgtgtgccgtatacatgcccaagtgtgagaatgaccgggtggagctgcccagccgtaccctctgccaggccacccgaggcccctgtgccatcgtggagagggagcggggctggcctgacttcctgcgctgcactcctgaccgcttccctgaaggctgcacgaatgaggtgcagaacatcaagttcaacagttcaggccagtgcgaagtgcccttggttcggacagacaaccccaagagctggtacgaggacgtggagggctgcggcatccagtgccagaacccgctcttcacagaggctgagcaccaggacatgcacagctacatcgcggccttcggggccgtcacgggcctctgcacgctcttcaccctggccacattcgtggctgactggcggaactcgaatcgctaccctgctgttattctcttctacgtcaatgcgtgcttctttgtgggcagcattggctggctggcccagttcatggatggtgcccgccgagagatcgtctgccgtgcagatggcaccatgaggcttggggagcccacctccaatgagactctgtcctgcgtcatcatctttgtcatcgtgtactacgccctgatggctggtgtggtttggtttgtggtcctcacctatgcctggcacacttccttcaaagccctgggcaccacctaccagcctctctcgggcaagacctcctacttccacctgctcacctggtcactcccctttgtcctcactgtggcaatccttgctgtggcgcaggtggatggggactctgtgagtggcatttgttttgtgggctacaagaactaccgataccgtgcgggcttcgtgctggccccaatcggcctggtgctcatcgtgggaggctacttcctcatccgaggagtcatgactctgttctccatcaagagcaaccaccccgggctgctgagtgagaaggctgccagcaagatcaacgagaccatgctgcgcctggatgtcaggccaatgtgaccatcgggctgcccaccaagcagcccatccctgactgtgagatcaagaatcgcccgagccttctggtggagaagatcaacctgtttgccatgtttggaactggcatcgccatgagcacctgggtctggaccaaggccacgctgctcatctggaggcgtacctggtgcaggttgactgggcagagtgacgatgagccaaagcggatcaagaagagcaagatgattgccaaggccttctctaagcggcacgagctcctgcagaacccaggccaggagctgtccttcagcatgcacactgtgtcccacgacgggcccgtggcgggcttggcctttgacctcaatgagccctcagctgatgtctcctctgcctgggcccagcatgtcaccaagatggtggctcggagaggagccatactgccccaggatatttctgtcacccctgtggcaactccagtgcccccagaggaacaagccaacctgtggctggttgaggcagagatctccccagagctgcagaagcgcctgggccggaagaagaagaggaggaagaggaagaaggaggtgtgcccgctggcgccgccccctgagcttcacccccctgcccctgcccccagtaccattcctcgactgcctcagctgccccggcagaaatgcctggtggctgcaggtgcctggggagctggggactcttgccgacagggagcgtggaccctggtctccaacccattctgcccagagcccagtccccctcaggatccatttctgcccagtgcaccggcccccgtggcatgggctcatggccgccgacagggcctggggcctattcactcccgcaccaacctgatggacacagaactcatggatgcagactcggacttctgagcctgcagagcaggacctgggacaggaaagagaggaaccaataccttcaaggctcttcttcctcaccgagcatgcttccctaggatcccgtcttccagagaacctgtgggctgactgccctccgaagagagttctggatgtctggctcaaagcagcaggactgtgggaaagagcctaacatctccatggggaggcctcaccccagggacagggccctggagctcagggtccttgtttctgccctgccagctgcagcctggttggcagcatctgctccatcggggcagggggtatgcagagcttgtggtggggcaggaacggtggaggcagaggtgacagttcccagagtgggctttggtggccagggaggcagcctagcctatgtctggcagatgagggctggctgccgttttctgggctgatgggtgccctttcctggcagtctcagtccaaaagtgttgactgtgtcattagtcctttgtctaagtagggccagggcaccgtattcctctcccaggtgtttgtggggctggaaggacctgctcccacaggggccatgtcctctcttaataggtggcactaccccaaacccatcttttgttctcctatatcctccttctcctgttccatttcagttcagtttcagcggtgccaacctctttgcgtttcctttttgttgatgaggacccagagctgctgcacacactcacctctaaccccctcccctcgctgctgggccccatctccacaggagagactggttcggctctagggcctcagtctggagtgggataggagcagtgagtgacaaagcctctgaaagatgcatcatctcttcctcacacccatttagtgggggatgggtcctctagacttgaggggctaccctgggaagctgccgtagcttcagccaggcaagaaagcttccttcaacctgcatagccggtgggtgaggagattcccaccttccatagcctccaaacatgttcccaaggccccactttcaagaatcagacagcaggaagccatagatgctggctgggttccaggttatggggagaagaaatacagtcaataaaaggtttttgtataa

SEQ ID NO: 374070 - DNA, 3874 bp, Homo sapiens
  misc_feature (4)..(4): n is a, c, g, or t
  misc_feature (6)..(8): n is a, c, g, or t
ggcncnnnggggctgaagacaacttggattgcgaggctagggcttggggagtcgtgcatcccgttccgggcctccgcagcccaacatgggccccgggttccaaagtttgcgaagttgggcgccgaggggccggggcgcgcggagcgtccgggggggcccgggcccggattctctgggcgcacaggtcgcctgagccgcctccgcggccgccgaggtcgtgcgtgtggccggggggctccgaggagcaggcgggggcgccggggcttttgctgagttggcggggttggccatggccgctgcccgcccagcgcgggggccggagctcccgctcctggggctgctgctgctgctgctgctgggggacccgggccggggggcggcctcgagcgggaacgcgaccgggcctgggcctcggagcgcgggcgggagcgcgaggaggagcgcggcggtgactggccctccgccgccgctgagccactgcggccgggctgccccctgcgagccgctgcgctacaacgtgtgcctgggctcggtgctgccctacggggccacctccacactgctggccggagactcggactcccaggaggaagcgcacggcaagctcgtgctctggtcgggcctccggaatgccccccgctgctgggcagtgatccagcccctgctgtgtgccgtatacatgcccaagtgtgagaatgaccgggtggagctgcccagccgtaccctctgccaggccacccgaggcccctgtgccatcgtggagagggagcggggctggcctgacttcctgcgctgcactcctgaccgcttccctgaaggctgcacgaatgaggtgcagaacatcaagttcaacagttcaggccagtgcgaagtgcccttggttcggacagacaaccccaagagctggtacgaggacgtggagggctgcggcatccagtgccagaacccgctcttcacagaggctgagcaccaggacatgcacagctacatcgcggccttcggggccgtcacgggcctctgcacgctcttcaccctggccacattcgtggctgactggcggaactcgaatcgctaccctgctgttattctcttctacgtcaatgcgtgcttctttgtgggcagcattggctggctggcccagttcatggatggtgcccgccgagagatcgtctgccgtgcagatggcaccatgaggcttggggagcccacctccaatgagactctgtcctgcgtcatcatctttgtcatcgtgtactacgccctgatggctggtgtggtttggtttgtggtcctcacctatgcctggcacacttccttcaaagccctgggcaccacctaccagcctctctcgggcaagacctcctacttccacctgctcacctggtcactcccctttgtcctcactgtggcaatccttgctgtggcgcaggtggatggggactctgtgagtggcatttgttttgtgggctacaagaactaccgataccgtgcgggcttcgtgctggccccaatcggcctggtgctcatcgtgggaggctacttcctcatccgaggagtcatgactctgttctccatcaagagcaaccaccccgggctgctgagtgagaaggctgccagcaagatcaacgagaccatgctgcgcctgggcatttttggcttcctggcctttggctttgtgctcattaccttcagctgccacttctacgacttcttcaaccaggctgagtgggagcgcagcttccgggactatgtgctatgtcaggccaatgtgaccatcgggctgcccaccaagcagcccatccctgactgtgagatcaagaatcgcccgagccttctggtggagaagatcaacctgtttgccatgtttggaactggcatcgccatgagcacctgggtctggaccaaggccacgctgctcatctggaggcgtacctggtgcaggttgactgggcagagtgacgatgagccaaagcggatcaagaagagcaagatgattgccaaggccttctctaagcggcacgagctcctgcagaacccaggccaggagctgtccttcagcatgcacactgtgtcccacgacgggcccgtggttgctctccctgggcaagagtaagtcagggttccaagaactggatttctggcctccagttaggccctttggggacgtgaggcccttctcttcagattctgaaggggtagagatcaccgtggttacaggcgggcttggcctttgacctcaatgagccctcagctgatgtctcctctgcctgggcccagcatgtcaccaagatggtggctcggagaggagccatactgccccaggatatttctgtcacccctgtggcaactccagtgcccccagaggaacaagccaacctgtggctggttgaggcagagatctccccagagctgcagaagcgcctgggccggaagaagaagaggaggaagaggaagaaggaggtgtgcccgctggcgccgccccctgagcttcacccccctgcccctgcccccagtaccattcctcgactgcctcagctgccccggcagaaatgcctggtggctgcaggtgcctggggagctggggactcttgccgacagggagcgtggaccctggtctccaacccattctgcccagagcccagtccccctcaggatccatttctgcccagtgcaccggcccccgtggcatgggctcatggccgccgacagggcctggggcctattcactcccgcaccaacctgatggacacagaactcatggatgcagactcggacttctgagcctgcagagcaggacctgggacaggaaagagaggaaccaataccttcaaggctcttcttcctcaccgagcatgcttccctaggatcccgtcttccagagaacctgtgggctgactgccctccgaagagagttctggatgtctggctcaaagcagcaggactgtgggaaagagcctaacatctccatggggaggcctcaccccagggacagggccctggagctcagggtccttgtttctgccctgccagctgcagcctggttggcagcatctgctccatcggggcagggggtatgcagagcttgtggtggggcaggaacggtggaggcagaggtgacagttcccagagtgggctttggtggccagggaggcagcctagcctatgtctggcagatgagggctggctgccgttttctgggctgatgggtgccctttcctggcagtctcagtccaaaagtgttgactgtgtcattagtcctttgtctaagtagggccagggcaccgtattcctctcccaggtgtttgtggggctggaaggacctgctcccacaggggccatgtcctctcttaataggtggcactaccccaaacccatcttttgttctcctatatcctccttctcctgttccatttcagttcagtttcagcggtgccaacctctttgcgtttcctttttgttgatgaggacccagagctgctgcacacactcacctctaaccccctcccctcgctgctgggccccatctccacaggagagactggttcggctctagggcctcagtctggagtgggataggagcagtgagtgacaaagcctctgaaagatgcatcatctcttcctcacacccatttagtgggggatgggtcctctagacttgaggggctaccctgggaagctgccgtagcttcagccaggcaagaaagcttccttcaacctgcatagccggtgggtgaggagattcccaccttccatagcctccaaacatgttcccaaggccccactttcaagaatcagacagcaggaagccatagatgctggctgggttccaggttatggggagaagaaatacagtcaataaaaggtttttgtataa

SEQ ID NO: 374071 - DNA, 3746 bp, Homo sapiens
  misc_feature (4)..(4): n is a, c, g, or t
  misc_feature (6)..(8): n is a, c, g, or t
ggcncnnnggggctgaagacaacttggattgcgaggctagggcttggggagtcgtgcatcccgttccgggcctccgcagcccaacatgggccccgggttccaaagtttgcgaagttgggcgccgaggggccggggcgcgcggagcgtccgggggggcccgggcccggattctctgggcgcacaggtcgcctgagccgcctccgcggccgccgaggtcgtgcgtgtggccggggggctccgaggagcaggcgggggcgccggggcttttgctgagttggcggggttggccatggccgctgcccgcccagcgcgggggccggagctcccgctcctggggctgctgctgctgctgctgctgggggacccgggccggggggcggcctcgagcgggaacgcgaccgggcctgggcctcggagcgcgggcgggagcgcgaggaggagcgcggcggtgactggccctccgccgccgctgagccactgcggccgggctgccccctgcgagccgctgcgctacaacgtgtgcctgggctcggtgctgccctacggggccacctccacactgctggccggagactcggactcccaggaggaagcgcacggcaagctcgtgctctggtcgggcctccggaatgccccccgctgctgggcagtgatccagcccctgctgtgtgccgtatacatgcccaagtgtgagaatgaccgggtggagctgcccagccgtaccctctgccaggccacccgaggcccctgtgccatcgtggagagggagcggggctggcctgacttcctgcgctgcactcctgaccgcttccctgaaggctgcacgaatgaggtgcagaacatcaagttcaacagttcaggccagtgcgaagtgcccttggttcggacagacaaccccaagagctggtacgaggacgtggagggctgcggcatccagtgccagaacccgctcttcacagaggctgagcaccaggacatgcacagctacatcgcggccttcggggccgtcacgggcctctgcacgctcttcaccctggccacattcgtggctgactggcggaactcgaatcgctaccctgctgttattctcttctacgtcaatgcgtgcttctttgtgggcagcattggctggctggcccagttcatggatggtgcccgccgagagatcgtctgccgtgcagatggcaccatgaggcttggggagcccacctccaatgagactctgtcctgcgtcatcatctttgtcatcgtgtactacgccctgatggctggtgtggtttggtttgtggtcctcacctatgcctggcacacttccttcaaagccctgggcaccacctaccagcctctctcgggcaagacctcctacttccacctgctcacctggtcactcccctttgtcctcactgtggcaatccttgctgtggcgcaggtggatggggactctgtgagtggcatttgttttgtgggctacaagaactaccgataccgtgcgggcttcgtgctggccccaatcggcctggtgctcatcgtgggaggctacttcctcatccgaggagtcatgactctgttctccatcaagagcaaccaccccgggctgctgagtgagaaggctgccagcaagatcaacgagaccatgctgcgcctgggcatttttggcttcctggcctttggctttgtgctcattaccttcagctgccacttctacgacttcttcaaccaggctgagtgggagcgcagcttccgggactatgtgctatgtcaggccaatgtgaccatcgggctgcccaccaagcagcccatccctgactgtgagatcaagaatcgcccgagccttctggtggagaagatcaacctgtttgccatgtttggaactggcatcgccatgagcacctgggtctggaccaaggccacgctgctcatctggaggcgtacctggtgcaggttgactgggcagagtgacgatgagccaaagcggatcaagaagagcaagatgattgccaaggccttctctaagcggcacgagctcctgcagaacccaggccaggagctgtccttcagcatgcacactgtgtcccacgacgggcccgtggcgggcttggcctttgacctcaatgagccctcagctgatgtctcctctgcctgggcccagcatgtcaccaagatggtggctcggagaggagccatactgccccaggatatttctgtcacccctgtggcaactccagtgcccccagaggaacaagccaacctgtggctggttgaggcagagatctccccagagctgcagaagcgcctgggccggaagaagaagaggaggaagaggaagaaggaggtgtgcccgctggcgccgccccctgagcttcacccccctgcccctgcccccagtaccattcctcgactgcctcagctgccccggcagaaatgcctggtggctgcaggtgcctggggagctggggactcttgccgacagggagcgtggaccctggtctccaacccattctgcccagagcccagtccccctcaggatccatttctgcccagtgcaccggcccccgtggcatgggctcatggccgccgacagggcctggggcctattcactcccgcaccaacctgatggacacagaactcatggatgcagactcggacttctgagcctgcagagcaggacctgggacaggaaagagaggaaccaataccttcaaggctcttcttcctcaccgagcatgcttccctaggatcccgtcttccagagaacctgtgggctgactgccctccgaagagagttctggatgtctggctcaaagcagcaggactgtgggaaagagcctaacatctccatggggaggcctcaccccagggacagggccctggagctcagggtccttgtttctgccctgccagctgcagcctggttggcagcatctgctccatcggggcagggggtatgcagagcttgtggtggggcaggaacggtggaggcagaggtgacagttcccagagtgggctttggtggccagggaggcagcctagcctatgtctggcagatgagggctggctgccgttttctgggctgatgggtgccctttcctggcagtctcagtccaaaagtgttgactgtgtcattagtcctttgtctaagtagggccagggcaccgtattcctctcccaggtgtttgtggggctggaaggacctgctcccacaggggccatgtcctctcttaataggtggcactaccccaaacccatcttttgttctcctatatcctccttctcctgttccatttcagttcagtttcagcggtgccaacctctttgcgtttcctttttgttgatgaggacccagagctgctgcacacactcacctctaaccccctcccctcgctgctgggccccatctccacaggagagactggttcggctctagggcctcagtctggagtgggataggagcagtgagtgacaaagcctctgaaagatgcatcatctcttcctcacacccatttagtgggggatgggtcctctagacttgaggggctaccctgggaagctgccgtagcttcagccaggcaagaaagcttccttcaacctgcatagccggtgggtgaggagattcccaccttccatagcctccaaacatgttcccaaggccccactttcaagaatcagacagcaggaagccatagatgctggctgggttccaggttatggggagaagaaatacagtcaataaaaggtttttgtataa

SEQ ID NO: 374072 - DNA, 3541 bp, Homo sapiens
gcgagctagagcaacaaaggagccgggtcgccggcggggagagttcggggggctgcggcgcgctggggcgaaggtggctgctgggccgcgggctggcgcgggggcggagccggaactcggactcccaggaggaagcgcacggcaagctcgtgctctggtcgggcctccggaatgccccccgctgctgggcagtgatccagcccctgctgtgtgccgtatacatgcccaagtgtgagaatgaccgggtggagctgcccagccgtaccctctgccaggccacccgaggcccctgtgccatcgtggagagggagcggggctggcctgacttcctgcgctgcactcctgaccgcttccctgaaggctgcacgaatgaggtgcagaacatcaagttcaacagttcaggccagtgcgaagtgcccttggttcggacagacaaccccaagagctggtacgaggacgtggagggctgcggcatccagtgccagaacccgctcttcacagaggctgagcaccaggacatgcacagctacatcgcggccttcggggccgtcacgggcctctgcacgctcttcaccctggccacattcgtggctgactggcggaactcgaatcgctaccctgctgttattctcttctacgtcaatgcgtgcttctttgtgggcagcattggctggctggcccagttcatggatggtgcccgccgagagatcgtctgccgtgcagatggcaccatgaggcttggggagcccacctccaatgagactctgtcctgcgtcatcatctttgtcatcgtgtactacgccctgatggctggtgtggtttggtttgtggtcctcacctatgcctggcacacttccttcaaagccctgggcaccacctaccagcctctctcgggcaagacctcctacttccacctgctcacctggtcactcccctttgtcctcactgtggcaatccttgctgtggcgcaggtggatggggactctgtgagtggcatttgttttgtgggctacaagaactaccgataccgtgcgggcttcgtgctggccccaatcggcctggtgctcatcgtgggaggctacttcctcatccgaggagtcatgactctgttctccatcaagagcaaccaccccgggctgctgagtgagaaggctgccagcaagatcaacgagaccatgctgcgcctgggcatttttggcttcctggcctttggctttgtgctcattaccttcagctgccacttctacgacttcttcaaccaggctgagtgggagcgcagcttccgggactatgtgctatgtcaggccaatgtgaccatcgggctgcccaccaagcagcccatccctgactgtgagatcaagaatcgcccgagccttctggtggagaagatcaacctgtttgccatgtttggaactggcatcgccatgagcacctgggtctggaccaaggccacgctgctcatctggaggcgtacctggtgcaggttgactgggcagagtgacgatgagccaaagcggatcaagaagagcaagatgattgccaaggccttctctaagcggcacgagctcctgcagaacccaggccaggagctgtccttcagcatgcacactgtgtcccacgacgggcccgtggcgggcttggcctttgacctcaatgagccctcagctgatgtctcctctgcctgggcccagcatgtcaccaagatggtggctcggagaggagccatactgccccaggatatttctgtcacccctgtggcaactccaggtatgagagttcaagcttctggaggaaggtggggggagcacagaggctgggggcttctgggactggagtacaggggctgtcggaggaggaggaagaggaaggaaaggccccagaggatctgaagagtggggctgaggctctaagagtctagagacctgggccccagaactaacaggttaagtgctcccaggggagcgggggtggcatggacagagccagggccccaggctcgtgttgtctctcctcctgtcagtgcccccagaggaacaagccaacctgtggctggttgaggcagagatctccccagagctgcagaagcgcctgggccggaagaagaagaggaggaagaggaagaaggaggtgtgcccgctggcgccgccccctgagcttcacccccctgcccctgcccccagtaccattcctcgactgcctcagctgccccggcagaaatgcctggtggctgcaggtgcctggggagctggggactcttgccgacagggagcgtggaccctggtctccaacccattctgcccagagcccagtccccctcaggatccatttctgcccagtgcaccggcccccgtggcatgggctcatggccgccgacagggcctggggcctattcactcccgcaccaacctgatggacacagaactcatggatgcagactcggacttctgagcctgcagagcaggacctgggacaggaaagagaggaaccaataccttcaaggctcttcttcctcaccgagcatgcttccctaggatcccgtcttccagagaacctgtgggctgactgccctccgaagagagttctggatgtctggctcaaagcagcaggactgtgggaaagagcctaacatctccatggggaggcctcaccccagggacagggccctggagctcagggtccttgtttctgccctgccagctgcagcctggttggcagcatctgctccatcggggcagggggtatgcagagcttgtggtggggcaggaacggtggaggcagaggtgacagttcccagagtgggctttggtggccagggaggcagcctagcctatgtctggcagatgagggctggctgccgttttctgggctgatgggtgccctttcctggcagtctcagtccaaaagtgttgactgtgtcattagtcctttgtctaagtagggccagggcaccgtattcctctcccaggtgtttgtggggctggaaggacctgctcccacaggggccatgtcctctcttaataggtggcactaccccaaacccatcttttgttctcctatatcctccttctcctgttccatttcagttcagtttcagcggtgccaacctctttgcgtttcctttttgttgatgaggacccagagctgctgcacacactcacctctaaccccctcccctcgctgctgggccccatctccacaggagagactggttcggctctagggcctcagtctggagtgggataggagcagtgagtgacaaagcctctgaaagatgcatcatctcttcctcacacccatttagtgggggatgggtcctctagacttgaggggctaccctgggaagctgccgtagcttcagccaggcaagaaagcttccttcaacctgcatagccggtgggtgaggagattcccaccttccatagcctccaaacatgttcccaaggccccactttcaagaatcagacagcaggaagccatagatgctggctgggttccaggttatggggagaagaaatacagtcaataaaaggtttttgtataa

SEQ ID NO: 374073 - DNA, 3679 bp, Homo sapiens
  misc_feature (4)..(4): n is a, c, g, or t
  misc_feature (6)..(8): n is a, c, g, or t
ggcncnnnggggctgaagacaacttggattgcgaggctagggcttggggagtcgtgcatcccgttccgggcctccgcagcccaacatgggccccgggttccaaagtttgcgaagttgggcgccgaggggccggggcgcgcggagcgtccgggggggcccgggcccggattctctgggcgcacaggtcgcctgagccgcctccgcggccgccgaggtcgtgcgtgtggccggggggctccgaggagcaggcgggggcgccggggcttttgctgagttggcggggttggccatggccgctgcccgcccagcgcgggggccggagctcccgctcctggggctgctgctgctgctgctgctgggggacccgggccggggggcggcctcgagcgggaacgcgaccgggcctgggcctcggagcgcgggcgggagcgcgaggaggagcgcggcggtgactggccctccgccgccgctgagccactgcggccgggctgccccctgcgagccgctgcgctacaacgtgtgcctgggctcggtgctgccctacggggccacctccacactgctggccggagactcggactcccaggaggaagcgcacggcaagctcgtgctctggtcgggcctccggaatgccccccgctgctgggcagtgatccagcccctgctgtgtgccgtatacatgcccaagtgtgagaatgaccgggtggagctgcccagccgtaccctctgccaggccacccgaggcccctgtgccatcgtggagagggagcggggctggcctgacttcctgcgctgcactcctgaccgcttccctgaaggctgcacgaatgaggtgcagaacatcaagttcaacagttcaggccagtgcgaagtgcccttggttcggacagacaaccccaagagctggtacgaggacgtggagggctgcggcatccagtgccagaacccgctcttcacagaggctgagcaccaggacatgcacagctacatcgcggccttcggggccgtcacgggcctctgcacgctcttcaccctggccacattcgtggctgactggcggaactcgaatcgctaccctgctgttattctcttctacgtcaatgcgtgcttctttgtgggcagcattggctggctggcccagttcatggatggtgcccgccgagagatcgtctgccgtgcagatggcaccatgaggcttggggagcccacctccaatgagactctgtcctgcgtcatcatctttgtcatcgtgtactacgccctgatggctggtgtggtttggtttgtggtcctcacctatgcctggcacacttccttcaaagccctgggcaccacctaccagcctctctcgggcaagacctcctacttccacctgctcacctggtcactcccctttgtcctcactgtggcaatccttgctgtggcgcaggtggatggggactctgtgagtggcatttgttttgtgggctacaagaactaccgataccgtgcgggcttcgtgctggccccaatcggcctggtgctcatcgtgggaggctacttcctcatccgaggagtcatgactctgttctccatcaagagcaaccaccccgggctgctgagtgagaaggctgccagcaagatcaacgagaccatgctgcgcctgggcatttttggcttcctggcctttggctttgtgctcattaccttcagctgccacttctacgacttcttcaaccaggctgagtgggagcgcagcttccgggactatgtgctatgtcaggccaatgtgaccatcgggctgcccaccaagcagcccatccctgactgtgagatcaagaatcgcccgagccttctggtggagaagatcaacctgtttgccatgtttggaactggcatcgccatgagcacctgggtctggaccaaggccacgctgctcatctggaggcgtacctggtgcaggttgactgggcagagtgacgatgagccaaagcggatcaagaagagcaagatgattgccaaggccttctctaagcggcacgagctcctgcagaacccaggccaggagctgtccttcagcatgcacactgtgtcccacgacgggcccgtggcgggcttggcctttgacctcaatgagccctcagctgatgtctcctctgcctgggcccagcatgtcaccaagatggtggctcggagaggagccatactgccccaggatatttctgtcacccctgtggcaactccagtgcccccagaggaacaagccaacctgtggctggttgaggcagagatctccccagagctgcagaagcgcctgggccggaagaagaagaggaggaagaggaagaaggaggtgtgcccgctggcgccgccccctgagcttcacccccctgcccctgcccccagtaccattcctcgactgcctcagctgccccggcagaaatgcctggtggctgcaggtgcctggggagctggggactcttgccgacagggagcgtggaccctggtctccaacccattctgcccagagcccagtccccctcaggatccatttctgcccagtgcaccggcccccgtggcatgggctcatggccgccgacagggcctggggcctattcactcccgcaccaacctgatggacacagaactcatggatgcagactcggacttctgagcctgcagagcaggacctgggacaggaaagagaggaaccaataccttcaaggctcttcttcctcaccgagcatgcttccctaggatcccgtcttccagagaacctgtgggctgactgccctccgaagagagttctggatgtctggctcaaagcagcaggactgtgggaaagagcctaacatctccatggggaggcctcaccccagggacagggccctggagctcagggtccttgtttctgccctgccagctgcagcctggttggcagcatctgctccatcggggcagggggtatgcagagcttgtggtggggcaggaacggtggaggcagaggtgacagttcccagagtgggctttggtggccagggaggcagcctagcctatgtctggcagatgagggctggctgccgttttctgggctgatgggtgccctttcctggcagtctcagtccaaaagtgttgactgtgtcattagtcctttgtctaagtagggccagggcaccgtattcctctcccaggtgtttgtggggctggaaggacctgctcccacaggggccatgtcctctcttaataggtggcactaccccaacctctttgcgtttcctttttgttgatgaggacccagagctgctgcacacactcacctctaaccccctcccctcgctgctgggccccatctccacaggagagactggttcggctctagggcctcagtctggagtgggataggagcagtgagtgacaaagcctctgaaagatgcatcatctcttcctcacacccatttagtgggggatgggtcctctagacttgaggggctaccctgggaagctgccgtagcttcagccaggcaagaaagcttccttcaacctgcatagccggtgggtgaggagattcccaccttccatagcctccaaacatgttcccaaggccccactttcaagaatcagacagcaggaagccatagatgctggctgggttccaggttatggggagaagaaatacagtcaataaaaggtttttgtataa

SEQ ID NO: 374074 - DNA, 380 bp, Homo sapiens
cagattaagtgtctggtgagagtctacttaccgatttcataaacagccattttttctctgtgtcctcacgtggtggaagggacaagggacctctcttcaggcctctttcataagggcactaatctctttcatgaggccagatccctcatgacctaatcacctgctaaaggccccacctccaaataccatcatcctggaggtcaggattttaacaaatgaattctggagggatatagacatttagaccctagcacatactgatataacatcaaatggtgatagatcagtatccgtagtctccttttatatacttgaatacagtagagtctcctcaaatacacttaaatcataaaaactcaactgtatatgcttggaacaaa

SEQ ID NO: 374075 - DNA, 498 bp, Homo sapiens
tttaatatttaattcatttaatccttacagaaaccctgtgacataggtactataatgattcccactttaaatataagaaaactgagacccaaagaggctaagcgacttgtccaaggtcacgctgctagcatgtggcttctggctcaagtccacagccctaacactacaatctgctgcttctctataggatatttctacccagctctcagacattttggacaatgtcaattgtgtcatcaaccgcttccaggaagaattaggatatgatttaaaagaaaatgccaaatctcagcagagagatccaaagggcaagaagagattcatcttgctggaaaaaattgcctccttctccaaagatgctatgatgaaggagaagcacctgtatgacattctccgctggctgggtgactggggtgagtttgcaggctgggcaccgtgcctcctctgggaggggagtgtgggtggcgagcacagggacagcacaggacacatcccctt

SEQ ID NO: 374076 - DNA, 3120 bp, Homo sapiens
ctggtgtttggcagttaccagaggagctgtgcctgggcagagggtacccaggagacaccctggtgcccttaacctccaaagcaggcaacattgtgtgtccaggcctgtggaccagaaacacaggatgttttgtgactgacagagtgatccaaaatggagaaggatgaccccccacagttggtgactcccacatcagtgaaagccatcatcctgaggattgaggctgcccagctaactcgggctcaagaggatatttctacccagctctcagacattttggacaatgtcaattgtgtcatcaaccgcttccaggaagaattaggatatgatttaaaagaaaatgccaaatctcagcagagagatccaaagggcaagaagagattcatcttgctggaaaaaattgcctccttctccaaagatgctatgatgaaggagaagcacctgtatgacattctccgctggctgggtgactggggtgacactctgacctatgagattgggcccaggaagagtgaagaggaagcagcagctctggacgaatggattgaagtgacggagaaagtgttaccgctgtccctcattgccaccaaaagaggcatcgagtcactcactgccctttgctccactctcattgaaggacaaaagaaaaggtcacaagtgtccaaacgcaccttctggcagggctggcagggaagaagcccacagacatctccatcccatcctcagccactaagcccagaacagatgctccaggaccagcataccatgaacacgaaggcctcggaggtgacgtccatgctgcaggagctcctggactctaccatgttcagcaagggggaggtcagggccatcaggtacatggccactgtggtggagaacctcaacaaggccttgatcctccaacacaaggagaacaggagcctggagaccaaatacaggcacctgcaaatgcaggcgaccaaagagctcagcagccagaggctgcacttccagcagttcatggaggtccttgagagcaggagggatgctctgctgaagcaggtagagatcttagggggaaggtaccatgaccttctcctgatgaagcaggccttggagttccagctgaagaaggctcagaatgctacaggtcaggcagaagacctggctgaggtttctgttgactccccaggtccctctgagagagagaccctcccaaggaaagaaacagtcatggaggaaagccaacaggaaccgatgaaggaggagcagttgttctcgccacttcccccaagtcccatggccatgatacgggacagtggtgctatagctgcagggcaccagccactttccaccatgactgtgcgctcgagggtcgcagatgtgttcggcagcaaggacactgagagccttgagcctgtgcttttacccttagtagatcgcaggtttcctaagaaatgggaaagaccggtggcagaaagcttaggccacaaagacaaagaccaggaggactacttccagaagggaggactccaaattaagttccactgtagcaagcagctgtctctagagagctccaggcaggtgacctctgagagccaagaggagccctgggaggaggaattcggccgggagatgcggaggcagctgtggctggaggaggaggagatgtggcagcagcggcagaagaagtgggccctgctggagcaggagcatcaggagaagctgcggcagtggaatctggaagacctggccagggagcaacagcggagatgggtccagctagaaaaggagcaggagagcccacggagagagccagagcagctaggggaggatgtggagaggaggatcttcacacccaccagtcgatggagggacttggagaaggcagagctatcattagtgcctgccccaagccggacccaatctgctcaccaaagcaggaggccacacttgcccatgtctcctagtacccagcagcctgccctgggaaagcagagacctatgagttcagtggagtttacctacagaccacggacccgccgagttcccacaaagcccaagaaatctgcctcctttcctgtcactgggacatccatccgaaggctgacctggccctctttgcagatatcccctgcaaatattaagaagaaggtgtaccacatggacatggaggcccagaggaagaacctgcagctcctgagtgaggagtctgagttgaggctgccccactacctgcgcagcaaagcactggagctcaccaccaccaccatggagctgggcgcgctcaggctgcagtacctgtgccataagtacatcttctatagacgcctccagagcctccggcaagaagcgatcaaccatgtacaaatcatgaaagaaacggaggcttcctacaaggcccagaacctctacatcttcctggaaaacattgaccgcctgcagagtctcaggctgcaggcctggacggacaagcagaaggggctggaggagaagcaccgagagtgcctgagcagcatggtgaccatgttccccaagctccagctggagtggaacgttcacctgaacatccctgaggtcacctcgccaaagccaaagaaatgcaagttgcctgcagcctcaccccggcacatccgccccagtggccccacctacaagcagccctttctgtctaggcaccgggcatgtgtgcccctgcagatggcccgccaacaggggaagcagatggaggctgtctggaagaccgaggtggcctcctccagttacgcaatagaaaaaaagacccctgccagccttccccgggaccagctgaggggacacccagatattccccggctgttgacactggacgtgtagtcctcctgccacaaaagcctgaacttcctgaaggcccagtaaggctcttggcactgtgcttaaggggcctggtggctgaacttgctctggtgatggaggactttgaccttctgcacgtcctctagcgagctctctggcaagcatgcagagtgtctgacattcttctcctgctttggtaacaatttcatcttcttaaaggcaaagaaagcctgcacgggccaagctgtgaagccaagagggttggaagacaaatatatatgtgtgtgtatctttgtgtatatatgt

SEQ ID NO: 374077 - DNA, 2929 bp, Homo sapiens
ctggtgtttggcagttaccagaggagctgtgcctgggcagagggtacccaggagacaccctggtgcccttaacctccaaagcaggcaacattgtgtgtccaggcctgtggaccagaaacacaggatgttttgtgactgacagagtgatccaaaatggagaaggatgaccccccacagttggtgactcccacatcagtgaaagccatcatcctgaggattgaggctgcccagctaactcgggctcaagaggatatttctacccagctctcagacattttggacaatgtcaattgtgtcatcaaccgcttccaggaagaattaggatatgatttaaaagaaaatgccaaatctcagcagagagatccaaagggcaagaagagattcatcttgctggaaaaaattgcctccttctccaaagatgctatgatgaaggagaagcacctgtatgacattctccgctggctgggtgactggggtgacactctgacctatgagattgggcccaggaagagtgaagaggaagcagcagctctggacgaatggattgaagtgacggagaaagtgttaccgctgtccctcattgccaccaaaagaggcatcgagtcactcactgccctttgctccactctcattgaaggacaaaagaaaaggtcacaagtgtccaaacgcaccttctggcagggctggcagggaagaagcccacagacatctccatcccatcctcagccactaagcccagaacagatgctccaggaccagcataccatgaacacgaaggcctcggaggtgacgtccatgctgcaggagctcctggactctaccatgttcagcaagggggaggtcagggccatcaggtacatggccactgtggtggagaacctcaacaaggccttgatcctccaacacaaggagaacaggagcctggagaccaaatacaggcacctgcaaatgcaggcgaccaaagagctcagcagccagaggctgcacttccagcagttcatggaggtccttgagagcaggagggatgctctgctgaagcaggtagagatcttagggggaaggtaccatgaccttctcctgatgaagcaggccttggagttccagctgaagaaggctcagaatgctacaggtcaggcagaagacctggctgaggtttctgttgactccccaggtccctctgagagagagaccctcccaaggaaagaaacagtcatggaggaaagccaacaggaaccgatgaaggaggagcagttgttctcgccacttcccccaagtcccatggccatgatacgggacagtggtgctatagctgcagggcaccagccactttccaccatgactgtgcgctcgagggtcgcagatgtgttcggcagcaaggacactgagagccttgagcctgtgcttttacccttagtagatcgcaggtttcctaagaaatgggaaagaccggtggcagaaagcttaggccacaaagacaaagaccaggaggactacttccagaagggaggactccaaattaagttccactgtagcaagcagctgtctctagagagctccaggcaggtgacctctgagagccaagaggagccctgggaggaggaattcggccgggagatgcggaggcagctgtggctggaggaggaggagatgtggcagcagcggcagaagaagtgggccctgctggagcaggagcatcaggagaagctgcggcagtggaatctggaagacctggccagggagcaacagcggagatgggtccagctagaaaaggagcaggagagcccacggagagagccagagcagctaggggaggatgtggagaggaggatcttcacacccaccagtcgatggagggacttggagaaggcagagctatcattagtgcctgccccaagccggacccaatctgctcaccaaagcaggaggccacacttgcccatgtctcctagtacccagcagcctgccctgggaaagcagagacctatgagttcagtggagtttacctacagaccacggacccgccgagttcccacaaagcccaagaaatctgcctcctttcctgtcactgggacatccatccgaaggctgacctggccctctttgcagatatcccctgcaaatattaagaagaaggtgtaccacatggacatggaggcccagaggaagaacctgcagctcctgagtgaggagtctgagttgaggctgccccactacctgcgcagcaaagcactggagctcaccaccaccaccatggagctgggcgcgctcaggctgcagtacctgtgccataagtacatcttctatagacgcctccagagcctccggcaagaagcgatcaaccatgtacaaatcatgaaagaaacggaggcttcctacaaggcccagaacctctacatcttcctggaaaacattgaccgcctgcagagtctcaggctgcaggcctggacggacaagcagaaggggctggaggagaagcaccgagagtgcctgagcagcatggtgaccatgttccccaagctccagctggagtggaacgttcacctgaacatccctgaggtcacctcgccaaagccaaagaaatgcaagttgcctgcagcctcaccccggcacatccgccccagtggccccacctacaagcagccctttctgtctaggcaccgggcatgtgtgcccctgcagatggcccggctcttggcactgtgcttaaggggcctggtggctgaacttgctctggtgatggaggactttgaccttctgcacgtcctctagcgagctctctggcaagcatgcagagtgtctgacattcttctcctgctttggtaacaatttcatcttcttaaaggcaaagaaagcctgcacgggccaagctgtgaagccaagagggttggaagacaaatatatatgtgtgtgtatctttgtgtatatatgt

SEQ ID NO: 374078 - DNA, 2926 bp, Homo sapiens
gctgtacagacaatactatttaatgtccattgtgaatttctacatggcaggcctcatgttaactgttccacatgtattatctcatttaatcttcacgcagttcttttatagggaaggaaactgaggctcagggggataagtgacttgcccaacatcacatagctagtaagaggtaaaatcaatgtgacttcacagctgctggaacccctgtgctatagggctgtctgtgtccccctggaggacagactgctctcagcctgcacctcccatcccttctccaggtgacactctgacctatgagattgggcccaggaagagtgaagaggaagcagcagctctggacgaatggattgaagtgacggagaaagtgttaccgctgtccctcattgccaccaaaagaggcatcgagtcactcactgccctttgctccactctcattgaaggacaaaagaaaaggtcacaagtgtccaaacgcaccttctggcagggctggcagggaagaagcccacagacatctccatcccatcctcagccactaagcccagaacagatgctccaggaccagcataccatgaacacgaaggcctcggaggtgacgtccatgctgcaggagctcctggactctaccatgttcagcaagggggaggtcagggccatcaggtacatggccactgtggtggagaacctcaacaaggccttgatcctccaacacaaggagaacaggagcctggagaccaaatacaggcacctgcaaatgcaggcgaccaaagagctcagcagccagaggctgcacttccagcagttcatggaggtccttgagagcaggagggatgctctgctgaagcaggtagagatcttagggggaaggtaccatgaccttctcctgatgaagcaggccttggagttccagctgaagaaggctcagaatgctacaggtcaggcagaagacctggctgaggtttctgttgactccccaggtccctctgagagagagaccctcccaaggaaagaaacagtcatggaggaaagccaacaggaaccgatgaaggaggagcagttgttctcgccacttcccccaagtcccatggccatgatacgggacagtggtgctatagctgcagggcaccagccactttccaccatgactgtgcgctcgagggtcgcagatgtgttcggcagcaaggacactgagagccttgagcctgtgcttttacccttagtagatcgcaggtttcctaagaaatgggaaagaccggtggcagaaagcttaggccacaaagacaaagaccaggaggactacttccagaagggaggactccaaattaagttccactgtagcaagcagctgtctctagagagctccaggcaggtgacctctgagagccaagaggagccctgggaggaggaattcggccgggagatgcggaggcagctgtggctggaggaggaggagatgtggcagcagcggcagaagaagtgggccctgctggagcaggagcatcaggagaagctgcggcagtggaatctggaagacctggccagggagcaacagcggagatgggtccagctagaaaaggagcaggagagcccacggagagagccagagcagctaggggaggatgtggagaggaggatcttcacacccaccagtcgatggagggacttggagaaggcagagctatcattagtgcctgccccaagccggacccaatctgctcaccaaagcaggaggccacacttgcccatgtctcctagtacccagcagcctgccctgggaaagcagagacctatgagttcagtggagtttacctacagaccacggacccgccgagttcccacaaagcccaagaaatctgcctcctttcctgtcactgggacatccatccgaaggctgacctggccctctttgcagatatcccctgcaaatattaagaagaaggtgtaccacatggacatggaggcccagaggaagaacctgcagctcctgagtgaggagtctgagttgaggctgccccactacctgcgcagcaaagcactggagctcaccaccaccaccatggagctgggcgcgctcaggctgcagtacctgtgccataagtacatcttctatagacgcctccagagcctccggcaagaagcgatcaaccatgtacaaatcatgaaagaaacggaggcttcctacaaggcccagaacctctacatcttcctggaaaacattgaccgcctgcagagtctcaggctgcaggcctggacggacaagcagaaggggctggaggagaagcaccgagagtgcctgagcagcatggtgaccatgttccccaagctccagctggagtggaacgttcacctgaacatccctgaggtcacctcgccaaagccaaagaaatgcaagttgcctgcagcctcaccccggcacatccgccccagtggccccacctacaagcagccctttctgtctaggcaccgggcatgtgtgcccctgcagatggcccgccaacaggggaagcagatggaggctgtctggaagaccgaggtggcctcctccagttacgcaatagaaaaaaagacccctgccagccttccccgggaccagctgaggggacacccagatattccccggctgttgacactggacgtgtagtcctcctgccacaaaagcctgaacttcctgaaggcccagtaaggctcttggcactgtgcttaaggggcctggtggctgaacttgctctggtgatggaggactttgaccttctgcacgtcctctagcgagctctctggcaagcatgcagagtgtctgacattcttctcctgctttggtaacaatttcatcttcttaaaggcaaagaaagcctgcacgggccaagctgtgaagccaagagggttggaagacaaatatatatgtgtgtgtatctttgtgtatatatgt

SEQ ID NO: 374079 - DNA, 915 bp, Homo sapiens
gtatgggtgaagaggcagggagcaggggtgaccagcctggggaggtgggcagtgaagtgagggcaccaacaggccaatatcaccctacgagttgcaaagtgcctgtcttctcagctgccctccccagtgctggccactgacccacaggtggggtgtatgtcatagtgtgtgggcttcagggactagcctgaccagtgcatttcaaactatgcgacggaaagactctgaggacccacacctgaaaacttataacctttctaccctgagcatcgatttggcatctgccgttggtctgtcctataaacaagcctgaacctccccaccatgtgacctgcaggctctggagacactgtgaacctctggggcgctaaaaggaccctggtccacacctacccttgcatgtcctagatcagggcttctgccccagggcctgttccttgaaggacaggggccgccctgggaacctcttccagcagctcctcggccagaggagccccaaggaagtgagattcagactcagtgttggaggggagatgaggagggcagtgacacactcgatttgagaagggaaggagacaaagctcacttgggcctgatggctctggagagtctcttgcatctcaatctctctctgttgcttttcacattctccaaactccccactcccagccaacaggggaagcagatggaggctgtctggaagaccgaggtggcctcctccagttacgcaatagaaaaaaagacccctgccagccttccccgggaccagctgaggggacacccagatattccccggctgttgacactggacgtgtagtcctcctgccacaaaagcctgaacttcctgaaggcccagtaaggtgcgaggctgatggtcaatgtggattctccccaataaatctctctccaggcttt

SEQ ID NO: 374080 - DNA, 2933 bp, Homo sapiens
ctggtgtttggcagttaccagaggagctgtgcctgggcagagggtacccaggagacaccctggtgcccttaacctccaaagcaggcaacattgtgtgtccaggcctgtggaccagaaacacaggatgttttgtgactgacagagtgatccaaaatggagaaggatgaccccccacagttggtgactcccacatcagtgaaagccatcatcctgaggattgaggctgcccagctaactcgggctcaagaggatatttctacccagctctcagacattttggacaatgtcaattgtgtcatcaaccgcttccaggaagaattaggatatgatttaaaagaaaatgccaaatctcagcagagagatccaaagggcaagaagagattcatcttgctggaaaaaattgcctccttctccaaagatgctatgatgaaggagaagcacctgtatgacattctccgctggctgggtgactggggtgacactctgacctatgagattgggcccaggaagagtgaagaggaagcagcagctctggacgaatggattgaagtgacggagaaagtgttaccgctgtccctcattgccaccaaaagaggcatcgagtcactcactgccctttgctccactctcattgaaggacaaaagaaaaggtcacaagtgtccaaacgcaccttctggcagggctggcagggaagaagcccacagacatctccatcccatcctcagccactaagcccagaacagatgctccaggaccagcataccatgaacacgaaggcctcggaggtgacgtccatgctgcaggagctcctggactctaccatgttcagcaagggggaggtcagggccatcaggtacatggccactgtggtggagaacctcaacaaggccttgatcctccaacacaaggagaacaggagcctggagaccaaatacaggcacctgcaaatgcaggcgaccaaagagctcagcagccagaggctgcacttccagcagttcatggaggtccttgagagcaggagggatgctctgctgaagcaggtagagatcttagggggaaggtaccatgaccttctcctgatgaagcaggccttggagttccagctgaagaaggctcagaatgctacaggtcaggcagaagacctggctgaggtttctgttgactccccaggtccctctgagagagagaccctcccaaggaaagaaacagtcatggaggaaagccaacaggaaccgatgaaggaggagcagttgttctcgccacttcccccaagtcccatggccatgatacgggacagtggtgctatagctgcagggcaccagccactttccaccatgactgtgcgctcgagggtcgcagatgtgttcggcagcaaggacactgagagccttgagcctgtgcttttacccttagtagatcgcaggtttcctaagaaatgggaaagaccggtggcagaaagcttaggccacaaagacaaagaccaggaggactacttccagaagggaggactccaaattaagttccactgtagcaagcagctgtctctagagagctccaggcaggtgacctctgagagccaagaggagccctgggaggaggaattcggccgggagatgcggaggcagctgtggctggaggaggaggagatgtggcagcagcggcagaagaagtgggccctgctggagcaggagcatcaggagaagctgcggcagtggaatctggaagacctggccagggagcaacagcggagatgggtccagctagaaaaggagcaggagagcccacggagagagccagagcagctaggggaggatgtggagaggaggatcttcacacccaccagtcgatggagggacttggagaaggcagagctatcattagtgcctgccccaagccggacccaatctgctcaccaaagcaggaggccacacttgcccatgtctcctagtacccagcagcctgccctgggaaagcagagacctatgagttcagtggagtttacctacagaccacggacccgccgagttcccacaaagcccaagaaatctgcctcctttcctgtcactgggacatccatccgaaggctgacctggccctctttgcagatatcccctgcaaatattaagaagaaggtgtaccacatggacatggaggcccagaggaagaacctgcagctcctgagtgaggagtctgagttgaggctgccccactacctgcgcagcaaagcactggagctcaccaccaccaccatggagctgggcgcgctcaggctgcagtacctgtgccataagtacatcttctatagacgcctccagagcctccggcaagaagcgatcaaccatgtacaaatcatgaaagaaacggaggcttcctacaaggcccagaacctctacatcttcctggaaaacattgaccgcctgcagagtctcaggctgcaggcctggacggacaagcagaaggggctggaggagaagcaccgagagtgcctgagcagcatggtgaccatgttccccaagctccagctggagtggaacgttcacctgaacatccctgaggtcacctcgccaaagccaaagaaatgcaagttgcctgcagcctcaccccggcacatccgccccagtggccccacctacaagcagccctttctgtctaggcaccgggcatgtgtgcccctgcagatggcccgccaacaggggaagcagatggaggctgtctggaagaccgaggtggcctcctccagttacgcaatagaaaaaaagacccctgccagccttccccgggaccagctgaggggacacccagatattccccggctgttgacactggacgtgtagtcctcctgccacaaaagcctgaacttcctgaaggcccagtaaggtgcgaggctgatggtcaatgtggattctccccaataaatctctctccaggcttt

SEQ ID NO: 374081 - DNA, 3060 bp, Homo sapiens
ctggtgtttggcagttaccagaggagctgtgcctgggcagagggtacccaggagacaccctggtgcccttaacctccaaagcaggcaacattgtgtgtccaggcctgtggaccagaaacacaggatgttttgtgactgacagagtgatccaaaatggagaaggatgaccccccacagttggtgactcccacatcagtgaaagccatcatcctgaggattgaggctgcccagctaactcgggctcaagaggatatttctacccagctctcagacattttggacaatgtcaattgtgtcatcaaccgcttccaggaagaattaggatatgatttaaaagaaaatgccaaatctcagcagagagatccaaagggcaagaagagattcatcttgctggaaaaaattgcctccttctccaaagatgctatgatgaaggagaagcacctgtatgacattctccgctggctgggtgactggggtgacactctgacctatgagattgggcccaggaagagtgaagaggaagcagcagctctggacgaatggattgaagtgacggagaaagtgttaccgctgtccctcattgccaccaaaagaggcatcgagtcactcactgccctttgctccactctcattgaaggacaaaagaaaaggtcacaagtgtccaaacgcaccttctggcagggctggcagggaagaagcccacagacatctccatcccatcctcagccactaagcccagaacagatgctccaggaccagcataccatgaacacgaaggcctcggaggtgacgtccatgctgcaggagctcctggactctaccatgttcagcaagggggaggtcagggccatcaggtacatggccactgtggtggagaacctcaacaaggccttgatcctccaacacaaggagaacaggagcctggagaccaaatacaggcacctgcaaatgcaggcgaccaaagagctcagcagccagaggctgcacttccagcagttcatggaggtccttgagagcaggagggatgctctgctgaagcaggtagagatcttagggggaaggtaccatgaccttctcctgatgaagcaggccttggagttccagctgaagaaggctcagaatgctacaggtcaggcagaagacctggctgaggtttctgttgactccccaggtccctctgagagagagaccctcccaaggaaagaaacagtcatggaggaaagccaacaggaaccgatgaaggaggagcagttgttctcgccacttcccccaagtcccatggccatgatacgggacagtggtgctatagctgcagggcaccagccactttccaccatgactgtgcgctcgagggtcgcagatgtgttcggcagcaaggacactgagagccttgagcctgtgcttttacccttagtagatcgcaggtttcctaagaaatgggaaagaccggtggcagaaagcttaggccacaaagacaaagaccaggaggactacttccagaagggaggactccaaattaagttccactgtagcaagcagctgtctctagagagctccaggcaggtgacctctgagagccaagaggagccctgggaggaggaattcggccgggagatgcggaggcagctgtggctggaggaggaggagatgtggcagcagcggcagaagaagtgggccctgctggagcaggagcatcaggagaagctgcggcagtggaatctggaagacctggccagggagcaacagcggagatgggtccagctagaaaaggagcaggagagcccacggagagagccagagcagctaggggaggatgtggagaggaggatcttcacacccaccagtcgatggagggacttggagaaggcagagctatcattagtgcctgccccaagccggacccaatctgctcaccaaagcaggaggccacacttgcccatgtctcctagtacccagcagcctgccctgggaaagcagagacctatgagttcagtggagtttacctacagaccacggacccgccgagttcccacaaagcccaagaaatctgcctcctttcctgtcactgggacatccatccgaaggctgacctggccctctttgcagatatcccctgcaaatattaagaagaaggtgtaccacatggacatggaggcccagaggaagaacctgcagctcctgagtgaggagtctgagttgaggctgccccactacctgcgcagcaaagcactggagctcaccaccaccaccatggagctgggcgcgctcaggctgcagtacctgtgccataagtacatcttctatagacgcctccagagcctccggcaagaagcgatcaaccatgtacaaatcatgaaagaaacggaggcttcctacaaggcccagaacctctacatcttcctggaaaacattgaccgcctgcagagtctcaggctgcaggcctggacggacaagcagaaggggctggaggagaagcaccgagagtgcctgagcagcatggtgaccatgttccccaagctccagctggagtggaacgttcacctgaacatccctgaggtcacctcgccaaagccaaagaaatgcaagttgcctgcagcctcaccccggcacatccgccccagtggccccacctacaagcagccctttctgtctaggcaccgggcatgtgtgcccctgcagatggcccgccaacaggggaagcagatggaggctgtctggaagaccgaggtggcctcctccagttacgcaatagaaaaaaagacccctgccagccttccccgggaccagctgaggggacacccagatattccccggctgttgacactggacgtgtagtcctcctgccacaaaagcctgaacttcctgaaggcccagtaagcgcctcagcgaaccaaaggaaggaatgccaggaacctacaaatgaatccgcttagcttgttcaaaaaaagtcaagcgagtcactccctggaacccaaataagccagaaggatcaagacagccccagtctccactgcatccctcagccagtgattctcaaccttctgagggacggaaacccac

SEQ ID NO: 374082 - DNA, 1935 bp, Homo sapiens
aggtccccgacattccatatacaagatggccgcagtcggcaaggagagacgtcgctgaggggcttgcctgaagcgaggggattctaacattttcagagaaccttttggaaagaacaagcctacttcaataaatgaaggagaataaagaaaattcaagcccttcagtaacttcagcaaacctggaccacacaaagccatgttggtactgggataagaaagacttggctcatacaccctcacaacttgaaggacttgatccagccaccgaggcccggtaccgccgagagggcgctcggttcatctttgatgtgggcacacgtttggggctacactatgataccctggcaactggaataatttattttcatcgcttctatatgtttcattccttcaagcaattcccaagatatgtgacaggagcctgttgcctctttctggctgggaaagtagaagaaacaccaaaaaaatgtaaagatatcatcaaaacagctcgtagtttattaaatgatgtacaatttggccagtttggagatgacccaaaggaggaagtaatggttctggagagaatcttactgcagaccatcaagtttgatttacaggtagaacatccataccagttcctactaaaatatgcaaagcaactcaaaggtgataaaaacaaaattcaaaagttggttcaaatggcatggacatttgtaaatgacagtctctgcaccaccttgtcactgcagtgggaaccagagatcatagcagtagcagtgatgtatctcgcaggacgtttgtgcaaatttgaaatacaagaatggacctccaaacccatgtataggagatggtgggagcagtttgttcaagatgtcccggtcgacgttttggaagacatctgccaccaaatcctggatctttactcacaaggaaaacaacagatgcctcatcacaccccccatcagctgcaacagcccccatctcttcagcctacaccacaagtgccgcaagtacagcagtcacagccgtctcaaagctccgaaccatcccagccccagcagaaggaccccccccctcctcctccagggttgggcctgccgccagccagctacccacctcctgccgtcccccctggaggacagcctcctgtgcccccgcccattcccccacccggcatgcctccagttggggggctggggcgggcagcctggatgagataacgtgagccttttttccctctttgtttttttaacaagattttctaatcgacttgcagagtagttgaagtgggtaagcagcagggtaccttgtataatgcacgacagttgcagtatgggaagaatggaccgggcccctgggataaaatcagagtggtcctcacacctagaggacggggacaaccagctttcagagtagcctcatcagtgcccttgcagtctgactgtgtacacttggttcagctaatgtctgagagtcctgcactgggttactttatactagtgaggacgttaaccagccatattggctcaataaatagcttcggtaaggagttaatttccttctagaaatcagtgcctatttttcctggaaactcaattttaaatagtccaattccatctgaagccaagctgttgtcattttcattcggtgacattctctcccatgacacccagaaggggcagaagaaccacatttttcatttatagatgtttgcatcctttgtattaaaattattttgaaggggttgcctcattggatggctttttttttttcctccagggagaaggggagaaatgtacttggaaattaatgtatgtttacatctctttgcaaattcctgtacatagagatatattttttaagtgtgaatgtaacaacatactgtgaattccatcttggttacaaatgagactccttcagtcagttatccaaataaaagcagttctgaaacta

SEQ ID NO: 374083 - DNA, 274 bp, Homo sapiens
atcatactcaggatcccagttaacaattgtgtattttcttttgtaacaggttgtttctcccaaagaagagaacaaagcagcagaaccaccaccacctaaaatccccaaaattgagaccactcatccaccgttgcctccagcccacccacctccagaccggaagcctcccctcgctgctgccttaggtgaggctgagccgccgggccctgtggatgccactgacctccccaaagtccagattccccctccggcccacccggcccctgtgcaccag

SEQ ID NO: 374084 - DNA, 3558 bp, Homo sapiens
aggtccccgacattccatatacaagatggccgcagtcggcaaggagagacgtcgctgaggggcttgcctgaagcgaggggtgagtgacccaccgactgagggcagcgccgcccacctcccgcgtatctggaggtcggagtaggttatggccaaccgccgctatccactggcggagtctctctttccggattctgcctccctccgctaacctccggattctaacattttcagagaaccttttggaaagaacaagcctacttcaataaatgaaggagaataaagaaaattcaagcccttcagtaacttcagcaaacctggaccacacaaagccatgttggtactgggataagaaagacttggctcatacaccctcacaacttgaaggacttgatccagccaccgaggcccggtaccgccgagagggcgctcggttcatctttgatgtgggcacacgtttggggctacactatgataccctggcaactggaataatttattttcatcgcttctatatgtttcattccttcaagcaattcccaagatatgtgacaggagcctgttgcctctttctggctgggaaagtagaagaaacaccaaaaaaatgtaaagatatcatcaaaacagctcgtagtttattaaatgatgtacaatttggccagtttggagatgacccaaaggaggaagtaatggttctggagagaatcttactgcagaccatcaagtttgatttacaggtagaacatccataccagttcctactaaaatatgcaaagcaactcaaaggtgataaaaacaaaattcaaaagttggttcaaatggcatggacatttgtaaatgacagtctctgcaccaccttgtcactgcagtgggaaccagagatcatagcagtagcagtgatgtatctcgcaggacgtttgtgcaaatttgaaatacaagaatggacctccaaacccatgtataggagatggtgggagcagtttgttcaagatgtcccggtcgacgttttggaagacatctgccaccaaatcctggatctttactcacaaggaaaacaacagatgcctcatcacaccccccatcagctgcaacagcccccatctcttcagcctacaccacaagtgccgcaagtacagcagtcacagccgtctcaaagctccgaaccatcccagccccagcagaaggaccccccccctcctcctccagggttgggcctgccgccagccagctacccacctcctgccgtcccccctggaggacagcctcctgtgcccccgcccattcccccacccggcatgcctccagttggggggctggggcgggcagcctggatgagataacgtgagccttttttccctctttgtttttttaacaagattttctaatcgacttgcagagtagttgaagtgggtaagcagcagggtaccttgtataatgcacgacagttgcagtatgggaagaatggaccgggcccctgggataaaatcagagtggtcctcacacctagaggacggggacaaccagctttcagagtagcctcatcagtgcccttgcagtctgactgtgtacacttggttcagctaatgtctgagagtcctgcactgggttactttatactagtgaggacgttaaccagccatattggctcaataaatagcttcggtaaggagttaatttccttctagaaatcagtgcctatttttcctggaaactcaattttaaatagtccaattccatctgaagccaagctgttgtcattttcattcggtgacattctctcccatgacacccagaaggggcagaagaaccacatttttcatttatagatgtttgcatcctttgtattaaaattattttgaaggggttgcctcattggatggctttttttttttcctccagggagaaggggagaaatgtacttggaaattaatgtatgtttacatctctttgcaaattcctgtacatagagatatattttttaagtgtgaatgtaacaacatactgtgaattccatcttggttacaaatgagactccttcagtcagttatccaaataaaagcagttctgaaactatccctttctttgttatgggtggaaggtggggctccaggccttcgcagtctgtggcttataaaatgtgcagaggccctccttccagaccctggggacgcgggagaggcctggctgcagctcacagcagccacagccaaccccactgcctcccaaggcactctgggtggatccgcacagctgcctgccaagccagcctgcccccatcctgtgcctgccttggtttcctttggaggacctggttgagttccaaaccagtttgaaactttgaagccttgctgcgtagaacgcacacaggaacccgggggcttggatttgaaaccctttccacttctggcctgtgatgagacagaggcagctggaggagcagcggcctcactgtccaccttgaggggccacggctctgtctgtggaaggggccccgactgagcccccatctgcggtgcttgaggggccttggccctgtctctgcctgctgaccctgccacccacgacagaaacaagcactgagcacccagccaggaggctcacaaagaggcctttatttatctagctcaaagtagacactatcacaatcttgtttgttactccttttactaaaatagttcaaatcaatgtttttaccacactatcaaaaagttctatttcttcttgtctccccacgtcagagtggttgaatagaaggtagaaacaggccgggagtccacgggctcccagctctaaacggcgccagggcaggaaggggtggctccaggtctcactgtggcaccttctacagaaaatagacgtagctgccgggcccggggacagaaaccagacgttccagtccatctccaaaaagcagcacaaatactttgccccacagtatgaaaaatatacacctctaccgctctgcagtcatgcatttagttttaagaaaaaaaaaaaatcagtagtatgtatcttgtttcctcaagtttcaagaaaaaaaaaatgaaaggtcacttttttctctttaaacactgatgtgtagctagtaacttggataaaaaggtgccaccctacaaaatgtgctcagcatgttctgaggccaggatgggcttggccacctgggctggggcgaaaggagacctccatctgtcacagtggaaactgaagccgagtgccagtgccgcgtccggcttcaagatcaagagtcagagcctttgaaatggaaagggggcatctgaaagggcacccccactgggggctttcagagctaaggctccagaaggaagggggtcgccctgctagtgacggagctgggagtcaccctgagctacagcacgcccagatttcccctgtgggaagccccatctgaccttctacagcccacggctctgcaactgccacctgtactcaggtacatggcgtcgctgctgctggcttttaaaatcagctattagtttgagatgtgacagtcgccgacagggttctgtcctagaaagccatcccagtgccgtgttggctcag

SEQ ID NO: 374085 - DNA, 3419 bp, Homo sapiens
caggttttgctgaagaatggaatctggaccagcgttagaggacctgtatgtctagtgaagaaaaaccagaagaaagattctaacattttcagagaaccttttggaaagaacaagcctacttcaataaatgaaggagaataaagaaaattcaagcccttcagtaacttcagcaaacctggaccacacaaagccatgttggtactgggataagaaagacttggctcatacaccctcacaacttgaaggacttgatccagccaccgaggcccggtaccgccgagagggcgctcggttcatctttgatgtgggcacacgtttggggctacactatgataccctggcaactggaataatttattttcatcgcttctatatgtttcattccttcaagcaattcccaagatatgtgacaggagcctgttgcctctttctggctgggaaagtagaagaaacaccaaaaaaatgtaaagatatcatcaaaacagctcgtagtttattaaatgatgtacaatttggccagtttggagatgacccaaaggaggaagtaatggttctggagagaatcttactgcagaccatcaagtttgatttacaggtagaacatccataccagttcctactaaaatatgcaaagcaactcaaaggtgataaaaacaaaattcaaaagttggttcaaatggcatggacatttgtaaatgacagtctctgcaccaccttgtcactgcagtgggaaccagagatcatagcagtagcagtgatgtatctcgcaggacgtttgtgcaaatttgaaatacaagaatggacctccaaacccatgtataggagatggtgggagcagtttgttcaagatgtcccggtcgacgttttggaagacatctgccaccaaatcctggatctttactcacaaggaaaacaacagatgcctcatcacaccccccatcagctgcaacagcccccatctcttcagcctacaccacaagtgccgcaagtacagcagtcacagccgtctcaaagctccgaaccatcccagccccagcagaaggaccccccccctcctcctccagggttgggcctgccgccagccagctacccacctcctgccgtcccccctggaggacagcctcctgtgcccccgcccattcccccacccggcatgcctccagttggggggctggggcgggcagcctggatgagataacgtgagccttttttccctctttgtttttttaacaagattttctaatcgacttgcagagtagttgaagtgggtaagcagcagggtaccttgtataatgcacgacagttgcagtatgggaagaatggaccgggcccctgggataaaatcagagtggtcctcacacctagaggacggggacaaccagctttcagagtagcctcatcagtgcccttgcagtctgactgtgtacacttggttcagctaatgtctgagagtcctgcactgggttactttatactagtgaggacgttaaccagccatattggctcaataaatagcttcggtaaggagttaatttccttctagaaatcagtgcctatttttcctggaaactcaattttaaatagtccaattccatctgaagccaagctgttgtcattttcattcggtgacattctctcccatgacacccagaaggggcagaagaaccacatttttcatttatagatgtttgcatcctttgtattaaaattattttgaaggggttgcctcattggatggctttttttttttcctccagggagaaggggagaaatgtacttggaaattaatgtatgtttacatctctttgcaaattcctgtacatagagatatattttttaagtgtgaatgtaacaacatactgtgaattccatcttggttacaaatgagactccttcagtcagttatccaaataaaagcagttctgaaactatccctttctttgttatgggtggaaggtggggctccaggccttcgcagtctgtggcttataaaatgtgcagaggccctccttccagaccctggggacgcgggagaggcctggctgcagctcacagcagccacagccaaccccactgcctcccaaggcactctgggtggatccgcacagctgcctgccaagccagcctgcccccatcctgtgcctgccttggtttcctttggaggacctggttgagttccaaaccagtttgaaactttgaagccttgctgcgtagaacgcacacaggaacccgggggcttggatttgaaaccctttccacttctggcctgtgatgagacagaggcagctggaggagcagcggcctcactgtccaccttgaggggccacggctctgtctgtggaaggggccccgactgagcccccatctgcggtgcttgaggggccttggccctgtctctgcctgctgaccctgccacccacgacagaaacaagcactgagcacccagccaggaggctcacaaagaggcctttatttatctagctcaaagtagacactatcacaatcttgtttgttactccttttactaaaatagttcaaatcaatgtttttaccacactatcaaaaagttctatttcttcttgtctccccacgtcagagtggttgaatagaaggtagaaacaggccgggagtccacgggctcccagctctaaacggcgccagggcaggaaggggtggctccaggtctcactgtggcaccttctacagaaaatagacgtagctgccgggcccggggacagaaaccagacgttccagtccatctccaaaaagcagcacaaatactttgccccacagtatgaaaaatatacacctctaccgctctgcagtcatgcatttagttttaagaaaaaaaaaaaatcagtagtatgtatcttgtttcctcaagtttcaagaaaaaaaaaatgaaaggtcacttttttctctttaaacactgatgtgtagctagtaacttggataaaaaggtgccaccctacaaaatgtgctcagcatgttctgaggccaggatgggcttggccacctgggctggggcgaaaggagacctccatctgtcacagtggaaactgaagccgagtgccagtgccgcgtccggcttcaagatcaagagtcagagcctttgaaatggaaagggggcatctgaaagggcacccccactgggggctttcagagctaaggctccagaaggaagggggtcgccctgctagtgacggagctgggagtcaccctgagctacagcacgcccagatttcccctgtgggaagccccatctgaccttctacagcccacggctctgcaactgccacctgtactcaggtacatggcgtcgctgctgctggcttttaaaatcagctattagtttgagatgtgacagtcgccgacagggttctgtcctagaaagccatcccagtgccgtgttggctcag

SEQ ID NO: 374086 - DNA, 3101 bp, Homo sapiens
tgatatcggggaaccggccctcggggaataattgggggtgcatcgctgtctatatgtttcatgcgcgtgcaagcaattcccaagatatgtgacaggagcctgttgcctctttctggctgggaaagtagaagaaacaccaaaaaaatgtaaagatatcatcaaaacagctcgtagtttattaaatgatgtacaatttggccagtttggagatgacccaaaggaggaagtaatggttctggagagaatcttactgcagaccatcaagtttgatttacaggtagaacatccataccagttcctactaaaatatgcaaagcaactcaaaggtgataaaaacaaaattcaaaagttggttcaaatggcatggacatttgtaaatgacagtctctgcaccaccttgtcactgcagtgggaaccagagatcatagcagtagcagtgatgtatctcgcaggacgtttgtgcaaatttgaaatacaagaatggacctccaaacccatgtataggagatggtgggagcagtttgttcaagatgtcccggtcgacgttttggaagacatctgccaccaaatcctggatctttactcacaaggaaaacaacagatgcctcatcacaccccccatcagctgcaacagcccccatctcttcagcctacaccacaagtgccgcaagtacagcagtcacagccgtctcaaagctccgaaccatcccagccccagcagaaggaccccccccctcctcctccagggttgggcctgccgccagccagctacccacctcctgccgtcccccctggaggacagcctcctgtgcccccgcccattcccccacccggcatgcctccagttggggggctggggcgggcagcctggatgagataacgtgagccttttttccctctttgtttttttaacaagattttctaatcgacttgcagagtagttgaagtgggtaagcagcagggtaccttgtataatgcacgacagttgcagtatgggaagaatggaccgggcccctgggataaaatcagagtggtcctcacacctagaggacggggacaaccagctttcagagtagcctcatcagtgcccttgcagtctgactgtgtacacttggttcagctaatgtctgagagtcctgcactgggttactttatactagtgaggacgttaaccagccatattggctcaataaatagcttcggtaaggagttaatttccttctagaaatcagtgcctatttttcctggaaactcaattttaaatagtccaattccatctgaagccaagctgttgtcattttcattcggtgacattctctcccatgacacccagaaggggcagaagaaccacatttttcatttatagatgtttgcatcctttgtattaaaattattttgaaggggttgcctcattggatggctttttttttttcctccagggagaaggggagaaatgtacttggaaattaatgtatgtttacatctctttgcaaattcctgtacatagagatatattttttaagtgtgaatgtaacaacatactgtgaattccatcttggttacaaatgagactccttcagtcagttatccaaataaaagcagttctgaaactatccctttctttgttatgggtggaaggtggggctccaggccttcgcagtctgtggcttataaaatgtgcagaggccctccttccagaccctggggacgcgggagaggcctggctgcagctcacagcagccacagccaaccccactgcctcccaaggcactctgggtggatccgcacagctgcctgccaagccagcctgcccccatcctgtgcctgccttggtttcctttggaggacctggttgagttccaaaccagtttgaaactttgaagccttgctgcgtagaacgcacacaggaacccgggggcttggatttgaaaccctttccacttctggcctgtgatgagacagaggcagctggaggagcagcggcctcactgtccaccttgaggggccacggctctgtctgtggaaggggccccgactgagcccccatctgcggtgcttgaggggccttggccctgtctctgcctgctgaccctgccacccacgacagaaacaagcactgagcacccagccaggaggctcacaaagaggcctttatttatctagctcaaagtagacactatcacaatcttgtttgttactccttttactaaaatagttcaaatcaatgtttttaccacactatcaaaaagttctatttcttcttgtctccccacgtcagagtggttgaatagaaggtagaaacaggccgggagtccacgggctcccagctctaaacggcgccagggcaggaaggggtggctccaggtctcactgtggcaccttctacagaaaatagacgtagctgccgggcccggggacagaaaccagacgttccagtccatctccaaaaagcagcacaaatactttgccccacagtatgaaaaatatacacctctaccgctctgcagtcatgcatttagttttaagaaaaaaaaaaaatcagtagtatgtatcttgtttcctcaagtttcaagaaaaaaaaaatgaaaggtcacttttttctctttaaacactgatgtgtagctagtaacttggataaaaaggtgccaccctacaaaatgtgctcagcatgttctgaggccaggatgggcttggccacctgggctggggcgaaaggagacctccatctgtcacagtggaaactgaagccgagtgccagtgccgcgtccggcttcaagatcaagagtcagagcctttgaaatggaaagggggcatctgaaagggcacccccactgggggctttcagagctaaggctccagaaggaagggggtcgccctgctagtgacggagctgggagtcaccctgagctacagcacgcccagatttcccctgtgggaagccccatctgaccttctacagcccacggctctgcaactgccacctgtactcaggtacatggcgtcgctgctgctggcttttaaaatcagctattagtttgagatgtgacagtcgccgacagggttctgtcctagaaagccatcccagtgccgtgttggctcag

SEQ ID NO: 374087 - DNA, 3366 bp, Homo sapiens
aggtccccgacattccatatacaagatggccgcagtcggcaaggagagacgtcgctgaggggcttgcctgaagcgaggggattctaacattttcagagaaccttttggaaagaacaagcctacttcaataaatgaaggagaataaagaaaattcaagcccttcagtaacttcagcaaacctggaccacacaaagccatgttggtactgggataagaaagacttggctcatacaccctcacaacttgaaggacttgatccagccaccgaggcccggtaccgccgagagggcgctcggttcatctttgatgtgggcacacgtttggggctacactatgataccctggcaactggaataatttattttcatcgcttctatatgtttcattccttcaagcaattcccaagatatgtgacaggagcctgttgcctctttctggctgggaaagtagaagaaacaccaaaaaaatgtaaagatatcatcaaaacagctcgtagtttattaaatgatgtacaatttggccagtttggagatgacccaaaggaggaagtaatggttctggagagaatcttactgcagaccatcaagtttgatttacaggtagaacatccataccagttcctactaaaatatgcaaagcaactcaaaggtgataaaaacaaaattcaaaagttggttcaaatggcatggacatttgtaaatgacagtctctgcaccaccttgtcactgcagtgggaaccagagatcatagcagtagcagtgatgtatctcgcaggacgtttgtgcaaatttgaaatacaagaatggacctccaaacccatgtataggagatggtgggagcagtttgttcaagatgtcccggtcgacgttttggaagacatctgccaccaaatcctggatctttactcacaaggaaaacaacagatgcctcatcacaccccccatcagctgcaacagcccccatctcttcagcctacaccacaagtgccgcaagtacagcagtcacagccgtctcaaagctccgaaccatcccagccccagcagaaggaccccccccctcctcctccagggttgggcctgccgccagccagctacccacctcctgccgtcccccctggaggacagcctcctgtgcccccgcccattcccccacccggcatgcctccagttggggggctggggcgggcagcctggatgagataacgtgagccttttttccctctttgtttttttaacaagattttctaatcgacttgcagagtagttgaagtgggtaagcagcagggtaccttgtataatgcacgacagttgcagtatgggaagaatggaccgggcccctgggataaaatcagagtggtcctcacacctagaggacggggacaaccagctttcagagtagcctcatcagtgcccttgcagtctgactgtgtacacttggttcagctaatgtctgagagtcctgcactgggttactttatactagtgaggacgttaaccagccatattggctcaataaatagcttcggtaaggagttaatttccttctagaaatcagtgcctatttttcctggaaactcaattttaaatagtccaattccatctgaagccaagctgttgtcattttcattcggtgacattctctcccatgacacccagaaggggcagaagaaccacatttttcatttatagatgtttgcatcctttgtattaaaattattttgaaggggttgcctcattggatggctttttttttttcctccagggagaaggggagaaatgtacttggaaattaatgtatgtttacatctctttgcaaattcctgtacatagagatatattttttaagtgtgaatgtaacaacatactgtgaattccatcttggttacaaatgagactccttcagtcagttatccaaataaaagcagttctgaaactatccctttctttgttatgggtggaaggtggggctccaggccttcgcagtctgtggcttataaaatgtgcagaggccctccttccagaccctggggacgcgggagaggcctggctgcagctcacagcagccacagccaaccccactgcctcccaaggcactctgggtggatccgcacagctgcctgccaagccagcctgcccccatcctgtgcctgccttggtttcctttggaggacctggttgagttccaaaccagtttgaaactttgaagccttgctgcgtagaacgcacacaggaacccgggggcttggatttgaaaccctttccacttctggcctgtgatgagacagaggcagctggaggagcagcggcctcactgtccaccttgaggggccacggctctgtctgtggaaggggccccgactgagcccccatctgcggtgcttgaggggccttggccctgtctctgcctgctgaccctgccacccacgacagaaacaagcactgagcacccagccaggaggctcacaaagaggcctttatttatctagctcaaagtagacactatcacaatcttgtttgttactccttttactaaaatagttcaaatcaatgtttttaccacactatcaaaaagttctatttcttcttgtctccccacgtcagagtggttgaatagaaggtagaaacaggccgggagtccacgggctcccagctctaaacggcgccagggcaggaaggggtggctccaggtctcactgtggcaccttctacagaaaatagacgtagctgccgggcccggggacagaaaccagacgttccagtccatctccaaaaagcagcacaaatattttaagaaaaaaaaaaaatcagtagtatgtatcttgtttcctcaagtttcaagaaaaaaaaaatgaaaggtcacttttttctctttaaacactgatgtgtagctagtaacttggataaaaaggtgccaccctacaaaatgtgctcagcatgttctgaggccaggatgggcttggccacctgggctggggcgaaaggagacctccatctgtcacagtggaaactgaagccgagtgccagtgccgcgtccggcttcaagatcaagagtcagagcctttgaaatggaaagggggcatctgaaagggcacccccactgggggctttcagagctaaggctccagaaggaagggggtcgccctgctagtgacggagctgggagtcaccctgagctacagcacgcccagatttcccctgtgggaagccccatctgaccttctacagcccacggctctgcaactgccacctgtactcaggtacatggcgtcgctgctgctggcttttaaaatcagctattagtttgagatgtgacagtcgccgacagggttctgtcctagaaagccatcccagtgccgtgttggctcag

SEQ ID NO: 374088 - DNA, 1362 bp, Homo sapiens
aggtccccgacattccatatacaagatggccgcagtcggcaaggagagacgtcgctgaggggcttgcctgaagcgaggggtgagtgacccaccgactgagggcagcgccgcccacctcccgcgtatctggaggtcggagtaggttatggccaaccgccgctatccactggcggagtctctctttccggattctgcctccctccgctaacctccggattctaacattttcagagaaccttttggaaagaacaagcctacttcaataaatgaaggagaataaagaaaattcaagcccttcagtaacttcagcaaacctggaccacacaaagccatgttggtactgggataagaaagacttggctcatacaccctcacaacttgaaggacttgatccagccaccgaggcccggtaccgccgagagggcgctcggttcatctttgatgtgggcacacgtttggggctacactatgataccctggcaactggaataatttattttcatcgcttctatatgtttcattccttcaagcaattcccaagatatgtgacaggagcctgttgcctctttctggctgggaaagtagaagaaacaccaaaaaaatgtaaagatatcatcaaaacagctcgtagtttattaaatgatgtacaatttggccagtttggagatgacccaaaggaggaagtaatggttctggagagaatcttactgcagaccatcaagtttgatttacaggtagaacatccataccagttcctactaaaatatgcaaagcaactcaaaggtgataaaaacaaaattcaaaagttggttcaaatggcatggacatttgtaaatgacagtctctgcaccaccttgtcactgcagtgggaaccagagatcatagcagtagcagtgatgtatctcgcaggacgtttgtgcaaatttgaaatacaagaatggacctccaaacccatgtataggagatggtgggagcagtttgttcaagatgtcccggtcgacgttttggaagacatctgccaccaaatcctggatctttactcacaaggaaaacaacagatgcctcatcacaccccccatcagctgcaacagcccccatctcttcagcctacaccacaagtgccgcaagtacagcagtcacagccgtctcaaagctccgaaccatcccagccccagcagaaggacccccagcaaccagcccagcagcagcagccagcccaacagcccaagaaaccctctccgcagcccagttctccccgacaggttaagcgagccgtggttgtttctcccaaagaagagaacaaagcagcagaaccagccccaagccagcacctttggtaaataaagcagcatctgagatttt

SEQ ID NO: 374089 - DNA, 2388 bp, Homo sapiens
ctacaaccccaacttcccacccccacccccacgcctcccgcctacccacgcagtcccccctcactcctgccgtcccccctggaggacagcctcctgtgcccccgcccattcccccacccggcatgcctccagttggggggctggggcgggcagcctggatgagataacgtgagccttttttccctctttgtttttttaacaagattttctaatcgacttgcagagtagttgaagtgggtaagcagcagggtaccttgtataatgcacgacagttgcagtatgggaagaatggaccgggcccctgggataaaatcagagtggtcctcacacctagaggacggggacaaccagctttcagagtagcctcatcagtgcccttgcagtctgactgtgtacacttggttcagctaatgtctgagagtcctgcactgggttactttatactagtgaggacgttaaccagccatattggctcaataaatagcttcggtaaggagttaatttccttctagaaatcagtgcctatttttcctggaaactcaattttaaatagtccaattccatctgaagccaagctgttgtcattttcattcggtgacattctctcccatgacacccagaaggggcagaagaaccacatttttcatttatagatgtttgcatcctttgtattaaaattattttgaaggggttgcctcattggatggctttttttttttcctccagggagaaggggagaaatgtacttggaaattaatgtatgtttacatctctttgcaaattcctgtacatagagatatattttttaagtgtgaatgtaacaacatactgtgaattccatcttggttacaaatgagactccttcagtcagttatccaaataaaagcagttctgaaactatccctttctttgttatgggtggaaggtggggctccaggccttcgcagtctgtggcttataaaatgtgcagaggccctccttccagaccctggggacgcgggagaggcctggctgcagctcacagcagccacagccaaccccactgcctcccaaggcactctgggtggatccgcacagctgcctgccaagccagcctgcccccatcctgtgcctgccttggtttcctttggaggacctggttgagttccaaaccagtttgaaactttgaagccttgctgcgtagaacgcacacaggaacccgggggcttggatttgaaaccctttccacttctggcctgtgatgagacagaggcagctggaggagcagcggcctcactgtccaccttgaggggccacggctctgtctgtggaaggggccccgactgagcccccatctgcggtgcttgaggggccttggccctgtctctgcctgctgaccctgccacccacgacagaaacaagcactgagcacccagccaggaggctcacaaagaggcctttatttatctagctcaaagtagacactatcacaatcttgtttgttactccttttactaaaatagttcaaatcaatgtttttaccacactatcaaaaagttctatttcttcttgtctccccacgtcagagtggttgaatagaaggtagaaacaggccgggagtccacgggctcccagctctaaacggcgccagggcaggaaggggtggctccaggtctcactgtggcaccttctacagaaaatagacgtagctgccgggcccggggacagaaaccagacgttccagtccatctccaaaaagcagcacaaatactttgccccacagtatgaaaaatatacacctctaccgctctgcagtcatgcatttagttttaagaaaaaaaaaaaatcagtagtatgtatcttgtttcctcaagtttcaagaaaaaaaaaatgaaaggtcacttttttctctttaaacactgatgtgtagctagtaacttggataaaaaggtgccaccctacaaaatgtgctcagcatgttctgaggccaggatgggcttggccacctgggctggggcgaaaggagacctccatctgtcacagtggaaactgaagccgagtgccagtgccgcgtccggcttcaagatcaagagtcagagcctttgaaatggaaagggggcatctgaaagggcacccccactgggggctttcagagctaaggctccagaaggaagggggtcgccctgctagtgacggagctgggagtcaccctgagctacagcacgcccagatttcccctgtgggaagccccatctgaccttctacagcccacggctctgcaactgccacctgtactcaggtacatggcgtcgctgctgctggcttttaaaatcagctattagtttgagatgtgacagtcgccgacagggttctgtcctagaaagccatcccagtgccgtgttggctcag

SEQ ID NO: 374090 - DNA, 1367 bp, Homo sapiens
aggtccccgacattccatatacaagatggccgcagtcggcaaggagagacgtcgctgaggggcttgcctgaagcgaggggattctaacattttcagagaaccttttggaaagaacaagcctacttcaataaatgaaggagaataaagaaaattcaagcccttcagtaacttcagcaaacctggaccacacaaagccatgttggtactgggataagaaagacttggctcatacaccctcacaacttgaaggacttgatccagccaccgaggcccggtaccgccgagagggcgctcggttcatctttgatgtgggcacacgtttggggctacactatgataccctggcaactggaataatttattttcatcgcttctatatgtttcattccttcaagcaattcccaagatatgtgacaggagcctgttgcctctttctggctgggaaagtagaagaaacaccaaaaaaatgtaaagatatcatcaaaacagctcgtagtttattaaatgatgtacaatttggccagtttggagatgacccaaaggaggaagtaatggttctggagagaatcttactgcagaccatcaagtttgatttacaggtagaacatccataccagttcctactaaaatatgcaaagcaactcaaaggtgataaaaacaaaattcaaaagttggttcaaatggcatggacatttgtaaatgacagtctctgcaccaccttgtcactgcagtgggaaccagagatcatagcagtagcagtgatgtatctcgcaggacgtttgtgcaaatttgaaatacaagaatggacctccaaacccatgtataggagatggtgggagcagtttgttcaagatgtcccggtcgacgttttggaagacatctgccaccaaatcctggatctttactcacaaggaaaacaacagatgcctcatcacaccccccatcagctgcaacagcccccatctcttcagcctacaccacaagtgccgcaagtacagcagtcacagccgtctcaaagctccgaaccatcccagccccagcagaaggacccccagcaaccagcccagcagcagcagccagcccaacagcccaagaaaccctctccgcagcccagttctccccgacaggttaagcgagccgtggttgtttctcccaaagaagagaacaaagcagcagaaccaccaccacctaaaatccccaaaattgagaccactcatccaccgttgcctccagcccacccacctccagaccggaagcctcccctcgctgctgccttaggtgaggctgagccgccgggccctgtggatgccactgacctccccaaagtccagattccccctccggcccacccggcccctgtgcaccag

SEQ ID NO: 374091 - DNA, 1084 bp, Homo sapiens
aggtccccgacattccatatacaagatggccgcagtcggcaaggagagacgtcgctgaggggcttgcctgaagcgaggggattctaacattttcagagaaccttttggaaagaacaagcctacttcaataaatgaaggagaataaagaaaattcaagcccttcagtaacttcagcaaacctggaccacacaaagccatgttggtactgggataagaaagacttggctcatacaccctcacaacttgaaggacttgatccagccaccgaggcccggtaccgccgagagggcgctcggttcatctttgatgtgggcacacgtttggggctacactatgataccctggcaactggaataatttattttcatcgcttctatatgtttcattccttcaagcaattcccaagatatgtgacaggagcctgttgcctctttctggctgggaaagtagaagaaacaccaaaaaaatgtaaagatatcatcaaaacagctcgtagtttattaaatgatgtacaatttggccagtttggagatgacccaaaggaggaagtaatggttctggagagaatcttactgcagaccatcaagtttgatttacaggtagaacatccataccagttcctactaaaatatgcaaagcaactcaaaggtgataaaaacaaaattcaaaagttggttcaaatggcatggacatttgtaaatgacagtctctgcaccaccttgtcactgcagtgggaaccagagatcatagcagtagcagtgatgtatctcgcaggacgtttgtgcaaatttgaaatacaagaatggacctccaaacccatgtataggagatggtgggagcagtttgttcaagatgtcccggtcgacgttttggaagacatctgccaccaaatcctggatctttactcacaaggaaaacaacagatgcctcatcacaccccccatcagctgcaacagcccccatctcttcagcctacaccacaagtgccgcaagtacagcagtcacagccgtctcaaagctccgaaccatcccagccccagcagaaggacccccaatgctattgaaacttctaaaactaggggtt

SEQ ID NO: 374092 - DNA, 1382 bp, Homo sapiens
aggtccccgacattccatatacaagatggccgcagtcggcaaggagagacgtcgctgaggggcttgcctgaagcgaggggattctaacattttcagagaaccttttggaaagaacaagcctacttcaataaatgaaggagaataaagaaaattcaagcccttcagtaacttcagcaaacctggaccacacaaagccatgttggtactgggataagaaagacttggctcatacaccctcacaacttgaaggacttgatccagccaccgaggcccggtaccgccgagagggcgctcggttcatctttgatgtgggcacacgtttggggctacactatgataccctggcaactggaataatttattttcatcgcttctatatgtttcattccttcaagcaattcccaagatatcaggaggctcacaaagaggcctttatttatctagctcaaagtagacactatcacaatcttgtttgttactccttttactaaaatagttcaaatcaatgtttttaccacactatcaaaaagttctatttcttcttgtctccccacgtcagagtggttgaatagaaggtagaaacaggccgggagtccacgggctcccagctctaaacggcgccagggcaggaaggggtggctccaggtctcactgtggcaccttctacagaaaatagacgtagctgccgggcccggggacagaaaccagacgttccagtccatctccaaaaagcagcacaaatactttgccccacagtatgaaaaatatacacctctaccgctctgcagtcatgcatttagttttaagaaaaaaaaaaaatcagtagtatgtatcttgtttcctcaagtttcaagaaaaaaaaaatgaaaggtcacttttttctctttaaacactgatgtgtagctagtaacttggataaaaaggtgccaccctacaaaatgtgctcagcatgttctgaggccaggatgggcttggccacctgggctggggcgaaaggagacctccatctgtcacagtggaaactgaagccgagtgccagtgccgcgtccggcttcaagatcaagagtcagagcctttgaaatggaaagggggcatctgaaagggcacccccactgggggctttcagagctaaggctccagaaggaagggggtcgccctgctagtgacggagctgggagtcaccctgagctacagcacgcccagatttcccctgtgggaagccccatctgaccttctacagcccacggctctgcaactgccacctgtactcaggtacatggcgtcgctgctgctggcttttaaaatcagctattagtttgagatgtgacagtcgccgacagggttctgtcctagaaagccatcccagtgccgtgttggctcag

SEQ ID NO: 374093 - DNA, 691 bp, Homo sapiens
aggtccccgacattccatatacaagatggccgcagtcggcaaggagagacgtcgctgaggggcttgcctgaagcgaggggattctaacattttcagagaaccttttggaaagaacaagcctacttcaataaatgaaggagaataaagaaaattcaagcccttcagtaacttcagcaaacctggaccacacaaagccatgttggtactgggataagaaagacttggctcatacaccctcacaacttgaaggacttgatccagccaccgaggcccggtaccgccgagagggcgctcggttcatctttgatgtgggcacacgtttggggctacactatgataccctggcaactggaataatttattttcatcgcttctatatgtttcattccttcaagcaattcccaagatatgtgacaggagcctgttgcctctttctggctgggaaagtagaagaaacaccaaaaaaatgtaaagatatcatcaaaacagctcgtagtttattaaatgatgtacaatttggccagtttggagatgacccaaaggaggaagtaatggttctggagagaatcttactgcagaccatcaagtttgatttacaggtagaacatccataccagttcctactaaaatatgcaaagcaactcaaagtgtgataagtacaaaattcaataagatagttgtaaaaggcggg

SEQ ID NO: 374094 - DNA, 493 bp, Homo sapiens
cctagttttagaagtttcaatagcagttcctactcatatatgcaaagcaactcaaaggtgataaaaacaaaattcaaaagttggttcaaatggcatggacatttgtaaatgacagtctctgcaccaccttgtcactgcagtgggaaccagagatcatagcagtagcagtgatgtatctcgcaggacgtttgtgcaaatttgaaatacaagaatggacctccaaacccatgtataggagatggtgggagcagtttgttcaagatgtcccggtcgacgttttggaagacatctgccaccaaatcctggatctttactcacaaggaaaacaacagatgcctcatcacaccccccatcagctgcaacagcccccatctcttcagcctacaccacaagtgccgcaagtacagcagtcacagccgtctcaaagctccgaaccatcccagccccagcagaaggacccccaatgctattgaaacttctaaaactaggggtt

SEQ ID NO: 374095 - DNA, 3423 bp, Homo sapiens
aggtccccgacattccatatacaagatggccgcagtcggcaaggagagacgtcgctgaggggcttgcctgaagcgaggggattctaacattttcagagaaccttttggaaagaacaagcctacttcaataaatgaaggagaataaagaaaattcaagcccttcagtaacttcagcaaacctggaccacacaaagccatgttggtactgggataagaaagacttggctcatacaccctcacaacttgaaggacttgatccagccaccgaggcccggtaccgccgagagggcgctcggttcatctttgatgtgggcacacgtttggggctacactatgataccctggcaactggaataatttattttcatcgcttctatatgtttcattccttcaagcaattcccaagatatgtgacaggagcctgttgcctctttctggctgggaaagtagaagaaacaccaaaaaaatgtaaagatatcatcaaaacagctcgtagtttattaaatgatgtacaatttggccagtttggagatgacccaaaggaggaagtaatggttctggagagaatcttactgcagaccatcaagtttgatttacaggtagaacatccataccagttcctactaaaatatgcaaagcaactcaaaggtgataaaaacaaaattcaaaagttggttcaaatggcatggacatttgtaaatgacagtctctgcaccaccttgtcactgcagtgggaaccagagatcatagcagtagcagtgatgtatctcgcaggacgtttgtgcaaatttgaaatacaagaatggacctccaaacccatgtataggagatggtgggagcagtttgttcaagatgtcccggtcgacgttttggaagacatctgccaccaaatcctggatctttactcacaaggaaaacaacagatgcctcatcacaccccccatcagctgcaacagcccccatctcttcagcctacaccacaagtgccgcaagtacagcagtcacagccgtctcaaagctccgaaccatcccagccccagcagaaggaccccccccctcctcctccagggttgggcctgccgccagccagctacccacctcctgccgtcccccctggaggacagcctcctgtgcccccgcccattcccccacccggcatgcctccagttggggggctggggcgggcagcctggatgagataacgtgagccttttttccctctttgtttttttaacaagattttctaatcgacttgcagagtagttgaagtgggtaagcagcagggtaccttgtataatgcacgacagttgcagtatgggaagaatggaccgggcccctgggataaaatcagagtggtcctcacacctagaggacggggacaaccagctttcagagtagcctcatcagtgcccttgcagtctgactgtgtacacttggttcagctaatgtctgagagtcctgcactgggttactttatactagtgaggacgttaaccagccatattggctcaataaatagcttcggtaaggagttaatttccttctagaaatcagtgcctatttttcctggaaactcaattttaaatagtccaattccatctgaagccaagctgttgtcattttcattcggtgacattctctcccatgacacccagaaggggcagaagaaccacatttttcatttatagatgtttgcatcctttgtattaaaattattttgaaggggttgcctcattggatggctttttttttttcctccagggagaaggggagaaatgtacttggaaattaatgtatgtttacatctctttgcaaattcctgtacatagagatatattttttaagtgtgaatgtaacaacatactgtgaattccatcttggttacaaatgagactccttcagtcagttatccaaataaaagcagttctgaaactatccctttctttgttatgggtggaaggtggggctccaggccttcgcagtctgtggcttataaaatgtgcagaggccctccttccagaccctggggacgcgggagaggcctggctgcagctcacagcagccacagccaaccccactgcctcccaaggcactctgggtggatccgcacagctgcctgccaagccagcctgcccccatcctgtgcctgccttggtttcctttggaggacctggttgagttccaaaccagtttgaaactttgaagccttgctgcgtagaacgcacacaggaacccgggggcttggatttgaaaccctttccacttctggcctgtgatgagacagaggcagctggaggagcagcggcctcactgtccaccttgaggggccacggctctgtctgtggaaggggccccgactgagcccccatctgcggtgcttgaggggccttggccctgtctctgcctgctgaccctgccacccacgacagaaacaagcactgagcacccagccaggaggctcacaaagaggcctttatttatctagctcaaagtagacactatcacaatcttgtttgttactccttttactaaaatagttcaaatcaatgtttttaccacactatcaaaaagttctatttcttcttgtctccccacgtcagagtggttgaatagaaggtagaaacaggccgggagtccacgggctcccagctctaaacggcgccagggcaggaaggggtggctccaggtctcactgtggcaccttctacagaaaatagacgtagctgccgggcccggggacagaaaccagacgttccagtccatctccaaaaagcagcacaaatactttgccccacagtatgaaaaatatacacctctaccgctctgcagtcatgcatttagttttaagaaaaaaaaaaaatcagtagtatgtatcttgtttcctcaagtttcaagaaaaaaaaaatgaaaggtcacttttttctctttaaacactgatgtgtagctagtaacttggataaaaaggtgccaccctacaaaatgtgctcagcatgttctgaggccaggatgggcttggccacctgggctggggcgaaaggagacctccatctgtcacagtggaaactgaagccgagtgccagtgccgcgtccggcttcaagatcaagagtcagagcctttgaaatggaaagggggcatctgaaagggcacccccactgggggctttcagagctaaggctccagaaggaagggggtcgccctgctagtgacggagctgggagtcaccctgagctacagcacgcccagatttcccctgtgggaagccccatctgaccttctacagcccacggctctgcaactgccacctgtactcaggtacatggcgtcgctgctgctggcttttaaaatcagctattagtttgagatgtgacagtcgccgacagggttctgtcctagaaagccatcccagtgccgtgttggctcag

SEQ ID NO: 374096 - DNA, 3414 bp, Homo sapiens
ttcttaaaatctaaaccctttaaaatcagtaaggggacttggtcgctgaggggcttgcctgaagcgaggggattctaacattttcagagaaccttttggaaagaacaagcctacttcaataaatgaaggagaataaagaaaattcaagcccttcagtaacttcagcaaacctggaccacacaaagccatgttggtactgggataagaaagacttggctcatacaccctcacaacttgaaggacttgatccagccaccgaggcccggtaccgccgagagggcgctcggttcatctttgatgtgggcacacgtttggggctacactatgataccctggcaactggaataatttattttcatcgcttctatatgtttcattccttcaagcaattcccaagatatgtgacaggagcctgttgcctctttctggctgggaaagtagaagaaacaccaaaaaaatgtaaagatatcatcaaaacagctcgtagtttattaaatgatgtacaatttggccagtttggagatgacccaaaggaggaagtaatggttctggagagaatcttactgcagaccatcaagtttgatttacaggtagaacatccataccagttcctactaaaatatgcaaagcaactcaaaggtgataaaaacaaaattcaaaagttggttcaaatggcatggacatttgtaaatgacagtctctgcaccaccttgtcactgcagtgggaaccagagatcatagcagtagcagtgatgtatctcgcaggacgtttgtgcaaatttgaaatacaagaatggacctccaaacccatgtataggagatggtgggagcagtttgttcaagatgtcccggtcgacgttttggaagacatctgccaccaaatcctggatctttactcacaaggaaaacaacagatgcctcatcacaccccccatcagctgcaacagcccccatctcttcagcctacaccacaagtgccgcaagtacagcagtcacagccgtctcaaagctccgaaccatcccagccccagcagaaggaccccccccctcctcctccagggttgggcctgccgccagccagctacccacctcctgccgtcccccctggaggacagcctcctgtgcccccgcccattcccccacccggcatgcctccagttggggggctggggcgggcagcctggatgagataacgtgagccttttttccctctttgtttttttaacaagattttctaatcgacttgcagagtagttgaagtgggtaagcagcagggtaccttgtataatgcacgacagttgcagtatgggaagaatggaccgggcccctgggataaaatcagagtggtcctcacacctagaggacggggacaaccagctttcagagtagcctcatcagtgcccttgcagtctgactgtgtacacttggttcagctaatgtctgagagtcctgcactgggttactttatactagtgaggacgttaaccagccatattggctcaataaatagcttcggtaaggagttaatttccttctagaaatcagtgcctatttttcctggaaactcaattttaaatagtccaattccatctgaagccaagctgttgtcattttcattcggtgacattctctcccatgacacccagaaggggcagaagaaccacatttttcatttatagatgtttgcatcctttgtattaaaattattttgaaggggttgcctcattggatggctttttttttttcctccagggagaaggggagaaatgtacttggaaattaatgtatgtttacatctctttgcaaattcctgtacatagagatatattttttaagtgtgaatgtaacaacatactgtgaattccatcttggttacaaatgagactccttcagtcagttatccaaataaaagcagttctgaaactatccctttctttgttatgggtggaaggtggggctccaggccttcgcagtctgtggcttataaaatgtgcagaggccctccttccagaccctggggacgcgggagaggcctggctgcagctcacagcagccacagccaaccccactgcctcccaaggcactctgggtggatccgcacagctgcctgccaagccagcctgcccccatcctgtgcctgccttggtttcctttggaggacctggttgagttccaaaccagtttgaaactttgaagccttgctgcgtagaacgcacacaggaacccgggggcttggatttgaaaccctttccacttctggcctgtgatgagacagaggcagctggaggagcagcggcctcactgtccaccttgaggggccacggctctgtctgtggaaggggccccgactgagcccccatctgcggtgcttgaggggccttggccctgtctctgcctgctgaccctgccacccacgacagaaacaagcactgagcacccagccaggaggctcacaaagaggcctttatttatctagctcaaagtagacactatcacaatcttgtttgttactccttttactaaaatagttcaaatcaatgtttttaccacactatcaaaaagttctatttcttcttgtctccccacgtcagagtggttgaatagaaggtagaaacaggccgggagtccacgggctcccagctctaaacggcgccagggcaggaaggggtggctccaggtctcactgtggcaccttctacagaaaatagacgtagctgccgggcccggggacagaaaccagacgttccagtccatctccaaaaagcagcacaaatactttgccccacagtatgaaaaatatacacctctaccgctctgcagtcatgcatttagttttaagaaaaaaaaaaaatcagtagtatgtatcttgtttcctcaagtttcaagaaaaaaaaaatgaaaggtcacttttttctctttaaacactgatgtgtagctagtaacttggataaaaaggtgccaccctacaaaatgtgctcagcatgttctgaggccaggatgggcttggccacctgggctggggcgaaaggagacctccatctgtcacagtggaaactgaagccgagtgccagtgccgcgtccggcttcaagatcaagagtcagagcctttgaaatggaaagggggcatctgaaagggcacccccactgggggctttcagagctaaggctccagaaggaagggggtcgccctgctagtgacggagctgggagtcaccctgagctacagcacgcccagatttcccctgtgggaagccccatctgaccttctacagcccacggctctgcaactgccacctgtactcaggtacatggcgtcgctgctgctggcttttaaaatcagctattagtttgagatgtgacagtcgccgacagggttctgtcctagaaagccatcccagtgccgtgttggctcag

SEQ ID NO: 374097 - DNA, 4701 bp, Homo sapiens
aggtccccgacattccatatacaagatggccgcagtcggcaaggagagacgtcgctgaggggcttgcctgaagcgaggggattctaacattttcagagaaccttttggaaagaacaagcctacttcaataaatgaaggagaataaagaaaattcaagcccttcagtaacttcagcaaacctggaccacacaaagccatgttggtactgggataagaaagacttggctcatacaccctcacaacttgaaggacttgatccagccaccgaggcccggtaccgccgagagggcgctcggttcatctttgatgtgggcacacgtttggggctacactatgataccctggcaactggaataatttattttcatcgcttctatatgtttcattccttcaagcaattcccaagatatgtgacaggagcctgttgcctctttctggctgggaaagtagaagaaacaccaaaaaaatgtaaagatatcatcaaaacagctcgtagtttattaaatgatgtacaatttggccagtttggagatgacccaaaggaggaagtaatggttctggagagaatcttactgcagaccatcaagtttgatttacaggtagaacatccataccagttcctactaaaatatgcaaagcaactcaaaggtaagaagaaagttttcagaagaattttttcattctgaaatcaagtctttataatttgatgacactcaaattacgcttctcaaaagcggaaaacaaagtttgatgtgtgaaataccaagggcatggcttgctcagtcaattcagcattgcagctgctaatgctgtttccttttatgtataaacaggctctgtcatccagttgccaagtgatgggagaggcaggaaaatgaggcagaattttttaaatggactaataaacttagccttggagccaggttttccatacatggtggttcagcgtaggtcatgaggaggaagaaggggtaggatgtggacccacatcattcatccttgtttcccacgcaaaagctctttgctgtgtatttgagtggtgctgaacacgtggtaggtttttaataaatacttgatgctgcctgtgaatttttctattgctattaatttacctttttgtccccatttctaggtgataaaaacaaaattcaaaagttggttcaaatggcatggacatttgtaaatgacaggtatacatgttcaaatgttgattaattacagtattttaaaataggcagagactttatggaccatttcatctaaacccctcattttgtgtcagaagaaactgacttgccctggcttgaggagccagttaatggcaaagctggggctgacgtccaggtcatctgcttcccggcagagggtttccttctgccctgccgtgtcatggtgttgtgaggtgctgaaattttatcaccagtctgaaacataagtccaaaacaatacactggagaattttgaaaactaattacttagagcccatttggttttgcaaaaatatacttcctggtatagttttagagccttaacactcttttgagaggccagggatctaatgaggggccgtggtgggaaacagaatgcctgtgaatggagttgctgccagccccatcccactgcagtcagtgaagcttctcttacatttgacttcctccataagatttcatttgaagaaacagttgagtggctaggatttcaccagtttaaataacataagtcattttcattggtgtagcaatttttggatgtgctagaattcttctgattctttaaggaatagagaaattactaactatggttaaagtaacttagtcgggtacctttagaagagtaaagacttgagtttatttatttatagtactttaattaaatttaggggagaataagcaaattaatggttagttatggcatctccatgcactggtttaatcataaatattagatcatattatctaaccttttttttttcttgttgaactagtctctgcaccaccttgtcactgcagtgggaaccagagatcatagcagtagcagtgatgtatctcgcaggacgtttgtgcaaatttgaaatacaagaatggacctccaaacccatgtataggagatggtgggagcagtttgttcaagatgtcccggtcgacgttttggaagacatctgccaccaaatcctggatctttactcacaaggaaaacaacagatgcctcatcacaccccccatcagctgcaacagcccccatctcttcagcctacaccacaagtgccgcaagtacagcagtcacagccgtctcaaagctccgaaccatcccagccccagcagaaggaccccccccctcctcctccagggttgggcctgccgccagccagctacccacctcctgccgtcccccctggaggacagcctcctgtgcccccgcccattcccccacccggcatgcctccagttggggggctggggcgggcagcctggatgagataacgtgagccttttttccctctttgtttttttaacaagattttctaatcgacttgcagagtagttgaagtgggtaagcagcagggtaccttgtataatgcacgacagttgcagtatgggaagaatggaccgggcccctgggataaaatcagagtggtcctcacacctagaggacggggacaaccagctttcagagtagcctcatcagtgcccttgcagtctgactgtgtacacttggttcagctaatgtctgagagtcctgcactgggttactttatactagtgaggacgttaaccagccatattggctcaataaatagcttcggtaaggagttaatttccttctagaaatcagtgcctatttttcctggaaactcaattttaaatagtccaattccatctgaagccaagctgttgtcattttcattcggtgacattctctcccatgacacccagaaggggcagaagaaccacatttttcatttatagatgtttgcatcctttgtattaaaattattttgaaggggttgcctcattggatggctttttttttttcctccagggagaaggggagaaatgtacttggaaattaatgtatgtttacatctctttgcaaattcctgtacatagagatatattttttaagtgtgaatgtaacaacatactgtgaattccatcttggttacaaatgagactccttcagtcagttatccaaataaaagcagttctgaaactatccctttctttgttatgggtggaaggtggggctccaggccttcgcagtctgtggcttataaaatgtgcagaggccctccttccagaccctggggacgcgggagaggcctggctgcagctcacagcagccacagccaaccccactgcctcccaaggcactctgggtggatccgcacagctgcctgccaagccagcctgcccccatcctgtgcctgccttggtttcctttggaggacctggttgagttccaaaccagtttgaaactttgaagccttgctgcgtagaacgcacacaggaacccgggggcttggatttgaaaccctttccacttctggcctgtgatgagacagaggcagctggaggagcagcggcctcactgtccaccttgaggggccacggctctgtctgtggaaggggccccgactgagcccccatctgcggtgcttgaggggccttggccctgtctctgcctgctgaccctgccacccacgacagaaacaagcactgagcacccagccaggaggctcacaaagaggcctttatttatctagctcaaagtagacactatcacaatcttgtttgttactccttttactaaaatagttcaaatcaatgtttttaccacactatcaaaaagttctatttcttcttgtctccccacgtcagagtggttgaatagaaggtagaaacaggccgggagtccacgggctcccagctctaaacggcgccagggcaggaaggggtggctccaggtctcactgtggcaccttctacagaaaatagacgtagctgccgggcccggggacagaaaccagacgttccagtccatctccaaaaagcagcacaaatactttgccccacagtatgaaaaatatacacctctaccgctctgcagtcatgcatttagttttaagaaaaaaaaaaaatcagtagtatgtatcttgtttcctcaagtttcaagaaaaaaaaaatgaaaggtcacttttttctctttaaacactgatgtgtagctagtaacttggataaaaaggtgccaccctacaaaatgtgctcagcatgttctgaggccaggatgggcttggccacctgggctggggcgaaaggagacctccatctgtcacagtggaaactgaagccgagtgccagtgccgcgtccggcttcaagatcaagagtcagagcctttgaaatggaaagggggcatctgaaagggcacccccactgggggctttcagagctaaggctccagaaggaagggggtcgccctgctagtgacggagctgggagtcaccctgagctacagcacgcccagatttcccctgtgggaagccccatctgaccttctacagcccacggctctgcaactgccacctgtactcaggtacatggcgtcgctgctgctggcttttaaaatcagctattagtttgagatgtgacagtcgccgacagggttctgtcctagaaagccatcccagtgccgtgttggctcag

SEQ ID NO: 374098 - DNA, 2639 bp, Homo sapiens
ttagtcagttcttggcctcaccctgagggcaggaaaggaatccatgagcagagacggtggccaagggcctggggctgagcaacgtttggaagacatctgccaccaaatcctggatctttactcacaaggaaaacaacagatgcctcatcacaccccccatcagctgcaacagcccccatctcttcagcctacaccacaagtgccgcaagtacagcagtcacagccgtctcaaagctccgaaccatcccagccccagcagaaggaccccccccctcctcctccagggttgggcctgccgccagccagctacccacctcctgccgtcccccctggaggacagcctcctgtgcccccgcccattcccccacccggcatgcctccagttggggggctggggcgggcagcctggatgagataacgtgagccttttttccctctttgtttttttaacaagattttctaatcgacttgcagagtagttgaagtgggtaagcagcagggtaccttgtataatgcacgacagttgcagtatgggaagaatggaccgggcccctgggataaaatcagagtggtcctcacacctagaggacggggacaaccagctttcagagtagcctcatcagtgcccttgcagtctgactgtgtacacttggttcagctaatgtctgagagtcctgcactgggttactttatactagtgaggacgttaaccagccatattggctcaataaatagcttcggtaaggagttaatttccttctagaaatcagtgcctatttttcctggaaactcaattttaaatagtccaattccatctgaagccaagctgttgtcattttcattcggtgacattctctcccatgacacccagaaggggcagaagaaccacatttttcatttatagatgtttgcatcctttgtattaaaattattttgaaggggttgcctcattggatggctttttttttttcctccagggagaaggggagaaatgtacttggaaattaatgtatgtttacatctctttgcaaattcctgtacatagagatatattttttaagtgtgaatgtaacaacatactgtgaattccatcttggttacaaatgagactccttcagtcagttatccaaataaaagcagttctgaaactatccctttctttgttatgggtggaaggtggggctccaggccttcgcagtctgtggcttataaaatgtgcagaggccctccttccagaccctggggacgcgggagaggcctggctgcagctcacagcagccacagccaaccccactgcctcccaaggcactctgggtggatccgcacagctgcctgccaagccagcctgcccccatcctgtgcctgccttggtttcctttggaggacctggttgagttccaaaccagtttgaaactttgaagccttgctgcgtagaacgcacacaggaacccgggggcttggatttgaaaccctttccacttctggcctgtgatgagacagaggcagctggaggagcagcggcctcactgtccaccttgaggggccacggctctgtctgtggaaggggccccgactgagcccccatctgcggtgcttgaggggccttggccctgtctctgcctgctgaccctgccacccacgacagaaacaagcactgagcacccagccaggaggctcacaaagaggcctttatttatctagctcaaagtagacactatcacaatcttgtttgttactccttttactaaaatagttcaaatcaatgtttttaccacactatcaaaaagttctatttcttcttgtctccccacgtcagagtggttgaatagaaggtagaaacaggccgggagtccacgggctcccagctctaaacggcgccagggcaggaaggggtggctccaggtctcactgtggcaccttctacagaaaatagacgtagctgccgggcccggggacagaaaccagacgttccagtccatctccaaaaagcagcacaaatactttgccccacagtatgaaaaatatacacctctaccgctctgcagtcatgcatttagttttaagaaaaaaaaaaaatcagtagtatgtatcttgtttcctcaagtttcaagaaaaaaaaaatgaaaggtcacttttttctctttaaacactgatgtgtagctagtaacttggataaaaaggtgccaccctacaaaatgtgctcagcatgttctgaggccaggatgggcttggccacctgggctggggcgaaaggagacctccatctgtcacagtggaaactgaagccgagtgccagtgccgcgtccggcttcaagatcaagagtcagagcctttgaaatggaaagggggcatctgaaagggcacccccactgggggctttcagagctaaggctccagaaggaagggggtcgccctgctagtgacggagctgggagtcaccctgagctacagcacgcccagatttcccctgtgggaagccccatctgaccttctacagcccacggctctgcaactgccacctgtactcaggtacatggcgtcgctgctgctggcttttaaaatcagctattagtttgagatgtgacagtcgccgacagggttctgtcctagaaagccatcccagtgccgtgttggctcag

SEQ ID NO: 374099 - DNA, 1521 bp, Homo sapiens
aggtccccgacattccatatacaagatggccgcagtcggcaaggagagacgtcgctgaggggcttgcctgaagcgaggggattctaacattttcagagaaccttttggaaagaacaagcctacttcaataaatgaaggagaataaagaaaattcaagcccttcagtaacttcagcaaacctggaccacacaaagccatgttggtactgggataagaaagacttggctcatacaccctcacaacttgaaggacttgatccagccaccgaggcccggtaccgccgagagggcgctcggttcatctttgatgtgggcacacgtttggggctacactatgataccctggcaactggaataatttattttcatcgcttctatatgtttcattccttcaagcaattcccaagatatgtgacaggagcctgttgcctctttctggctgggaaagtagaagaaacaccaaaaaaatgtaaagatatcatcaaaacagctcgtagtttattaaatgatgtacaatttggccagtttggagatgacccaaaggaggaagtaatggttctggagagaatcttactgcagaccatcaagtttgatttacaggtagaacatccataccagttcctactaaaatatgcaaagcaactcaaaggtgataaaaacaaaattcaaaagttggttcaaatggcatggacatttgtaaatgacagtctctgcaccaccttgtcactgcagtgggaaccagagatcatagcagtagcagtgatgtatctcgcaggacgtttgtgcaaatttgaaatacaagaatggacctccaaacccatgtataggagatggtgggagcagtttgttcaagatgtcccggtcgacgttttggaagacatctgccaccaaatcctggatctttactcacaaggaaaacaacagatgcctcatcacaccccccatcagctgcaacagcccccatctcttcagcctacaccacaagtgccgcaagtacagcagtcacagccgtctcaaagctccgaaccatcccagccccagcagaaggacccccagcaaccagcccagcagcagcagccagcccaacagcccaagaaaccctctccgcagcccagttctccccgacaggttaagcgagccgtggttgtttctcccaaagaagagaacaaagcagcaggtaatttcctgttctgatgtttttttagttttatgtgtttatatgcaaaactttaaattcttagccaacattgtttcttttcagatctaaattggccttaaatcttaactttagagctcatacaaaacttttccatcagcattgtctttctgttcatcacctgatcatagattctaaaattgtgctcttacgaagctatcagtacagaaaacattactggcaataaaaatgtactcagtaacatatataaaagtataattatggctgtaggagaactgttgctgcaattttatttttagagactatttacccccatcacagcagcaggagtcctctcccaagcac

SEQ ID NO: 374100 - DNA, 253 bp, Homo sapiens
attcatgtgaagaagtatgagtggttttctaatctgctttttctttgtagaaccaccaccacctaaaatccccaaaattgagaccactcatccaccgttgcctccagcccacccacctccaggtaagcatctgctgaagcagcttggccagctgtgcacatcgcctctgaatgttggacgcagcaggtcctgggaacttagaaaagggagactggggcccagattgacaatgtcagccacaggcaggaatctt

SEQ ID NO: 374101 - DNA, 248 bp, Homo sapiens
gtatctgggactacaggcacacaccatcatgcctgcctaatttttgtatttttagtagagacagggtttcttcatgttggccaggctggtctcaaactccagacctcaggtgatctgcctgccttggcttcccaaagtgctaggattacaggcatgagccactacacctggcctgttatatgtattttctgattataaaagtaacaggcatagctgcagtattcacaattgctaaaagatggatacaa

SEQ ID NO: 374102 - DNA, 3246 bp, Homo sapiens
acgtctacccattcttatttctgcagcatatatagcagtgacgaggatgatgaggactttgagatgtgtgaccatgactatgatgggctgcttcccaagtctggaaagcgtcacttggggaaaacaaggtggacccgggaagaggatgaaaaactgaagaagctggtggaacagaatggaacagatgactggaaagttattgccaattatctcccgaatcgaacagatgtgcagtgccagcaccgatggcagaaagtactaaaccctgagctcatcaagggtccttggaccaaagaagaagatcagagagtgatagagcttgtacagaaatacggtccgaaacgttggtctgttattgccaagcacttaaaggggagaattggaaaacaatgtagggagaggtggcataaccacttgaatccagaagttaagaaaacctcctggacagaagaggaagacagaattatttaccaggcacacaagagactggggaacagatgggcagaaatcgcaaagctactgcctggacgaactgataatgctatcaagaaccactggaattctacaatgcgtcggaaggtcgaacaggaaggttatctgcaggagtcttcaaaagccagccagccagcagtggccacaagcttccagaagaacagtcatttgatgggttttgctcaggctccgcctacagctcaactccctgccactggccagcccactgttaacaacgactattcctattaccacatttctgaagcacaaaatgtctccagtcatgttccataccctgtagcgttacatgtaaatatagtcaatgtccctcagccagctgccgcagccattcagagacactataatgatgaagaccctgagaaggaaaagcgaataaaggaattagaattgctcctaatgtcaaccgagaatgagctaaaaggacagcaggtgctaccattatgtgggccattactgaattctgacatctttagcgactgggcagccaactgggatggctccttgtgctttgcaacatacatagttaaccaacaaagacaataaaagagaagtgatgcccaacacagaaccacacatgcagctaccccgggtggcacagcaccaccattgccgaccacaccagacctcatggagacagtgcacctgtttcctgtttgggagaacaccactccactccatctctgccagcggatcctggctccctacctgaagaaagcgcctcgccagcaaggtgcatgatcgtccaccagggcaccattctggataatgttaagaacctcttagaatttgcagaaacactccaatttatagattctttcttaaacacttccagtaaccatgaaaactcagacttggaaatgccttctttaacttccacccccctcattggtcacaaattgactgttacaacaccatttcatagagaccagactgtgaaaactcaaaaggaaaatactgtttttagaaccccagctatcaaaaggtcaatcttagaaagctctccaagaactcctacaccattcaaacatgcacttgcagctcaagaaattaaatacggtcccctgaagatgctacctcagacaccctctcatctagtagaagatctgcaggatgtgatcaaacaggaatctgatgaatctggaattgttgctgagtttcaagaaaatggaccacccttactgaagaaaatcaaacaagaggtggaatctccaactgataaatcaggaaacttcttctgctcacaccactgggaaggggacagtctgaatacccaactgttcacgcagacctcgcctgtggcagatgcaccgaatattcttacaagctccgttttaatggcaccagcatcagaagatgaagacaatgttctcaaagcatttacagtacctaaaaacaggtccctggcgagccccttgcagccttgtagcagtacctgggaacctgcatcctgtggaaagatggaggagcagatgacatcttccagtcaagctcgtaaatacgtgaatgcattctcagcccggacgctggtcatgtgagacatttccagaaaagcattatggttttcagaacacttcaagttgacttgggatatatcattcctcaacatgaaacttttcatgaatgggagaagaacctatttttgttgtggtacaacagttgagagcagcaccaagtgcatttagttgaatgaagtcttcttggatttcacccaactaaaaggatttttaaaaataaataacagtcttacctaaattattaggtaatgaattgtagccagttgttaatatcttaatgcagatttttttaaaaaaaacataaaatgatttatctgtattttaaaggatccaacagatcagtattttttcctgtgatgggttttttgaaatttgacacattaaaaggtactccagtatttcacttttctcgatcactaaacatatgcatatatttttaaaaatcagtaaaagcattactctaagtgtagacttaataccatgtgacatttaatccagattgtaaatgctcatttatggttaatgacattgaaggtacatttattgtaccaaaccattttatgagttttctgttagcttgctttaaaaattattactgtaagaaatagttttataaaaaattatatttttattcagtaatttaattttgtaaatgccaaatgaaaaacgttttttgctgctatggtcttagcctgtagacatgctgctagtatcagaggggcagtagagcttggacagaaagaaaagaaacttggtgttaggtaattgactatgcactagtatttcagactttttaattttatatatatatacattttttttccttctgcaatacatttgaaaacttgtttgggagactctgcattttttattgtggtttttttgttattgttggtttatacaagcatgcgttgcacttcttttttgggagatgtgtgttgttgatgttctatgttttgttttgagtgtagcctgactgttttataatttgggagttctgcatttgatccgcatcccctgtggtttctaagtgtatggtctcagaactgttgcatggatcctgtgtttgcaactggggagacagaaactgtggttgatagccagtcactgccttaagaacatttgatgcaagatggccagcactgaacttttgagatatgacggtgtacttactgccttgtagcaaaataaagatgtgcccttattttacctaaaaatg

SEQ ID NO: 374103 - DNA, 3249 bp, Homo sapiens
  misc_feature (105)..(106): n is a, c, g, or t
  misc_feature (151)..(151): n is a, c, g, or t
aatatcaacctgtttcctcctcctccttctcctcctcctccgtgacctcctcctcctctttctcctgagaaacttcgccccagcggtgcggcagcgccctgccgnngccggggagggacgcaggcaggcggcgggcagcgggaggcggcancccggtgcgtccccgcggctctcggcggagccccgccgcccgccgcgccatggcccgaagaccccggcacagcatatatagcagtgacgaggatgatgaggactttgagatgtgtgaccatgactatgatgggctgcttcccaagtctggaaagcgtcacttggggaaaacaaggtggacccgggaagagaatcgaacagatgtgcagtgccagcaccgatggcagaaagtactaaaccctgagctcatcaagggtccttggaccaaagaagaagatcagagagtgatagagcttgtacagaaatacggtccgaaacgttggtctgttattgccaagcacttaaaggggagaattggaaaacaatgtagggagaggtggcataaccacttgaatccagaagttaagaaaacctcctggacagaagaggaagacagaattatttaccaggcacacaagagactggggaacagatgggcagaaatcgcaaagctactgcctggacgaactgataatgctatcaagaaccactggaattctacaatgcgtcggaaggtcgaacaggaaggttatctgcaggagtcttcaaaagccagccagccagcagtggccacaagcttccagaagaacagtcatttgatgggttttgctcaggctccgcctacagctcaactccctgccactggccagcccactgttaacaacgactattcctattaccacatttctgaagcacaaaatgtctccagtcatgttccataccctgtagcgttacatgtaaatatagtcaatgtccctcagccagctgccgcagccattcagagacactataatgatgaagaccctgagaaggaaaagcgaataaaggaattagaattgctcctaatgtcaaccgagaatgagctaaaaggacagcaggtgctaccaacacagaaccacacatgcagctaccccgggtggcacagcaccaccattgccgaccacaccagacctcatggagacagtgcacctgtttcctgtttgggagaacaccactccactccatctctgccagcggatcctggctccctacctgaagaaagcgcctcgccagcaaggtgcatgatcgtccaccagggcaccattctggataatgttaagaacctcttagaatttgcagaaacactccaatttatagattctttcttaaacacttccagtaaccatgaaaactcagacttggaaatgccttctttaacttccacccccctcattggtcacaaattgactgttacaacaccatttcatagagaccagactgtgaaaactcaaaaggaaaatactgtttttagaaccccagctatcaaaaggtcaatcttagaaagctctccaagaactcctacaccattcaaacatgcacttgcagctcaagaaattaaatacggtcccctgaagatgctacctcagacaccctctcatctagtagaagatctgcaggatgtgatcaaacaggaatctgatgaatctggaattgttgctgagtttcaagaaaatggaccacccttactgaagaaaatcaaacaagaggtggaatctccaactgataaatcaggaaacttcttctgctcacaccactgggaaggggacagtctgaatacccaactgttcacgcagacctcgcctgtggcagatgcaccgaatattcttacaagctccgttttaatggcaccagcatcagaagatgaagacaatgttctcaaagcatttacagtacctaaaaacaggtccctggcgagccccttgcagccttgtagcagtacctgggaacctgcatcctgtggaaagatggaggagcagatgacatcttccagtcaagctcgtaaatacgtgaatgcattctcagcccggacgctggtcatgtgagacatttccagaaaagcattatggttttcagaacacttcaagttgacttgggatatatcattcctcaacatgaaacttttcatgaatgggagaagaacctatttttgttgtggtacaacagttgagagcagcaccaagtgcatttagttgaatgaagtcttcttggatttcacccaactaaaaggatttttaaaaataaataacagtcttacctaaattattaggtaatgaattgtagccagttgttaatatcttaatgcagatttttttaaaaaaaacataaaatgatttatctgtattttaaaggatccaacagatcagtattttttcctgtgatgggttttttgaaatttgacacattaaaaggtactccagtatttcacttttctcgatcactaaacatatgcatatatttttaaaaatcagtaaaagcattactctaagtgtagacttaataccatgtgacatttaatccagattgtaaatgctcatttatggttaatgacattgaaggtacatttattgtaccaaaccattttatgagttttctgttagcttgctttaaaaattattactgtaagaaatagttttataaaaaattatatttttattcagtaatttaattttgtaaatgccaaatgaaaaacgttttttgctgctatggtcttagcctgtagacatgctgctagtatcagaggggcagtagagcttggacagaaagaaaagaaacttggtgttaggtaattgactatgcactagtatttcagactttttaattttatatatatatacattttttttccttctgcaatacatttgaaaacttgtttgggagactctgcattttttattgtggtttttttgttattgttggtttatacaagcatgcgttgcacttcttttttgggagatgtgtgttgttgatgttctatgttttgttttgagtgtagcctgactgttttataatttgggagttctgcatttgatccgcatcccctgtggtttctaagtgtatggtctcagaactgttgcatggatcctgtgtttgcaactggggagacagaaactgtggttgatagccagtcactgccttaagaacatttgatgcaagatggccagcactgaacttttgagatatgacggtgtacttactgccttgtagcaaaataaagatgtgcccttattttacctaaaaatg

SEQ ID NO: 374104 - DNA, 1450 bp, Homo sapiens
ggcgcggtgaccggacagaccctcgcgaaggagttctaaggcgaagtccatggagcatatatagcagtgacgaggatgatgaggactttgagatgtgtgaccatgactatgatgggctgcttcccaagtctggaaagcgtcacttggggaaaacaaggtggacccgggaagaggatgaaaaactgaagaagctggtggaacagaatggaacagatgactggaaagttattgccaattatctcccgaatcgaacagatgtgcagtgccagcaccgatggcagaaagtactaaaccctgagctcatcaagggtccttggaccaaagaagaagatcagagagtgatagagcttgtacagaaatacggtccgaaacgttggtctgttattgccaagcacttaaaggggagaattggaaaacaatgtagggagaggtggcataaccacttgaatccagaagttaagaaaacctcctggacagaagaggaagacagaattatttaccaggcacacaagagactggggaacagatgggcagaaatcgcaaagctactgcctggacgaactgataatgctatcaagaaccactggaattctacaatgcgtcggaaggtcgaacaggaaggttatctgcaggagtcttcaaaagccagccagccagcagtggccacaagcttccagaagaacagtcatttgatgggttttgctcaggctccgcctacagctcaactccctgccactggccagcccactgttaacaacgactattcctattaccacatttctgaagcacaaaatgtctccagtcatgttccataccctgtagcgttacatgtaaatatagtcaatgtccctcagccagctgccgcagccattcagagacactataatgatgaagaccctgagaaggaaaagcgaataaaggaattagaattgctcctaatgtcaaccgagaatgagctaaaaggacagcaggtgctaccatgctaccagtaagactgtcatcatgtgcttgaatgaggggatagcagctttgcctcagtttacctaagcgctcttctcttctaaatattacacttagcaaggctccatatatccattcagaatgtctcaacacaagaagttgcttgtagtaaaatgtagttggtatcagattatatgctgattaaattggaagcagtctttttgtaattgcaataaaaatgcaatatccacttatgattgttatcatcaatttttttcttcagaaggactataatcagtttaaagactagcaaagataaaatgaatgaaaatctgcattttctacagagctatgtatctatatggtaccattttggtttttttctattattttgttaacctatattttcatattttataatttcagacatgatttgatgcatgttcagtatatacatgtaaaaggttatatataaaacctcttcataaat

SEQ ID NO: 374105 - DNA, 1101 bp, Homo sapiens
  misc_feature (105)..(106): n is a, c, g, or t
  misc_feature (151)..(151): n is a, c, g, or t
aatatcaacctgtttcctcctcctccttctcctcctcctccgtgacctcctcctcctctttctcctgagaaacttcgccccagcggtgcggcagcgccctgccgnngccggggagggacgcaggcaggcggcgggcagcgggaggcggcancccggtgcgtccccgcggctctcggcggagccccgccgcccgccgcgccatggcccgaagaccccggcacagcatatatagcagtgacgaggatgatgaggactttgagatgtgtgaccatgactatgatgggctgcttcccaagtctggaaagcgtcacttggggaaaacaaggtggacccgggaagaggatgaaaaactgaagaagctggtggaacagaatggaacagatgactggaaagttattgccaattatctcccgaatcgaacagatgtgcagtgccagcaccgatggcagaaagtactaaaccctgagctcatcaagggtccttggaccaaagaagaagatcagagagtgatagagcttgtacagaaatacggtccgaaacgttggtctgttattgccaagcacttaaaggggagaattggaaaacaatgtagggagaggtggcataaccacttgaatccagaagttaagaaaacctcctggacagaagaggaagacagaattatttaccaggcacacaagagactggggaacagatgggcagaaatcgcaaagctactgcctggacgaactgataatgctatcaagaaccactggaattctacaatgcgtcggaaggtcgaacaggaaggttatctgcaggagtcttctctctgttggccttggggttcaggggggcctcggtcagcagcactgggtgctcctccggggccacgcgcagctcgttgtagaaggtgtggtgccagatcttctccatgtcgtcccagttggtgacgatgccatgctcaatggggtacttcagggtcaggatgccacgcttgctctgggcctcgtcgcccacgtaggagtccatctggcccatgcccaccatgacgccctggtgtctaaagcgcccgacgatggaaggaaacacggctcggggagcgtcgtcgaaccaatatcg

SEQ ID NO: 374106 - DNA, 428 bp, Homo sapiens
attttataatatattttttattgtttttttcattgtgtttttctctaattaaggaacacttcccaaaatttaaagtgctcatcaacacctcccaaggatttttcaccatgttcctttagctgtttagccattttaaaggcctggctaaatttcacattaaaaggttttaaaaatttgtttagtgtattttatcagtaaagtgttttttttctctcagtcccagaacgaaacctcaggaagccaagtcccctgaagcatatgtagccctgaatgacgtggcctttgttttgtcttttgcatctaggtctccagtcatgttccataccctgtagcgttacatgtaaatatagtcaatgtccctcagccagctgccgcagccattcaggtaagatcattgatcattcactgttcaaagcaccacttttaag

SEQ ID NO: 374107 - DNA, 3321 bp, Homo sapiens
  misc_feature (105)..(106): n is a, c, g, or t
  misc_feature (151)..(151): n is a, c, g, or t
aatatcaacctgtttcctcctcctccttctcctcctcctccgtgacctcctcctcctctttctcctgagaaacttcgccccagcggtgcggcagcgccctgccgnngccggggagggacgcaggcaggcggcgggcagcgggaggcggcancccggtgcgtccccgcggctctcggcggagccccgccgcccgccgcgccatggcccgaagaccccggcacagcatatatagcagtgacgaggatgatgaggactttgagatgtgtgaccatgactatgatgggctgcttcccaagtctggaaagcgtcacttggggaaaacaaggtggacccgggaagaggatgaaaaactgaagaagctggtggaacagaatggaacagatgactggaaagttattgccaattatctcccgaatcgaacagatgtgcagtgccagcaccgatggcagaaagtactaaaccctgagctcatcaagggtccttggaccaaagaagaagatcagagagtgatagagcttgtacagaaatacggtccgaaacgttggtctgttattgccaagcacttaaaggggagaattggaaaacaatgtagggagaggtggcataaccacttgaatccagaagttaagaaaacctcctggacagaagaggaagacagaattatttaccaggcacacaagagactggggaacagatgggcagaaatcgcaaagctactgcctggacgaactgataatgctatcaagaaccactggaattctacaatgcgtcggaaggtcgaacaggaaggttatctgcaggagtcttcaaaagccagccagccagcagtggccacaagcttccagaagaacagtcatttgatgggttttgctcaggctccgcctacagctcaactccctgccactggccagcccactgttaacaacgactattcctattaccacatttctgaagcacaaaatgtctccagtcatgttccataccctgtagcgttacatgtaaatatagtcaatgtccctcagccagctgccgcagccattcagagacactataatgatgaagaccctgagaaggaaaagcgaataaaggaattagaattgctcctaatgtcaaccgagaatgagctaaaaggacagcaggtgctaccaacacagaaccacacatgcagctaccccgggtggcacagcaccaccattgccgaccacaccagacctcatggagacagtgcacctgtttcctgtttgggagaacaccactccactccatctctgccagcggatcctggctccctacctgaagaaagcgcctcgccagcaaggtgcatgatcgtccaccagggcaccattctggataatgttaagaacctcttagaatttgcagaaacactccaatttatagattctttcttaaacacttccagtaaccatgaaaactcagacttggaaatgccttctttaacttccacccccctcattggtcacaaattgactgttacaacaccatttcatagagaccagactgtgaaaactcaaaaggaaaatactgtttttagaaccccagctatcaaaaggtcaatcttagaaagctctccaagaactcctacaccattcaaacatgcacttgcagctcaagaaattaaatacggtcccctgaagatgctacctcagacaccctctcatctagtagaagatctgcaggatgtgatcaaacaggaatctgatgaatctggaattgttgctgagtttcaagaaaatggaccacccttactgaagaaaatcaaacaagaggtggaatctccaactgataaatcaggaaacttcttctgctcacaccactgggaaggggacagtctgaatacccaactgttcacgcagacctcgcctgtggcagatgcaccgaatattcttacaagctccgttttaatggcaccagcatcagaagatgaagacaatgttctcaaagcatttacagtacctaaaaacaggtccctggcgagccccttgcagccttgtagcagtacctgggaacctgcatcctgtggaaagatggaggagcagatgacatcttccagtcaagctcgtaaatacgtgaatgcattctcagcccggacgctggtcatgtgagacatttccagaaaagcattatggttttcagaacacttcaagttgacttgggatatatcattcctcaacatgaaacttttcatgaatgggagaagaacctatttttgttgtggtacaacagttgagagcagcaccaagtgcatttagttgaatgaagtcttcttggatttcacccaactaaaaggatttttaaaaataaataacagtcttacctaaattattaggtaatgaattgtagccagttgttaatatcttaatgcagatttttttaaaaaaaacataaaatgatttatctgtattttaaaggatccaacagatcagtattttttcctgtgatgggttttttgaaatttgacacattaaaaggtactccagtatttcacttttctcgatcactaaacatatgcatatatttttaaaaatcagtaaaagcattactctaagtgtagacttaataccatgtgacatttaatccagattgtaaatgctcatttatggttaatgacattgaaggtacatttattgtaccaaaccattttatgagttttctgttagcttgctttaaaaattattactgtaagaaatagttttataaaaaattatatttttattcagtaatttaattttgtaaatgccaaatgaaaaacgttttttgctgctatggtcttagcctgtagacatgctgctagtatcagaggggcagtagagcttggacagaaagaaaagaaacttggtgttaggtaattgactatgcactagtatttcagactttttaattttatatatatatacattttttttccttctgcaatacatttgaaaacttgtttgggagactctgcattttttattgtggtttttttgttattgttggtttatacaagcatgcgttgcacttcttttttgggagatgtgtgttgttgatgttctatgttttgttttgagtgtagcctgactgttttataatttgggagttctgcatttgatccgcatcccctgtggtttctaagtgtatggtctcagaactgttgcatggatcctgtgtttgcaactggggagacagaaactgtggttgatagccagtcactgccttaagaacatttgatgcaagatggccagcactgaacttttgagatatgacggtgtacttactgccttgtagcaaaataaagatgtgcccttattttacctaaaaatg

SEQ ID NO: 374108 - DNA, 3153 bp, Homo sapiens
ggcgcggtgaccggacagaccctcgcgaaggagttctaaggcgaagtccatggagcatatatagcagtgacgaggatgatgaggactttgagatgtgtgaccatgactatgatgggctgcttcccaagtctggaaagcgtcacttggggaaaacaaggtggacccgggaagaggatgaaaaactgaagaagctggtggaacagaatggaacagatgactggaaagttattgccaattatctcccgaatcgaacagatgtgcagtgccagcaccgatggcagaaagtactaaaccctgagctcatcaagggtccttggaccaaagaagaagatcagagagtgatagagcttgtacagaaatacggtccgaaacgttggtctgttattgccaagcacttaaaggggagaattggaaaacaatgtagggagaggtggcataaccacttgaatccagaagttaagaaaacctcctggacagaagaggaagacagaattatttaccaggcacacaagagactggggaacagatgggcagaaatcgcaaagctactgcctggacgaactgataatgctatcaagaaccactggaattctacaatgcgtcggaaggtcgaacaggaaggttatctgcaggagtcttcaaaagccagccagccagcagtggccacaagcttccagaagaacagtcatttgatgggttttgctcaggctccgcctacagctcaactccctgccactggccagcccactgttaacaacgactattcctattaccacatttctgaagcacaaaatgtctccagtcatgttccataccctgtagcgttacatgtaaatatagtcaatgtccctcagccagctgccgcagccattcagagacactataatgatgaagaccctgagaaggaaaagcgaataaaggaattagaattgctcctaatgtcaaccgagaatgagctaaaaggacagcaggtgctaccaacacagaaccacacatgcagctaccccgggtggcacagcaccaccattgccgaccacaccagacctcatggagacagtgcacctgtttcctgtttgggagaacaccactccactccatctctgccagcggatcctggctccctacctgaagaaagcgcctcgccagcaaggtgcatgatcgtccaccagggcaccattctggataatgttaagaacctcttagaatttgcagaaacactccaatttatagattctttcttaaacacttccagtaaccatgaaaactcagacttggaaatgccttctttaacttccacccccctcattggtcacaaattgactgttacaacaccatttcatagagaccagactgtgaaaactcaaaaggaaaatactgtttttagaaccccagctatcaaaaggtcaatcttagaaagctctccaagaactcctacaccattcaaacatgcacttgcagctcaagaaattaaatacggtcccctgaagatgctacctcagacaccctctcatctagtagaagatctgcaggatgtgatcaaacaggaatctgatgaatctggaattgttgctgagtttcaagaaaatggaccacccttactgaagaaaatcaaacaagaggtggaatctccaactgataaatcaggaaacttcttctgctcacaccactgggaaggggacagtctgaatacccaactgttcacgcagacctcgcctgtggcagatgcaccgaatattcttacaagctccgttttaatggcaccagcatcagaagatgaagacaatgttctcaaagcatttacagtacctaaaaacaggtccctggcgagccccttgcagccttgtagcagtacctgggaacctgcatcctgtggaaagatggaggagcagatgacatcttccagtcaagctcgtaaatacgtgaatgcattctcagcccggacgctggtcatgtgagacatttccagaaaagcattatggttttcagaacacttcaagttgacttgggatatatcattcctcaacatgaaacttttcatgaatgggagaagaacctatttttgttgtggtacaacagttgagagcagcaccaagtgcatttagttgaatgaagtcttcttggatttcacccaactaaaaggatttttaaaaataaataacagtcttacctaaattattaggtaatgaattgtagccagttgttaatatcttaatgcagatttttttaaaaaaaacataaaatgatttatctgtattttaaaggatccaacagatcagtattttttcctgtgatgggttttttgaaatttgacacattaaaaggtactccagtatttcacttttctcgatcactaaacatatgcatatatttttaaaaatcagtaaaagcattactctaagtgtagacttaataccatgtgacatttaatccagattgtaaatgctcatttatggttaatgacattgaaggtacatttattgtaccaaaccattttatgagttttctgttagcttgctttaaaaattattactgtaagaaatagttttataaaaaattatatttttattcagtaatttaattttgtaaatgccaaatgaaaaacgttttttgctgctatggtcttagcctgtagacatgctgctagtatcagaggggcagtagagcttggacagaaagaaaagaaacttggtgttaggtaattgactatgcactagtatttcagactttttaattttatatatatatacattttttttccttctgcaatacatttgaaaacttgtttgggagactctgcattttttattgtggtttttttgttattgttggtttatacaagcatgcgttgcacttcttttttgggagatgtgtgttgttgatgttctatgttttgttttgagtgtagcctgactgttttataatttgggagttctgcatttgatccgcatcccctgtggtttctaagtgtatggtctcagaactgttgcatggatcctgtgtttgcaactggggagacagaaactgtggttgatagccagtcactgccttaagaacatttgatgcaagatggccagcactgaacttttgagatatgacggtgtacttactgccttgtagcaaaataaagatgtgcccttattttacctaaaaatg

SEQ ID NO: 374109 - DNA, 2293 bp, Homo sapiens
  misc_feature (1)..(3): n is a, c, g, or t
  misc_feature (6)..(6): n is a, c, g, or t
  misc_feature (8)..(8): n is a, c, g, or t
  misc_feature (12)..(12): n is a, c, g, or t
  misc_feature (106)..(106): n is a, c, g, or t
nnnatngnttcngattcttcatcatggtgtgatctcagcagttttgaattctttgaagaagcagatttttcacctagccaacatcacacaggcaaagccctacagnttcagcaaagagagggcaatgggactaaacctgcaggagaacctagcccaagggtgaacaaacgtatgttgagtgagagttcacttgacccacccaaggtcttacctcctgcaaggcacagcacaattccactggtcatccttcgaaaaaaacggggccaggccagccccttagccactggagactgtagctccttcatatttgctgacgtcagcagttcaactcccaagcgttcccctgtcaaaagcctacccttctctccctcgcagttcttaaacacttccagtaaccatgaaaactcagacttggaaatgccttctttaacttccacccccctcattggtcacaaattgactgttacaacaccatttcatagagaccagactgtgaaaactcaaaaggaaaatactgtttttagaaccccagctatcaaaaggtcaatcttagaaagctctccaagaactcctacaccattcaaacatgcacttgcagctcaagaaattaaatacggtcccctgaagatgctacctcagacaccctctcatctagtagaagatctgcaggatgtgatcaaacaggaatctgatgaatctggaattgttgctgagtttcaagaaaatggaccacccttactgaagaaaatcaaacaagaggtggaatctccaactgataaatcaggaaacttcttctgctcacaccactgggaaggggacagtctgaatacccaactgttcacgcagacctcgcctgtggcagatgcaccgaatattcttacaagctccgttttaatggcaccagcatcagaagatgaagacaatgttctcaaagcatttacagtacctaaaaacaggtccctggcgagccccttgcagccttgtagcagtacctgggaacctgcatcctgtggaaagatggaggagcagatgacatcttccagtcaagctcgtaaatacgtgaatgcattctcagcccggacgctggtcatgtgagacatttccagaaaagcattatggttttcagaacacttcaagttgacttgggatatatcattcctcaacatgaaacttttcatgaatgggagaagaacctatttttgttgtggtacaacagttgagagcagcaccaagtgcatttagttgaatgaagtcttcttggatttcacccaactaaaaggatttttaaaaataaataacagtcttacctaaattattaggtaatgaattgtagccagttgttaatatcttaatgcagatttttttaaaaaaaacataaaatgatttatctgtattttaaaggatccaacagatcagtattttttcctgtgatgggttttttgaaatttgacacattaaaaggtactccagtatttcacttttctcgatcactaaacatatgcatatatttttaaaaatcagtaaaagcattactctaagtgtagacttaataccatgtgacatttaatccagattgtaaatgctcatttatggttaatgacattgaaggtacatttattgtaccaaaccattttatgagttttctgttagcttgctttaaaaattattactgtaagaaatagttttataaaaaattatatttttattcagtaatttaattttgtaaatgccaaatgaaaaacgttttttgctgctatggtcttagcctgtagacatgctgctagtatcagaggggcagtagagcttggacagaaagaaaagaaacttggtgttaggtaattgactatgcactagtatttcagactttttaattttatatatatatacattttttttccttctgcaatacatttgaaaacttgtttgggagactctgcattttttattgtggtttttttgttattgttggtttatacaagcatgcgttgcacttcttttttgggagatgtgtgttgttgatgttctatgttttgttttgagtgtagcctgactgttttataatttgggagttctgcatttgatccgcatcccctgtggtttctaagtgtatggtctcagaactgttgcatggatcctgtgtttgcaactggggagacagaaactgtggttgatagccagtcactgccttaagaacatttgatgcaagatggccagcactgaacttttgagatatgacggtgtacttactgccttgtagcaaaataaagatgtgcccttattttacctaaaaatg

SEQ ID NO: 374110 - DNA, 182 bp, Homo sapiens
agggagcaccacacacgaatgaggataatatccaaaatcaacttcgaattaattagactccaaagaccagcacacactgatgagagaatcagagatggaaaaccacctccacagaactgggccacagagattaccagtcataaaaagagaactgcacagaaccagaccgcagaaggcaccac

SEQ ID NO: 374111 - DNA, 360 bp, Homo sapiens
gtgaaaacacatataaaacaaaatcagcaaagggaaagacacatgggatgaagttcataaaaaaaaaaaaccacacacaagtttccaagagttctcccagtggagaacacagaggttgcacctaattcctccaataatgaattgtgacaacttgtgaaatgttgtctaaaggaaaagcttgagacttggtgcccagggttttcgttgagggctagttacataggtctaccctgccttgcacttaccaagatttcagactcccagaaggaaagtagatgttcaacataaactgcattgttagcacaaacagtttagacacaataagcccaccttgtcagggaatagtgggaaccctcttga

SEQ ID NO: 374112 - DNA, 748 bp, Homo sapiens
ggcaagggaggcaagaaagaatgttttatctgtagcattttgtgctgatagaaaaggcagggtccagtggaagaaggaggaaatggtacataatttcttcataaaaagagtaaggccagggagaagtgactgagtagacacctgtagctaaacagaggtggtgatgagtttatggtgcctccagcttctcatggccccacttgggaaattcctccagtaacattacactcactcactccttgaccatctacctttactcctctcctcatttccctgttaccaaaactatgtgccctacccagggacttctgggcagctcttttctcagatcatttctcaccctctctcctctactaacttagcctttcatactgaatcacattttccttaaaaaacagctgctgacagaagatgctacattttgtttcagggcctggtaaccatcaaggatgtgtcactgtgcttctctcaggaggagtggcggagcctggacccctctcagacagacttttatggagaatatgtcatgcaggaaaactgtgggatagtagtctctctgagtaagcatgaccttctccagccactagaagattggactctgggaggacggagccatctgcttcagggctattggatagtgtctgtctaggactctttatgtggcagggaatctgtctatgcttccgctggagaaagaacactagggccaatcccaagagaatgagagtaaatatcattaaaaaaaaaa

SEQ ID NO: 374113 - DNA, 923 bp, Homo sapiens
agcgggctggctccgccggtcgccggctcccagacgcaagcggagggcggaggggaggggcaggcggcgcccgggagggaggcaccgggccgcgggccaagcctaccgggggtcacaatttgggtctgcagcagaaatgctttcagaacagacagcagcgctggggacaagatgggaatcaatgaatgtacagctggatggagcagagccccaggtggaaaggggaagccaggaagagcggccatggagaacagtaccaggacctctggagcacctgtgctgtgaccttgaagaggagccacagtcccttcaggagaaggctcagtctgctccctgggttcctgcaattccccaggaggggaacactggagactgggagatggcagctgcacttcttgcggctggatcacagggcctggtaaccatcaaggatgtgtcactgtgcttctctcaggaggagtggcggagcctggacccctctcagacagacttttatggagaatatgtcatgcaggaaaactgtgggatagtagtctctctgagatttccaattcccaaactggacatgctttctcaactagaaggaggagaagaacaatgggtccctgacccccaggacttagaggagagggacattctgagggtcacatatacaggagatggaagtgaacatgagggggatacccctgaactagaagcagaacctcccagaatgttatccagcgtgtctgaagatactgttctctggaacccggagcatgatgagagctgggattccatgcccagcagctccagaggaatgctcctggggcccccttttcttcaggaagatagtttctcaaacctgctgtgtagcacagagatggattccctgttaagaccccacacatgcccccagtgtgggaaacagtttgtatgggggt

SEQ ID NO: 374114 - DNA, 941 bp, Homo sapiens
ggcaagggaggcaagaaagaatgttttatctgtagcattttgtgctgatagaaaaggcagggtccagtggaagaaggaggaaatggtacataatttcttcataaaaagagtaaggccagggagaagtgactgagtagacacctgtagctaaacagaggtggtgatgagtttatggtgcctccagcttctcatggccccacttgggaaattcctccagtaacattacactcactcactccttgaccatctacctttactcctctcctcatttccctgttaccaaaactatgtgccctacccagggacttctgggcagctcttttctcagatcatttctcaccctctctcctctactaacttagcctttcatactgaatcacattttccttaaaaaacagctgctgacagaagatgctacattttgtttcagggcctggtaaccatcaaggatgtgtcactgtgcttctctcaggaggagtggcggagcctggacccctctcagacagacttttatggagaatatgtcatgcaggaaaactgtgggatagtagtctctctgagatttccaattcccaaactggacatgctttctcaactagaaggaggagaagaacaatgggtccctgacccccaggacttagaggagagggacattctgagggtcacatatacaggagatggaagtgaacatgagggggatacccctgaactagaagcagaacctcccagaatgttatccagcgtgtctgaagatactgttctctggaacccggagcatgatgagagctgggattccatgcccagcagctccagaggaatgctcctggggcccccttttcttcaggaagatagtttctcaaacctgctgtgtagcacagagatggattccctgttaagaccccacacatgcccccagtgtgggaaacagtttgtatgggggt

SEQ ID NO: 374115 - DNA, 442 bp, Homo sapiens
tcagaaatatagaattgctgttgaactaattgacagctctattttcctttcccatgagcaggatttccaattcccaaactggacatgctttctcaactagaaggaggagaagaacaatgggtccctgacccccaggacttagaggagagggacattctgagggtcacatatacaggagatggaagtgaacatgagggggatacccctgaactagaagcagaacctcccagaatgttatccagcgtgtctgaagatactgttctctggaacccggagcatgatgagagctgggattccatgcccagcagctccagaggaatgctcctggggcccccttttcttcaggaagatagtttctcaaacctgctgtgtagcacagagatggattccctgttaagaccccacacatgcccccagtgtgggaaacagtttgtatgggggt

SEQ ID NO: 374116 - DNA, 1302 bp, Homo sapiens
ggggtatctttgcccatccttgcttagaccagtctagaccctctggccctctgcattcccagttccaaatgctagggatggagaatgtgcttgggcttgcataagacggggctatgcccctggctctcctcagctgtagtcagtattgctagctgcccacaactcacgccagtgggtgaagatgctggtctcagagaaccagagcttggcaggccccctcatacacctcttggagaggtagatgctggtcaactatgcaccattacctgtgagcagagcttactcctctgccattctctctccaggccctcagcatcctcatgctccctcacaacatcccgtccagcctgagcctgctcaccagcatggtggatgacatgtggcattacgctggggaccagtccactgattttaactggtacacccgccgagccatgctggctgccatctacaacacaacagagctggtgatgatgcaggactcctctccagactttgaggacacttggcgcttcctggaaaaccgggttaatgatgcaatgaacatgggccacactgccaagcaggtaaagtccacaggagaggcactggtgcaaggactcatgggtgcagcagtgacgctcaagaacttgacaggtctaaaccagcgtcggtgagaggaaggggtataagctacaatgcctagaagagaatgagcggacagattgaaagagctttgaaaagtataaggtgccatccacataacctggtgttcacgagaacacactaaaggactcctgagtcactaccacagccacctggaaaccacaaggcatttgatgctaccgttctggtcagggattgggctgcttcttcagttcctaataccagaccaagcctcctgatgcctttctgcactgcaactgtgtgattgaaaaatgagatgttcatccaagcagtcaagccacagaaacccagcatgtccctgtcacaatctcatgggcaccttgatcatgtcttaaccttcccttaaccttggggctcccaagccagagtcaaggtctgacgccacctcaaggtgacagctcatctccagcacagcacaggcgtgtgcacacagaggtgttccttgcagccccctccctctcaggtgtcctgagatgctgctcctgggagccccctcagaaaactgcctcacctgagacaagtgcctgctggacagaggtgtgattccaggcctggtgtcacatgacaccagcatgcattgcaggattattagtgtattttgagtctgtaaaaataataaatatgtttgaagtagtt

SEQ ID NO: 374117 - DNA, 1067 bp, Homo sapiens
atgggactgaaacctggcagcctgtctctgacagctttagtcaggccagcgtcaggagctggtgggaccctcctccctagggctgagtaaaccgtggagcactgagcccctgcctttcactcagagacacactgttttcttttccctcttccaggaagaggaagacagaccagttcctgagggatgcagtggaaaccagactgagaatgctgatcccatacattgagcactggccccgggtaccaagtctatatccaggccccagagcaacaataatcctaatatttatcattctcagcacctttcactcagatgactttgtacactgttcagaacttagcttctcaatctctataaacccgacaatacttagtacacttggtaaagctgggtttcaaacttggacataccaaagagagtgactgagccatctgtgtctcagttcttggaaatgtgagtggtccgggtactggatcccatcctgggtggggttctcctagtggtctgagtgtgccaccaggtctgcagggaggaggaatccatgcaggaggttagaagagtcagaagattttattggctgtcttcacttgaataacagccctgtggcattttagatctcgagcactgggatttgtcaattgtcaatgtgatgcttggggactggcatattcgttgcaaggggttttttcaccttttctgaagcttcctttttcctctgttttaaagcatatcacagtatgggccattctctgagtgaagaaagtacagagtgaaagtacacccgaagtgagagggactcagacatcttgtgtcctttgctcagctggaagactactaagcacgtagtttcagtcattcagttgatagacatttgaacacttatggtggtgcctaaccccaggccgagtgtgactcattccaccttgcagttaaagcagtggaagtgcacgtatgaggccctcaactgccttcctgattcagcatagtgttttcttctgggctgcttcactaagagaaaaccttacagccaatccgcggaggacctctctgatcacctccccagtgga

SEQ ID NO: 374118 - DNA, 253 bp, Homo sapiens
gtaagtttaacgccacctaagggcagctcctctcaccaccacccttcctcaagtgttccttgcagccccctccctctcaggtgtcctgagatgctgctcctgggagccccctcagaaaactgcctcacctgagacaagtgcctgctggacagaggtgtgattccaggcctggtgtcacatgacaccagcatgcattgcaggattattagtgtattttgagtctgtaaaaataataaatatgtttgaagtagtt

SEQ ID NO: 374119 - DNA, 2219 bp, Homo sapiens
  misc_feature (1663)..(1663): n is a, c, g, or t
  misc_feature (1714)..(1714): n is a, c, g, or t
  misc_feature (2218)..(2219): n is a, c, g, or t
gtcgccgtgggcgacgtgcccgcttccaaaatggcggcggcggcggtatctggtgcgcttggccgggcgggctggaggctcctgcagctgcgatgcctgcccgtggcccgttgccgacaagccctggtgccgcgtgccttccatgcttcagctgtggggctaaggtcttcagatgagcagaagcagcagcctcccaactcattttctcagcagcattctgagacacagggggcagaaaaacctgatccagagtcttctcattcaccccccaggtatacagaccagggcggcgaggaggaggaggactatgaaagtgaggagcagttgcagcaccgcatcctgacggcagcccttgagtttgtgcccgcccacgggtggacagcagaggcgattgcagaaggagcccagtctctgggtctctccagtgcagcagccagcatgttcgggaaggatggcagtgagctaatactgcattttgtgacccagtgcaatacccggctcacacgtgtgctagaagaggagcagaagctggtacagttgggccaggcggagaagaggaagacagaccagttcctgagggatgcagtggaaaccagactgagaatgctgatcccatacattgagcactggccccgggccctcagcatcctcatgctccctcacaacatcccgtccagcctgagcctgctcaccagcatggtggatgacatgtggcattacgctggggaccagtccactgattttaactggtacacccgccgagccatgctggctgccatctacaacacaacagagctggtgatgatgcaggactcctctccagactttgaggacacttggcgcttcctggaaaaccgggttaatgatgcaatgaacatgggccacactgccaagcaggtaaagtccacaggagaggcactggtgcaaggactcatgggtgcagcagtgacgctcaagaacttgacaggtctaaaccagcgtcggtgagaggaaggggtataagctacaatgcctagaagagaatgagcggacagattgaaagagctttgaaaagtataaggtgccatccacataacctggtgttcacgagaacacactaaaggactcctgagtcactaccacagccacctggaaaccacaaggcatttgatgctaccgttctggtcagggattgggctgcttcttcagttcctaataccagaccaagcctcctgatgcctttctgcactgcaactgtgtgattgaaaaatgagatgttcatccaagcagtcaagccacagaaacccagcatgtccctgtcacaatctcatgggcaccttgatcatgtcttaaccttcccttaaccttggggctcccaagccagagtcaaggtctgacgccacctcaaggtgacagctcatctccagcacagcacaggcgtgtgcacacagaggtgttccttgcagccccctccctctcaggtgtcctgagatgctgctcctgggagccccctcagaaaactgcctcacctgagacaagtgcctgctggacagaggtgtgattccaggcctggtgtcacatgacaccagcatgcattgcaggattattagtgtattttgagtctgtaaaaataataaatatgtttgaagtagttaaaaaaaaaaaaaaaaaaaaaaaaaaaaanaaaaaaaaaaaaaaaaaaaaaaaaaaaaaaagaaggggaggggggcgcgcnacaacactaaatacacccccgaaggagggcgcccccaagaatctacggctcgcacgccacgtttgtttttcgaaaaaggagggcggccccatctaaggggagggcaagcattatatacagcgcaggaggcgcgcgggccgggcatggttacaacaacacacggcgagcggggaggaaacacaccgcgcacgaaggagggacacatctttgtgagaagaaagaaacccacccccaactcggggagggggggggggaacacccaatatgtgcgccgacacacactctccctcaagaaaagatatattataacaggcctcccgggggggatatcaatctaataagtcttatggcaggcggattatagagatgggtgttgattaccaccaacccagcggcgatatatagtcgccttccgatgaaaaaaatttgtgacccaaccagcagaagttatgataatacagcgacataatattactcaccgcggcggtgtgatcaatatatcgnn

SEQ ID NO: 374120 - DNA, 1681 bp, Homo sapiens
  misc_feature (1606)..(1606): n is a, c, g, or t
  misc_feature (1636)..(1637): n is a, c, g, or t
gtcgccgtgggcgacgtgcccgcttccaaaatggcggcggcggcggtatctggtgcgcttggccgggcgggctggaggctcctgcagctgcgatgcctgcccgtggcccgttgccgacaagccctggtgccgcgtgccttccatgcttcagctgtggggctaaggtcttcagatgagcagaagcagcagcctcccaactcattttctcagcagcattctgagacacagggggcagaaaaacctgatccagagtcttctcattcaccccccaggtatacagaccagggcggcgaggaggaggaggactatgaaagtgaggagcagttgcagcaccgcatcctgacggcagcccttgagtttgtgcccgcccacgggtggacagcagaggcgattgcagaaggagcccagtctctgggtctctccagtgcagcagccagcatgttcgggaaggatggcagtgagctaatactgcattttgtgacccagtgcaatacccggctcacacgtgtgctagaagaggagcagaagctggtacagttgggccaggcggagaagaggaagacagaccagttcctgagggatgcagtggaaaccagactgagaatgctgatcccatacattgagcactggccccgggccctcagcatcctcatgctccctcacaacatcccgtccagcctgagcctgctcaccagcatggtggatgacatgtggcattacgctggggaccagtccactgattttaactggtacacccgccgagccatgctggctgccatctacaacacaacagagctggtgatgatgcaggactcctctccagactttgaggacacttggcgcttcctggaaaaccgggttaatgatgcaatgaacatgggccacactgccaagcaggtaaagtccacaggagaggcactggtgcaaggactcatgggtgcagcagtgacgctcaagaacttgacaggtctaaaccagcgtcggtgagaggaaggggtataagctacaatgcctagaagagaatgagcggacagattgaaagagctttgaaaagtataaggtgccatccacataacctggtgttcacgagaacacactaaaggactcctgagtcactaccacagccacctggaaaccacaaggcatttgatgctaccgttctggtcagggattgggctgcttcttcagttcctaataccagaccaagcctcctgatgcctttctgcactgcaactgtgtgattgaaaaatgagatgttcatccaagcagtcaagccacagaaacccagcatgtccctgtcacaatctcatgggcaccttgatcatgtcttaaccttcccttaaccttggggctcccaagccagagtcaaggtctgacgccacctcaaggtgacagctcatctccagcacagcacaggcgtgtgcacacagaggtgttccttgcagccccctccctctcaggtgtcctgagatgctgctcctgggagccccctcagaaaactgcctcacctgagacaagtgcctgctggacagaggtgtgattccaggcctggtgtcacatgacaccagcatgcattgccgtttttttgttttttttttgtctgtcnccctccttttttctctgaagccttttgccnntttcttgttctcttgggccttttttccttttttctttccttttt

SEQ ID NO: 374121 - DNA, 1721 bp, Homo sapiens
gtcgccgtgggcgacgtgcccgcttccaaaatggcggcggcggcggtatctggtgcgcttggccgggcgggctggaggctcctgcagctgcgatgcctgcccgtggcccgttgccgacaagccctggtgccgcgtgccttccatgcttcagctgtggggctaaggtcttcagatgagcagaagcagcagcctcccaactcattttctcagcagcattctgagacacagggggcagaaaaacctgatccagagtcttctcattcaccccccaggtatacagaccagggcggcgaggaggaggaggactatgaaagtgaggagcagttgcagcaccgcatcctgacggcagcccttgagtttgtgcccgcccacgggtggacagcagaggcgattgcagaaggagcccagtctctgggtctctccagtgcagcagccagcatgttcgggaaggatggcagtgagctaatactgcattttgtgacccagtgcaatacccggctcacacgtgtgctagaagaggagcagaagctggtacagttgggccaggcggagaagaggaagacagaccagttcctgagggatgcagtggaaaccagactgagaatgctgatcccatacattgagcactggccccgggccctcagcatcctcatgctccctcacaacatcccgtccagcctgagcctgctcaccagcatggtggatgacatgtggcattacgctggggaccagtccactgattttaactggtacacccgccgagccatgctggctgccatctacaacacaacagagctggtgatgatgcaggactcctctccagactttgaggacacttggcgcttcctggaaaaccgggttaatgatgcaatgaacatgggccacactgccaagcaggtaaagtccacaggagaggcactggtgcaaggactcatgggtgcagcagtgacgctcaagaacttgacaggtctaaaccagcgtcggtgagaggaaggggtataagctacaatgcctagaagagaatgagcggacagattgaaagagctttgaaaagtataaggtgccatccacataacctggtgttcacgagaacacactaaaggactcctgagtcactaccacagccacctggaaaccacaaggcatttgatgctaccgttctggtcagggattgggctgcttcttcagttcctaataccagaccaagcctcctgatgcctttctgcactgcaactgtgtgattgaaaaatgagatgttcatccaagcagtcaagccacagaaacccagcatgtccctgtcacaatctcatgggcaccttgatcatgtcttaaccttcccttaaccttggggctcccaagccagagtcaaggtctgacgccacctcaaggtgacagctcatctccagcacagcacaggcgtgtgcacacagaggtgttccttgcagccccctccctctcaggtgtcctgagatgctgctcctgggagccccctcagaaaactgcctcacctgagacaagtgcctgctggacagagcaggaggccgcagaagacgctcggcggttctggcctccgagcagcaggcggcgctgtgagtcgtctttgcggaagccgcggaggcctcgctgactgacttccggtgttggcggtggcgccgcgcagtcaccgcggagcagacgcggaggctggtggcccctgggcgagatgccgtacgccaaccagc

SEQ ID NO: 374122 - DNA, 1643 bp, Homo sapiens
agccgcctggctagcttcggccctgctccgctgcctgtgaggggcagatgcagcggggcagggcctgtcacccccatttcatggagttggcagagcctcagagagggctcgggtggcccgttgccgacaagccctggtgccgcgtgccttccatgcttcagctgtggggctaaggtcttcagatgagcagaagcagcagcctcccaactcattttctcagcagcattctgagacacagggggcagaaaaacctgatccagagtcttctcattcaccccccaggtatacagaccagggcggcgaggaggaggaggactatgaaagtgaggagcagttgcagcaccgcatcctgacggcagcccttgagtttgtgcccgcccacgggtggacagcagaggcgattgcagaaggagcccagtctctgggtctctccagtgcagcagccagcatgttcgggaaggatggcagtgagctaatactgcattttgtgacccagtgcaatacccggctcacacgtgtgctagaagaggagcagaagctggtacagttgggccaggcggagaagaggaagacagaccagttcctgagggatgcagtggaaaccagactgagaatgctgatcccatacattgagcactggccccgggccctcagcatcctcatgctccctcacaacatcccgtccagcctgagcctgctcaccagcatggtggatgacatgtggcattacgctggggaccagtccactgattttaactggtacacccgccgagccatgctggctgccatctacaacacaacagagctggtgatgatgcaggactcctctccagactttgaggacacttggcgcttcctggaaaaccgggttaatgatgcaatgaacatgggccacactgccaagcaggtaaagtccacaggagaggcactggtgcaaggactcatgggtgcagcagtgacgctcaagaacttgacaggtctaaaccagcgtcggtgagaggaaggggtataagctacaatgcctagaagagaatgagcggacagattgaaagagctttgaaaagtataaggtgccatccacataacctggtgttcacgagaacacactaaaggactcctgagtcactaccacagccacctggaaaccacaaggcatttgatgctaccgttctggtcagggattgggctgcttcttcagttcctaataccagaccaagcctcctgatgcctttctgcactgcaactgtgtgattgaaaaatgagatgttcatccaagcagtcaagccacagaaacccagcatgtccctgtcacaatctcatgggcaccttgatcatgtcttaaccttcccttaaccttggggctcccaagccagagtcaaggtctgacgccacctcaaggtgacagctcatctccagcacagcacaggcgtgtgcacacagaggtgttccttgcagccccctccctctcaggtgtcctgagatgctgctcctgggagccccctcagaaaactgcctcacctgagacaagtgcctgctggacagaggtgtgattccaggcctggtgtcacatgacaccagcatgcattgcaggattattagtgtattttgagtctgtaaaaataataaatatgtttgaagtagtt

SEQ ID NO: 374123 - DNA, 3171 bp, Homo sapiens
gtcgccgtgggcgacgtgcccgcttccaaaatggcggcggcggcggtatctggtgcgcttggccgggcgggctggaggctcctgcagctgcgatgcctgcccgtggcccgttgccgacaagccctggtgccgcgtgccttccatgcttcagctgtggggctaaggtcttcagatgagcagaagcagcagcctcccaactcattttctcagcagcattctgagacacagggggcagaaaaacctgatccagagtcttctcattcaccccccaggtatacagaccagggcggcgaggaggaggaggactatgaaagtgaggagcagttgcagcaccgcatcctgacggcagcccttgagtttgtgcccgcccacgggtggacagcagaggcgattgcagaaggagcccagtctctgggtctctccagtgcagcagccagcatgttcgggaaggatggcagtgagctaatactgcattttgtgacccagtgcaatacccggctcacacgtgtgctagaagaggagcagaagctggtacagttgggccaggcggagaagaggaagacagaccagttcctgagggatgcagtggaaaccagactgagaatgctgatcccatacattgagcactggccccgggccctcagcatcctcatgctccctcacaacatcccgtccagcctgagcctgctcaccagcatggtggatgacatgtggcattacgctggggaccagtccactgatgtgagtgctttctgcaggcccacaggaggctgggaaaggcttgtgttaagcatttcttcaagaagcttgtgaaattgctttgatcataagcccctgcaggggggctgcagtgtcattcccatctaaggtatgaggaaggtccgtcaagaagccaaagtgggatctaggtcatcttcattcagggaccagcattctagccacaaaccagttattatttcttccagcttgtggtgacaccaggtgtcagagatcctttagcattggcgaaagctaattgggctgccattttattatcatttccctctctcctaagatgtagattctgcagcaaaattcctcttttgaaaaaaagaaatgccatggaggcacccattgctttaaaaagaaattcccttccccagcccatcttggcctgctttgctaagtgatcaataaggctctttaaacagcaccaggaaagaatccgacttgttaatgctatcatatttctggtaggaaattttaaaaaatacaccttcataaaagaaaatgtgatgatactttgtggaatcctggatgaggaggcacagaaatactcccaccatagttataacaaagtgttttaataaacttcctccatgtgggaatataatgccaacagagacggtaggaaaatgaaattagaaagcaaagaaattaaaggaataaaacaccaagcagctgagctggtcctctgaagagtagtttgctagaacaatcagaagttgctgagggacttgaactctcagctttgcccaggtattgtaatctgtccatgagcctctctcagccctcactttattgatgaacacaccaaggttcggtcatagctggctgattacagcgtcttctgggactcagatgtcttaagatgtaggctttctactagcagttccaaaatggattggatgtagccaaatcatctgggatacttattaagtttcctgattcctggcactttatttagatccattgactctactcttaagaggttgggcccaggagcttgcatttttaatcaagtaggtaattctgatgctcagtcaagtttgagatggtagtgttgtccagagggccagatgtatctgtgacagtcaagaagtagtcaagagggaacccaggagttcccatggccttgggtaggaactgcctcagacttgcaccagcccacagcggtagtgtgggtttctttacagtttaactggtacacccgccgagccatgctggctgccatctacaacacaacagagctggtgatgatgcaggactcctctccagactttgaggacacttggcgcttcctggaaaaccgggttaatgatgcaatgaacatgggccacactgccaagcaggtaggtggggactagccattggggaaccctctttagaaggcatacctattctcctcaggtcacagctggtcttgctcccttttggcctcagctgacagtcctgagggccttcccaagggcctggctggttcttcctcaggccagcccttccctaagagccacactttgctcatttgtgattgtgttgtccaaagctctccttccagtaacgtggcccccttgtcttcaccttttggggctcataggcctcctgatttgtcctgcctgtctcaagtttaactttgtgttggtggcctaagggaacctgacactgactccttctaggtaaagtccacaggagaggcactggtgcaaggactcatgggtgcagcagtgacgctcaagaacttgacaggtctaaaccagcgtcggtgagaggaaggggtataagctacaatgcctagaagagaatgagcggacagattgaaagagctttgaaaagtataaggtgccatccacataacctggtgttcacgagaacacactaaaggactcctgagtcactaccacagccacctggaaaccacaaggcatttgatgctaccgttctggtcagggattgggctgcttcttcagttcctaataccagaccaagcctcctgatgcctttctgcactgcaactgtgtgattgaaaaatgagatgttcatccaagcagtcaagccacagaaacccagcatgtccctgtcacaatctcatgggcaccttgatcatgtcttaaccttcccttaaccttggggctcccaagccagagtcaaggtctgacgccacctcaaggtgacagctcatctccagcacagcacaggcgtgtgcacacagaggtgttccttgcagccccctccctctcaggtgtcctgagatgctgctcctgggagccccctcagaaaactgcctcacctgagacaagtgcctgctggacagaggtgtgattccaggcctggtgtcacatgacaccagcatgcattgcaggattattagtgtattttgagtctgtaaaaataataaatatgtttgaagtagtt

SEQ ID NO: 374124 - DNA, 1055 bp, Homo sapiens
gggatagggggggactcctctgaaaatgatgagccagtactgtagagcatgggccggggccctcagcatcctcatgctccctcacaacatcccgtccagcctgagcctgctcaccagcatggtggatgacatgtggcattacgctggggaccagtccactgattttaactggtacacccgccgagccatgctggctgccatctacaacacaacagagctggtgatgatgcaggactcctctccagactttgaggacacttggcgcttcctggaaaaccgggttaatgatgcaatgaacatgggccacactgccaagcaggtaaagtccacaggagaggcactggtgcaaggactcatgggtgcagcagtgacgctcaagaacttgacaggtctaaaccagcgtcggtgagaggaaggggtataagctacaatgcctagaagagaatgagcggacagattgaaagagctttgaaaagtataaggtgccatccacataacctggtgttcacgagaacacactaaaggactcctgagtcactaccacagccacctggaaaccacaaggcatttgatgctaccgttctggtcagggattgggctgcttcttcagttcctaataccagaccaagcctcctgatgcctttctgcactgcaactgtgtgattgaaaaatgagatgttcatccaagcagtcaagccacagaaacccagcatgtccctgtcacaatctcatgggcaccttgatcatgtcttaaccttcccttaaccttggggctcccaagccagagtcaaggtctgacgccacctcaaggtgacagctcatctccagcacagcacaggcgtgtgcacacagaggtgttccttgcagccccctccctctcaggtgtcctgagatgctgctcctgggagccccctcagaaaactgcctcacctgagacaagtgcctgctggacagaggtgtgattccaggcctggtgtcacatgacaccagcatgcattgcaggattattagtgtattttgagtctgtaaaaataataaatatgtttgaagtagtt

SEQ ID NO: 374125 - DNA, 1333 bp, Homo sapiens
gtcgccgtgggcgacgtgcccgcttccaaaatggcggcggcggcggtatctggtgcgcttggccgggcgggctggaggctcctgcagctgcgatgcctgcccgtggcccgttgccgacaagccctggtgccgcgtgccttccatgcttcagctgtggggctaaggtcttcagatgagcagaagcagcagcctcccaactcattttctcagcagcattctgagacacagggggcagaaaaacctgatccagagtcttctcattcaccccccaggtatacagaccagggcggcgaggaggaggaggactatgaaagtgaggagcagttgcagcaccgcatcctgacggcagcccttgagtttgtgcccgcccacgggtggacagcagaggcgattgcagaaggagcccagtctctgggtctctccagtgcagcagccagcatgttcgggaaggatggcagtgagctaatactgcattttgtgacccagtgcaatacccggctcacacgtgtgctagaagaggagcagaagctggtacagttgggccaggcggagaagaggaagacagaccagttcctgagggatgcagtggaaaccagactgagaatgctgatcccatacattgagcactggccccgggccctcagcatcctcatgctccctcacaacatcccgtccagcctgagcctgctcaccagcatggtggatgacatgtggcattacgctggggaccagtccactgattttaactggtacacccgccgagccatgctggctgccatctacaacacaacagagctggtgatgatgcaggactcctctccagactttgaggacacttggcgcttcctggaaaaccgggttaatgatgcaatgaacatgggccacactgccaagcaggtaaagtccacaggagaggcactggtgcaaggactcatgggtgcagcagtgacggtgagtactgcccagcacatccctgcccctcctctctcccattccggctctgtgatacatgtgttactgacttcacatcattttgtagccctaacctggaaacaataatctaataataaggctgacaatggttcagccctagtgtcttgattccaaaaaccccacttctttattttttcctgtcatcaggagatatcactgactcctgggaccctggtatatcaagtctctgtatcatagccacacctgccaccttgcaaacctggatcttggccaggtgcagtggctcatgcatatcatctcagcgatttgggaagatcgcttgagcccaggagtttgaggacagtctggccaacatagcaaaaccctgtctctatgcaaa

SEQ ID NO: 374126 - DNA, 1001 bp, Homo sapiens
gtcgccgtgggcgacgtgcccgcttccaaaatggcggcggcggcggtatctggtgcgcttggccgggcgggctggaggctcctgcagctgcgatgcctgcccgtggcccgttgccgacaagccctggtgccgcgtgccttccatgcttcagctgtggggctaaggtcttcagatgagcagaagcagcagcctcccaactcattttctcagcagcattctgagacacagggggcagaaaaacctgatccagagtcttctcattcaccccccaggtatacagaccagggcggcgaggaggaggaggactatgaaagtgaggagcagttgcagcaccgcatcctgacggcagcccttgagtttgtgcccgcccacgggtggacagcagaggcgattgcagaaggagcccagtctctgggtctctccagtgcagcagccagcatgttcgggaaggatggcagtgagctaatactgcattttgtgacccagtgcaatacccggctcacacgtgtgctagaagaggagcagaagctggtacagttgggccaggcggagaagaggaagacagaccagttcctgagggatgcagtggaaaccagactgagaatgctgatcccatacattgagcactggccccgggccctcagcatcctcatgctccctcacaacatcccgtccagcctgagcctgctcaccagcatggtggatgacatgtggcattacgctggggaccagtccactgattttaactggtacacccgccgagccatgctggctgccatctacaacacaacagagctggtgatgatgcaggactcctctccagactttgaggacacttggcgcttcctggaaaaccgggttaatgatgcaatgaacctgagacaagtgcctgctggacagaggtgtgattccaggcctggtgtcacatgacaccagcatgcattgcaggattattagtgtattttgagtctgtaaaaataataaatatgtttgaagtagtt

SEQ ID NO: 374127 - DNA, 1464 bp, Homo sapiens
gtcgccgtgggcgacgtgcccgcttccaaaatggcggcggcggcggtatctggtgcgcttggccgggcgggctggaggctcctgcagctgcgatgcctgcccgtggcccgttgccgacaagccctggtgccgcgtgccttccatgcttcagctgtggggctaaggtcttcagatgagcagaagcagcagcctcccaactcattttctcagcagcattctgagacacagggggcagaaaaacctgatccagagtcttctcattcaccccccaggtatacagaccagggcggcgaggaggaggaggactatgaaagtgaggagcagttgcagcaccgcatcctgacggcagcccttgagtttgtgcccgcccacgggtggacagcagaggcgattgcagaaggagcccagtctctgggtctctccagtgcagcagccagcatgttcgggaaggatggcagtgagctaatactgcattttgtgacccagtgcaatacccggctcacacgtgtgctagaagaggagcagaagctggtacagttgggccaggcggagaagaggaagacagaccagttcctgagggatgcagtggaaaccagactgagaatgctgatcccatacattgagcactggccccgggtaccaagtctatatccaggccccagagcaacaataatcctaatatttatcattctcagcacctttcactcagatgactttgtacactgttcagaacttagcttctcaatctctataaacccgacaatacttagtacacttggtaaagctgggtttcaaacttggacataccaaagagagtgactgagccatctgtgtctcagttcttggaaatgtgagtggtccgggtactggatcccatcctgggtggggttctcctagtggtctgagtgtgccaccaggtctgcagggaggaggaatccatgcaggaggttagaagagtcagaagattttattggctgtcttcacttgaataacagccctgtggcattttagatctcgagcactgggatttgtcaattgtcaatgtgatgcttggggactggcatattcgttgcaaggggttttttcaccttttctgaagcttcctttttcctctgttttaaagcatatcacagtatgggccattctctgagtgaagaaagtacagagtgaaagtacacccgaagtgagagggactcagacatcttgtgtcctttgctcagctggaagactactaagcacgtagtttcagtcattcagttgatagacatttgaacacttatggtggtgcctaaccccaggccgagtgtgactcattccaccttgcagttaaagcagtggaagtgcacgtatgaggccctcaactgccttcctgattcagcatagtgttttcttctgggctgcttcactaagagaaaaccttacagccaatccgcggaggacctctctgatcacctccccagtgga

SEQ ID NO: 374128 - DNA, 1633 bp, Homo sapiens
gtcgccgtgggcgacgtgcccgcttccaaaatggcggcggcggcggtatctggtgcgcttggccgggcgggctggaggctcctgcagctgcgatgcctgcccgtggcccgttgccgacaagccctggtgccgcgtgccttccatgcttcagctgtggggctaaggtcttcagatgagcagaagcagcagcctcccaactcattttctcagcagcattctgagacacagggggcagaaaaacctgatccagagtcttctcattcaccccccaggtatacagaccagggcggcgaggaggaggaggactatgaaagtgaggagcagttgcagcaccgcatcctgacggcagcccttgagtttgtgcccgcccacgggtggacagcagaggcgattgcagaaggagcccagtctctgggtctctccagtgcagcagccagcatgttcgggaaggatggcagtgagctaatactgcattttgtgacccagtgcaatacccggctcacacgtgtgctagaagaggagcagaagctggtacagttgggccaggcggagaagaggaagacagaccagttcctgagggatgcagtggaaaccagactgagaatgctgatcccatacattgagcactggccccgggccctcagcatcctcatgctccctcacaacatcccgtccagcctgagcctgctcaccagcatggtggatgacatgtggcattacgctggggaccagtccactgattttaactggtacacccgccgagccatgctggctgccatctacaacacaacagagctggtgatgatgcaggactcctctccagactttgaggacacttggcgcttcctggaaaaccgggttaatgatgcaatgaacatgggccacactgccaagcaggtaaagtccacaggagaggcactggtgcaaggactcatgggtgcagcagtgacgctcaagaacttgacaggtctaaaccagcgtcggtgagaggaaggggtataagctacaatgcctagaagagaatgagcggacagattgaaagagctttgaaaagtataaggtgccatccacataacctggtgttcacgagaacacactaaaggactcctgagtcactaccacagccacctggaaaccacaaggcatttgatgctaccgttctggtcagggattgggctgcttcttcagttcctaataccagaccaagcctcctgatgcctttctgcactgcaactgtgtgattgaaaaatgagatgttcatccaagcagtcaagccacagaaacccagcatgtccctgtcacaatctcatgggcaccttgatcatgtcttaaccttcccttaaccttggggctcccaagccagagtcaaggtctgacgccacctcaaggtgacagctcatctccagcacagcacaggcgtgtgcacacagaggtgttccttgcagccccctccctctcaggtgtcctgagatgctgctcctgggagccccctcagaaaactgcctcacctgagacaagtgcctgctggacagaggtgtgattccaggcctggtgtcacatgacaccagcatgcattgcaggattattagtgtattttgagtctgtaaaaataataaatatgtttgaagtagtt

SEQ ID NO: 374129 - DNA, 2251 bp, Homo sapiens
  misc_feature (1695)..(1695): n is a, c, g, or t
  misc_feature (1746)..(1746): n is a, c, g, or t
  misc_feature (2250)..(2251): n is a, c, g, or t
gtcgccgtgggcgacgtgcccgcttccaaaatggcggcggcggcggtatctggtgcgcttggccgggcgggctggaggctcctgcagctgcgatgcctgcccgtggcccgttgccgacaagccctggtgccgcgtgccttccatgcttcagctgtggggctaaggtcttcagatgagcagaagcagcagcctcccaactcattttctcagcagcattctgagacacagggggcagaaaaacctgatccagagtcttctcattcaccccccaggtatacagaccagggcggcgaggaggaggaggactatgaaagtgaggagcagttgcagcaccgcatcctgacggcagcccttgagtttgtgcccgcccacgggtggacagcagaggcgattgcagaaggagcccagtctctgggtctctccagtgcagcagccagcatgttcgggaaggatggcagtgagctaatactgcattttgtgacccagtgcaatacccggctcacacgtgtgctagaagaggagcagaagctggtacagttgggccaggcggagaagaggaagacagaccagttcctgagggatgcagtggaaaccagactgagaatgctgatcccatacattgagcactggccccgggccctcagcatcctcatgctccctcacaacatcccgtccagcctgagcctgctcaccagcatggtggatgacatgtggcattacgctggggaccagtccactgattttaactggtacacccgccgagccatgctggctgccatctacaacacaacagagctggtgatgatgcaggactcctctccagactttgaggacacttggcgcttcctggaaaaccgggttaatgatgcaatgaacatgggccacactgccaagcaggtaaagtccacaggagaggcactggtgcaaggactcatgggtgcagcagtgacgctcaagaacttgacaggtctaaaccagcgtcggtgagaggaaggggtataagctacaatgcctagaagagaatgagcggacagattgaaagagctttgaaaagtataaggtgccatccacataacctggtgttcacgagaacacactaaaggactcctgagtcactaccacagccacctggaaaccacaaggcatttgatgctaccgttctggtcagggattgggctgcttcttcagttcctaataccagaccaagcctcctgatgcctttctgcactgcaactgtgtgattgaaaaatgagatgttcatccaagcagtcaagccacagaaacccagcatgtccctgtcacaatctcatgggcaccttgatcatgtcttaaccttcccttaaccttggggctcccaagccagagtcaaggtctgacgccacctcaaggtgacagctcatctccagcacagcacaggcgtgtgcacacagaggtgttccttgcagccccctccctctcaggtgtcctgagatgctgctcctgggagccccctcagaaaactgcctcacctgagacaagtgcctgctggacagaggtgtgattccaggcctggtgtcacatgacaccagcatgcattgcaggattattagtgtattttgagtctgtaaaaataataaatatgtttgaagtagttaaaaaaaaaaaaaaaaaaaaaaaaaaaaaaaaaaaaaaaaaaaaaaaaaaaaaaaaaaaaanaaaaaaaaaaaaaaaaaaaaaaaaaaaaaaagaaggggaggggggcgcgcnacaacactaaatacacccccgaaggagggcgcccccaagaatctacggctcgcacgccacgtttgtttttcgaaaaaggagggcggccccatctaaggggagggcaagcattatatacagcgcaggaggcgcgcgggccgggcatggttacaacaacacacggcgagcggggaggaaacacaccgcgcacgaaggagggacacatctttgtgagaagaaagaaacccacccccaactcggggagggggggggggaacacccaatatgtgcgccgacacacactctccctcaagaaaagatatattataacaggcctcccgggggggatatcaatctaataagtcttatggcaggcggattatagagatgggtgttgattaccaccaacccagcggcgatatatagtcgccttccgatgaaaaaaatttgtgacccaaccagcagaagttatgataatacagcgacataatattactcaccgcggcggtgtgatcaatatatcgnn

SEQ ID NO: 374130 - DNA, 1623 bp, Homo sapiens
aattaggctaggtacgaggctgggtgttagcggcggtatctggtgcgcttggccgggcgggctggaggctcctgcagctgcgatgcctgcccgtggcccgttgccgacaagccctggtgccgcgtgccttccatgcttcagctgtggggctaaggtcttcagatgagcagaagcagcagcctcccaactcattttctcagcagcattctgagacacagggggcagaaaaacctgatccagagtcttctcattcaccccccaggtatacagaccagggcggcgaggaggaggaggactatgaaagtgaggagcagttgcagcaccgcatcctgacggcagcccttgagtttgtgcccgcccacgggtggacagcagaggcgattgcagaaggagcccagtctctgggtctctccagtgcagcagccagcatgttcgggaaggatggcagtgagctaatactgcattttgtgacccagtgcaatacccggctcacacgtgtgctagaagaggagcagaagctggtacagttgggccaggcggagaagaggaagacagaccagttcctgagggatgcagtggaaaccagactgagaatgctgatcccatacattgagcactggccccgggccctcagcatcctcatgctccctcacaacatcccgtccagcctgagcctgctcaccagcatggtggatgacatgtggcattacgctggggaccagtccactgattttaactggtacacccgccgagccatgctggctgccatctacaacacaacagagctggtgatgatgcaggactcctctccagactttgaggacacttggcgcttcctggaaaaccgggttaatgatgcaatgaacatgggccacactgccaagcaggtaaagtccacaggagaggcactggtgcaaggactcatgggtgcagcagtgacgctcaagaacttgacaggtctaaaccagcgtcggtgagaggaaggggtataagctacaatgcctagaagagaatgagcggacagattgaaagagctttgaaaagtataaggtgccatccacataacctggtgttcacgagaacacactaaaggactcctgagtcactaccacagccacctggaaaccacaaggcatttgatgctaccgttctggtcagggattgggctgcttcttcagttcctaataccagaccaagcctcctgatgcctttctgcactgcaactgtgtgattgaaaaatgagatgttcatccaagcagtcaagccacagaaacccagcatgtccctgtcacaatctcatgggcaccttgatcatgtcttaaccttcccttaaccttggggctcccaagccagagtcaaggtctgacgccacctcaaggtgacagctcatctccagcacagcacaggcgtgtgcacacagaggtgttccttgcagccccctccctctcaggtgtcctgagatgctgctcctgggagccccctcagaaaactgcctcacctgagacaagtgcctgctggacagaggtgtgattccaggcctggtgtcacatgacaccagcatgcattgcaggattattagtgtattttgagtctgtaaaaataataaatatgtttgaagtagtt

SEQ ID NO: 374131 - DNA, 1579 bp, Homo sapiens
gtcgccgtgggcgacgtgcccgcttccaaaatggcggcggcggcggtatctggtgcgcttggccgggcgggctggaggctcctgcagctgcgatgcctgcccgtggcccgttgccgacaagccctggtgccgcgtgccttccatgcttcagctgtggggctaaggtcttcagatgagcagaagcagcagcctcccaactcattttctcagcagcattctgagacacagggggcagaaaaacctgatccagagtcttctcattcaccccccaggtatacagaccagggcggcgaggaggaggaggactatgaaagtgaggagcagttgcagcaccgcatcctgacggcagcccttgagtttgtgcccgcccacgggtggacagcagaggcgattgcagaaggagcccagtctctgggtctctccagtgcagcagccagcatgttcgggaaggatggcagtgagctaatactgcattttgtgacccagtgcaatacccggctcacacgtgtgctagaagaggagcagaagctggtacagttgggccaggcggagaagaggaagacagaccagttcctgagggatgcagtggaaaccagactgagaatgctgatcccatacattgagcactggccccgggccctcagcatcctcatgctccctcacaacatcccgtccagcctgagcctgctcaccagcatggtggatgacatgtggcattacgctggggaccagtccactgattttaactggtacacccgccgagccatgctggctgccatctacaacacaacagagctggtgatgatgcaggactcctctccagactttgaggacacttggcgcttcctggaaaaccgggttaatgatgcaatgaacatgggccacactgccaagcaggtaaagtccacaggagaggcactggtgcaaggactcatgggtgcagcagtgacgctcaagaacttgacaggtctaaaccagcgtcggtgagaggaaggggtataagctacaatgcctagaagagaatgagcggacagattgaaagagctttgaaaagtataaggtgccatccacataacctggtgttcacgagaacacactaaaggactcctgagtcactaccacagccacctggaaaccacaaggcatttgatgctaccgttctggtcagggattgggctgcttcttcagttcctaataccagaccaagcctcctgatgcctttctgcactgcaactgtgtgattgacacaatctcatgggcaccttgatcatgtcttaaccttcccttaaccttggggctcccaagccagagtcaaggtctgacgccacctcaaggtgacagctcatctccagcacagcacaggcgtgtgcacacagaggtgttccttgcagccccctccctctcaggtgtcctgagatgctgctcctgggagccccctcagaaaactgcctcacctgagacaagtgcctgctggacagaggtgtgattccaggcctggtgtcacatgacaccagcatgcattgcaggattattagtgtattttgagtctgtaaaaataataaatatgtttgaagtagtt

SEQ ID NO: 374132 - DNA, 2847 bp, Homo sapiens
gtcgccgtgggcgacgtgcccgcttccaaaatggcggcggcggcggtatctggtgcgcttggccgggcgggctggaggctcctgcagctgcgatgcctgcccgtggcccgttgccgacaagccctggtgccgcgtgccttccatgcttcagctgtggggctaaggtcttcagatgagcagaagcagcagcctcccaactcattttctcagcagcattctgagacacagggggcagaaaaacctgatccagagtcttctcattcaccccccaggtatacagaccagggcggcgaggaggaggaggactatgaaagtgaggagcagttgcagcaccgcatcctgacggcagcccttgagtttgtgcccgcccacgggtggacagcagaggcgattgcagaaggagcccagtctctgggtctctccagtgcagcagccagcatgttcgggaaggatggcagtgagctaatactgcattttgtgacccagtgcaatacccggctcacacgtgtgctagaagaggagcagaagctggtacagttgggccaggcggagaagaggaagacagaccagttcctgagggatgcagtggaaaccagactgagaatgctgatcccatacattgagcactggccccgggccctcagcatcctcatgctccctcacaacatcccgtccagcctgagcctgctcaccagcatggtggatgacatgtggcattacgctggggaccagtccactgatgtgagtgctttctgcaggcccacaggaggctgggaaaggcttgtgttaagcatttcttcaagaagcttgtgaaattgctttgatcataagcccctgcaggggggctgcagtgtcattcccatctaaggtatgaggaaggtccgtcaagaagccaaagtgggatctaggtcatcttcattcagggaccagcattctagccacaaaccagttattatttcttccagcttgtggtgacaccaggtgtcagagatcctttagcattggcgaaagctaattgggctgccattttattatcatttccctctctcctaagatgtagattctgcagcaaaattcctcttttgaaaaaaagaaatgccatggaggcacccattgctttaaaaagaaattcccttccccagcccatcttggcctgctttgctaagtgatcaataaggctctttaaacagcaccaggaaagaatccgacttgttaatgctatcatatttctggtaggaaattttaaaaaatacaccttcataaaagaaaatgtgatgatactttgtggaatcctggatgaggaggcacagaaatactcccaccatagttataacaaagtgttttaataaacttcctccatgtgggaatataatgccaacagagacggtaggaaaatgaaattagaaagcaaagaaattaaaggaataaaacaccaagcagctgagctggtcctctgaagagtagtttgctagaacaatcagaagttgctgagggacttgaactctcagctttgcccaggtattgtaatctgtccatgagcctctctcagccctcactttattgatgaacacaccaaggttcggtcatagctggctgattacagcgtcttctgggactcagatgtcttaagatgtaggctttctactagcagttccaaaatggattggatgtagccaaatcatctgggatacttattaagtttcctgattcctggcactttatttagatccattgactctactcttaagaggttgggcccaggagcttgcatttttaatcaagtaggtaattctgatgctcagtcaagtttgagatggtagtgttgtccagagggccagatgtatctgtgacagtcaagaagtagtcaagagggaacccaggagttcccatggccttgggtaggaactgcctcagacttgcaccagcccacagcggtagtgtgggtttctttacagtttaactggtacacccgccgagccatgctggctgccatctacaacacaacagagctggtgatgatgcaggactcctctccagactttgaggacacttggcgcttcctggaaaaccgggttaatgatgcaatgaacatgggccacactgccaagcaggtaaagtccacaggagaggcactggtgcaaggactcatgggtgcagcagtgacgctcaagaacttgacaggtctaaaccagcgtcggtgagaggaaggggtataagctacaatgcctagaagagaatgagcggacagattgaaagagctttgaaaagtataaggtgccatccacataacctggtgttcacgagaacacactaaaggactcctgagtcactaccacagccacctggaaaccacaaggcatttgatgctaccgttctggtcagggattgggctgcttcttcagttcctaataccagaccaagcctcctgatgcctttctgcactgcaactgtgtgattgaaaaatgagatgttcatccaagcagtcaagccacagaaacccagcatgtccctgtcacaatctcatgggcaccttgatcatgtcttaaccttcccttaaccttggggctcccaagccagagtcaaggtctgacgccacctcaaggtgacagctcatctccagcacagcacaggcgtgtgcacacagaggtgttccttgcagccccctccctctcaggtgtcctgagatgctgctcctgggagccccctcagaaaactgcctcacctgagacaagtgcctgctggacagaggtgtgattccaggcctggtgtcacatgacaccagcatgcattgcaggattattagtgtattttgagtctgtaaaaataataaatatgtttgaagtagtt

SEQ ID NO: 374133 - DNA, 1740 bp, Homo sapiens
gtcgccgtgggcgacgtgcccgcttccaaaatggcggcggcggcggtatctggtgcgcttggccgggcgggctggaggctcctgcagctgcgatgcctgcccgtggcccgttgccgacaagccctggtgccgcgtgccttccatgcttcagctgtggggctaaggtcttcagatgagcagaagcagcagcctcccaactcattttctcagcagcattctgagacacagggggcagaaaaacctgatccagagtcttctcattcaccccccaggtatacagaccagggcggcgaggaggaggaggactatgaaagtgaggagcagttgcagcaccgcatcctgacggcagcccttgagtttgtgcccgcccacgggtggacagcagaggcgattgcagaaggagcccagtctctgggtctctccagtgcagcagccagcatgttcgggaaggatggcagtgagctaatactgcattttgtgacccagtgcaatacccggctcacacgtgtgctagaagaggagcagaagctggtacagttgggccaggcggagaagaggaagacagaccagttcctgagggatgcagtggaaaccagactgagaatgctgatcccatacattgagcactggccccgggccctcagcatcctcatgctccctcacaacatcccgtccagcctgagcctgctcaccagcatggtggatgacatgtggcattacgctggggaccagtccactgattttaactggtacacccgccgagccatgctggctgccatctacaacacaacagagctggtgatgatgcaggactcctctccagactttgaggacacttggcgcttcctggaaaaccgggttaatgatgcaatgaacatgggccacactgccaagcaggaagtccacgggagaggcactggtgcaaggactgatgggtgcagcggtcacgctcaagaacctgacgggtctaaaccagcgtcggtgagagaagggaacccgtgtgctgggaggagcagcagtagatatgaagggctttgacaagatgtgccacccattgaacaggatgttaatgagaacacactgaagaacttggagtcgtatgacagccacaaggctggaaatcacaatgcacttgctgccgttctgacctggaactgggccacttcttcagttcctaatgccaggcctggcctcctgatgccttttgcattgcagctgtgtgtttgaaaactgaggctcacatccaaggtttcaaaccacaaaaccttggcatgactctgccatggtgtcacaggcatcttgatcatgtcttgaccatagaattgctctctaggagctgggcatggtgacctacgtctgtattctcagcactcaggagactgctacagcaagattgagagatcagaggcaggcttgtctttgtagagaattacaagcctgcttgagctacagagtgtgatcctgtcaaaatcccctgagaaatattcttaggggctcacaaccaaggtccggaggcaacacatagtgggagctcttccccagcacagggcagacagtgctcacaaacatttgccactggccattgcctctggaccccctcagaaaactgcctcacctgagacaagtgcctgctggacagaggtgtgattccaggcctggtgtcacatgacaccagcatgcattgcaggattattagtgtattttgagtctgtaaaaataataaatatgtttgaagtagtt

SEQ ID NO: 374134 - DNA, 1657 bp, Homo sapiens
gtcgccgtgggcgacgtgcccgcttccaaaatggcggcggcggcggtatctggtgcgcttggccgggcgggctggaggctcctgcagctgcgatgcctgcccgtggcccgttgccgacaagccctggtgccgcgtgccttccatgcttcagctgtggggctaaggtcttcagatgagcagaagcagcagcctcccaactcattttctcagcagcattctgagacacagggggcagaaaaacctgatccagagtcttctcattcaccccccaggtatacagaccagggcggcgaggaggaggaggactatgaaagtgaggagcagttgcagcaccgcatcctgacggcagcccttgagtttgtgcccgcccacgggtggacagcagaggcgattgcagaaggagcccagtctctgggtctctccagtgcagcagccagcatgttcgggaaggatggcagtgagctaatactgcattttgtgacccagtgcaatacccggctcacacgtgtgctagaagaggagcagaagctggtacagttgggccaggcggagaagaggaagacagaccagttcctgagggatgcagtggaaaccagactgagaatgctgatcccatacattgagcactggccccgggccctcagcatcctcatgctccctcacaacatcccgtccagcctgagcctgctcaccagcatggtggatgacatgtggcattacgctggggaccagtccactgattttaactggtacacccgccgagccatgctggctgccatctacaacacaacagagctggtgatgatgcaggactcctctccagactttgaggacacttggcgcttcctggaaaaccgggttaatgatgcaatgaacatgggccacactgccaagcaggtaggtggggactagccattggggaaccctctttagaaggcatacctattctcctcaggtcacagctggtcttgctcccttttggcctcagctgacagtcctgagggccttcccaagggcctggctggttcttcctcaggccagcccttccctaagagccacactttgctcatttgtgattgtgttgtccaaagctctccttccagtaacgtggcccccttgtcttcaccttttggggctcataggcctcctgatttgtcctgcctgtctcaagtttaactttgtgttggtggcctaagggaacctgacactgactccttctaggtaaagtccacaggagaggcactggtgcaaggactcatgggtgcagcagtgacggtgagtactgcccagcacatccctgcccctcctctctcccattccggctctgtgatacatgtgttactgacttcacatcattttgtagccctaacctggaaacaataatctaataataaggctgacaatggttcagccctagtgtcttgattccaaaaaccccacttctttattttttcctgtcatcaggagatatcactgactcctgggaccctggtatatcaagtctctgtatcatagccacacctgccaccttgcaaacctggatcttggccaggtgcagtggctcatgcatatcatctcagcgatttgggaagatcgcttgagcccaggagtttgaggacagtctggccaacatagcaaaaccctgtctctatgcaaa

SEQ ID NO: 374135 - DNA, 966 bp, Homo sapiens
gtccttcgacttccccggccacaactacacacgagaaacatcctgccaggtttaaacatcacttgtacccttccacaagactcagaatccacagtgtcccattttccgactaggagacatcttccgagaaacaggcgataatttttcagatgtggcaattcagggcggaataatgggcattgagatctactgggactgcaacctagaacatgggccacactgccaagcaggtaaagtccacaggagaggcactggtgcaaggactcatgggtgcagcagtgacgctcaagaacttgacaggtctaaaccagcgtcggtgagaggaaggggtataagctacaatgcctagaagagaatgagcggacagattgaaagagctttgaaaagtataaggtgccatccacataacctggtgttcacgagaacacactaaaggactcctgagtcactaccacagccacctggaaaccacaaggcatttgatgctaccgttctggtcagggattgggctgcttcttcagttcctaataccagaccaagcctcctgatgcctttctgcactgcaactgtgtgattgaaaaatgagatgttcatccaagcagtcaagccacagaaacccagcatgtccctgtcacaatctcatgggcaccttgatcatgtcttaaccttcccttaaccttggggctcccaagccagagtcaaggtctgacgccacctcaaggtgacagctcatctccagcacagcacaggcgtgtgcacacagaggtgttccttgcagccccctccctctcaggtgtcctgagatgctgctcctgggagccccctcagaaaactgcctcacctgagacaagtgcctgctggacagaggtgtgattccaggcctggtgtcacatgacaccagcatgcattgcaggattattagtgtattttgagtctgtaaaaataataaatatgtttgaagtagtt

SEQ ID NO: 374136 - DNA, 486 bp, Homo sapiens
gtcgccgtgggcgacgtgcccgcttccaaaatggcggcggcggcggtatctggtgcgcttggccgggcgggctggaggctcctgcagctgcgatgcctgcccgtggcccgttgccgacaagccctggtgccgcgtgccttccatgcttcagctgtggggctaaggtcttcagatgagcagaagcagcagcctcccaactcattttctcagcagcattctgagacacagggggcagaaaaacctgatccagagtcttctcattcaccccccaggtatacagaccagggcggcgaggaggaggaggactatgaaagtgaggagcagttgcagcaccgcatcctgacggcagcccttgagtttgtgcccgcccacgggtggacagcagaggtgtgattccaggcctggtgtcacatgacaccagcatgcattgcaggattattagtgtattttgagtctgtaaaaataataaatatgtttgaagtagtt

SEQ ID NO: 374137 - DNA, 430 bp, Homo sapiens
tgaggtctgaggagctgcagtgatagcttagaaattatgcaggggatttctgattcttaagaccttttggcatcatcttctggagggaggaagcgtcaaggctatagtatccatgctgttgggggtgtgggggtggagggtgcagtgcaaattatgggtacatggaggtgtacaggaggatacttgagatttgggagctggggcatagaagagggtagcattgcacagcttttgttttgccttctttgtaaacacctggctcctcttctggcatactttttggaagtttgtacagcattatccatcggccagtgctgcagaggccagtcttagaggacagcccagtaggcctttaccatgctttgcctctgctaaccagatgattttccttatgcttaaggggtgactgaaataatatgttgtgttattt

SEQ ID NO: 374138 - DNA, 828 bp, Homo sapiens
ggtggagccaggcttggcgggctgtgcgtgctcgcggtgggcggtggcggcggctgcctcgcgaaggttcgagatccgtcgcgtgcgggaggcgggccgcgatcttgcgcagggtcggtgtgggcgcaggctgcagcgccgcgactcgtgcgggtaggcgtctgcgctcggtttgagggctcggcgcggggtttcctgttccttcttctgcgcggctgcagctcgggacttcggcctgacccagcccccatggcttcagaagagctacagaaagatctagaagaggtaaaggtgttgctggaaaaggctactaggaaaagagtacgtgatgcccttacagctgaaaaatccaagattgagacagaaatcaagaacaagatgcaacagaaatcacagaagaaagcagaacttcttgataatgaaaaaccagctgctgtggttgctcccattacaacgggctatacggtgaaaatcagtaattatggatgggatcagtcagataagtttgtgaaaatctacattaccttaactggagttcatcaagttcccactgagaatgtgcaggtgcatttcacagagaggtcatttgatcttttggtaaagaatctaaatgggaagagttactccatgattgtgaacaatctcttgaaacccatctctgtggaaggcagttcaaaaaaagtcaagactgatacagttcttatattgtgtagaaagaaagtggaaaacacaaggtgggattacctgacccaggttgaaaaggagtgcaaagaaaaagagtgagtctacttccatttttttaaagaattttagtgtattgtttgagat

SEQ ID NO: 374139 - DNA, 1005 bp, Homo sapiens
  misc_feature (786)..(787): n is a, c, g, or t
  misc_feature (794)..(794): n is a, c, g, or t
  misc_feature (796)..(796): n is a, c, g, or t
  misc_feature (801)..(801): n is a, c, g, or t
  misc_feature (807)..(807): n is a, c, g, or t
  misc_feature (809)..(810): n is a, c, g, or t
  misc_feature (815)..(815): n is a, c, g, or t
  misc_feature (824)..(824): n is a, c, g, or t
  misc_feature (826)..(826): n is a, c, g, or t
tgggcttccgctacagggcccggtcacgaggccaacgtagctccacctctacggcggccagtgatgacgccaccacgtcggaactgttagaccgcggtgacgtctccaccgcgccaaactcactgaaaatcaaaccgctaccattaggagccctccacgcttaacatatccgttctttctcgtttgaaagtaaccaggctgctcctccccatttttcgccttcttctcgcggaggctgagagactaaccttacacaacatggcggcctggtgtgtctggtgtcctagagcggacgaaagcaggtgactctctagtcaacttccgacttggactccgaagatcgctacagaaagatctagaagaggtaaaggtgttgctggaaaaggctactaggaaaagagtacgtgatgcccttacagctgaaaaatccaagattgagacagaaatcaagaacaagatgcaacagaaatcacagaagaaagcagaacttcttgataatgaaaaaccagctgctgtggttgctcccattacaacgggctatacggtgaaaatcagtaattatggatgggatcagtcagataagtttgtgaaaatctacattaccttaactggagttcatcaagttcccactgagaatgtgcaggtgcatttcacagagaggtcatttgatcttttggtaaagaatctaaatgggaagagttactccatgattgtgaacaatctcttgaaacccatctctgtggaaggcagttcaaaaaaacagactgatacagtctatatcgtgtnnaacgaangngcccnccaggngnnttccngcccgttgnanggtgcgagcaagagagctcttgtatgaaaaatcgtgcggtgggatgttcccgaacttgggaggaccttagggcacaaaacgggggtcagaaacccaggacggattgacacacgggaagcacagggatctcacaggggatttgcgacgtcacccaaagcggcaattacgttcggtcacgg

SEQ ID NO: 374140 - DNA, 785 bp, Homo sapiens
  misc_feature (612)..(612): n is a, c, g, or t
  misc_feature (618)..(618): n is a, c, g, or t
  misc_feature (624)..(624): n is a, c, g, or t
  misc_feature (649)..(649): n is a, c, g, or t
  misc_feature (652)..(652): n is a, c, g, or t
  misc_feature (691)..(691): n is a, c, g, or t
  misc_feature (694)..(694): n is a, c, g, or t
  misc_feature (697)..(697): n is a, c, g, or t
  misc_feature (704)..(704): n is a, c, g, or t
  misc_feature (716)..(716): n is a, c, g, or t
  misc_feature (719)..(720): n is a, c, g, or t
  misc_feature (736)..(736): n is a, c, g, or t
  misc_feature (747)..(747): n is a, c, g, or t
  misc_feature (756)..(756): n is a, c, g, or t
  misc_feature (774)..(774): n is a, c, g, or t
ggtggagccaggcttggcgggctgtgcgtgctcgcggtgggcggtggcggcggctgcctcgcgaaggttcgagatccgtcgcgtgcgggaggcgggccgcgatcttgcgcagggtcggtgtgggcgcaggctgcagcgccgcgactcgtgcgggtaggcgtctgcgctcggtttgagggctcggcgcggggtttcctgttccttcttctgcgcggctgcagctcgggacttcggcctgacccagcccccatggcttcagaagagctacagaaagatctagaagaggtaaaggtgttgctggaaaaggctactaggaaaagagtacgtgatgcccttacagctgaaaaatccaagattgagacagaaatcaagaacaagatgcaacagaaatcacagaagaaagcagaacttcttgataatgaaaaaccagctgctgtggttgctcccattacaacgggctatacggtgaaaatcagtaattatggatgggatcagtcagataagtttgtgaaaatctacattaccttaactggagttcatcaagttcccactgagaatgtgcaggtgcatttcacagagaggcatttgaacctttgggaaagaatccaaatngggagngttacncccaggatttggaacaattccttgnaanccatccctttgggaagggagttccaaaaaaagcccaagnccnggnaacagtncctaaaaattgnggnnaaaaaaaaagtggggnaaccccaaggngggggttanccctggccccccggtttnaaaaggggtcc

SEQ ID NO: 374141 - DNA, 843 bp, Homo sapiens
ttgagaccagcctggccaacatggtgaaactctgtctctactaaaaatacaaaaattagccgggcatggtggcatgtgcctgtaatcccagctactcgggaggctgaggcagacagaattgtttgaacctgggaggcggaggttgcagtgaaccgagatgcgccactgcactccagcctgggcaacagagcaggactgtctcaaaaaaaaaaaaaaaaaaaaaatcatgggaaatccctgtgcctaaaaatagcccctaactattttgatgacctctttcgtgcaccaagtgtgtgcatgcttgatacgtgtgtgttgttttcattaagatgaatttgtgcgtgccgttttgattgtaaatatctttgggtactctgtcttccttcttatccctctacttcctgccagtgttaacaacctgaatgatagtatcttccggtgctttcgtttccccattgttgtatatgttttctttttaaaggaagccctcctatgacactgaaacagatcctagtgagggattgatgaatgttctaaagaaaatttatgaagatggagacgatgatatgaagcgaaccattaataaagcctgggtggaatcaagagagaagcaagccaaaggagacacggaattttgagactttaaagtcgttttgggaactgtgatgtgatgtggaaatactgatgtttccagtaagggaatattggtgagctgcatatataaatttgacagatagctatttacatagccttctaagtaaaggcaatgaattctccatttcctactggaggatttatttaaataaaatatgcttattaaacactcctgcaaagatggtttta

SEQ ID NO: 374142 - DNA, 3153 bp, Homo sapiens
  misc_feature (2824)..(2824): n is a, c, g, or t
  misc_feature (2841)..(2841): n is a, c, g, or t
  misc_feature (2846)..(2846): n is a, c, g, or t
  misc_feature (2849)..(2850): n is a, c, g, or t
  misc_feature (2853)..(2853): n is a, c, g, or t
  misc_feature (2860)..(2860): n is a, c, g, or t
  misc_feature (2863)..(2863): n is a, c, g, or t
  misc_feature (2897)..(2897): n is a, c, g, or t
  misc_feature (2904)..(2904): n is a, c, g, or t
  misc_feature (2909)..(2910): n is a, c, g, or t
  misc_feature (2924)..(2924): n is a, c, g, or t
  misc_feature (2935)..(2935): n is a, c, g, or t
  misc_feature (2943)..(2943): n is a, c, g, or t
  misc_feature (2958)..(2958): n is a, c, g, or t
  misc_feature (2966)..(2966): n is a, c, g, or t
  misc_feature (2994)..(2994): n is a, c, g, or t
  misc_feature (3019)..(3019): n is a, c, g, or t
  misc_feature (3022)..(3023): n is a, c, g, or t
  misc_feature (3039)..(3039): n is a, c, g, or t
  misc_feature (3064)..(3064): n is a, c, g, or t
  misc_feature (3070)..(3070): n is a, c, g, or t
  misc_feature (3075)..(3076): n is a, c, g, or t
  misc_feature (3082)..(3083): n is a, c, g, or t
  misc_feature (3103)..(3103): n is a, c, g, or t
ggtggagccaggcttggcgggctgtgcgtgctcgcggtgggcggtggcggcggctgcctcgcgaaggttcgagatccgtcgcgtgcgggaggcgggccgcgatcttgcgcagggtcggtgtgggcgcaggctgcagcgccgcgactcgtgcgggtaggcgtctgcgctcggtttgagggctcggcgcggggtttcctgttccttcttctgcgcggctgcagctcgggacttcggcctgacccagcccccatggcttcagaagagctacagaaagatctagaagaggtaaaggtgttgctggaaaaggctactaggaaaagagtacgtgatgcccttacagctgaaaaatccaagattgagacagaaatcaagaacaagatgcaacagaaatcacagaagaaagcagaacttcttgataatgaaaaaccagctgctgtggttgctcccattacaacgggctatacggtgaaaatcagtaattatggatgggatcagtcagataagtttgtgaaaatctacattaccttaactggagttcatcaagttcccactgagaatgtgcaggtgcatttcacagagaggtcatttgatcttttggtaaagaatctaaatgggaagagttactccatgattgtgaacaatctcttgaaacccatctctgtggaaggcagttcaaaaaaagtcaagactgatacagttcttatattgtgtagaaagaaagtggaaaacacaaggtgggattacctgacccaggttgaaaaggagtgcaaagaaaaagagaagccctcctatgacactgaaacagatcctagtgagggattgatgaatgttctaaagaaaatttatgaagatggagacgatgatatgaagcgaaccattaataaagcctgggtggaatcaagagagaagcaagccaaaggagacacggaattttgagactttaaagtcgttttgggaactgtgatgtgatgtggaaatactgatgtttccagtaagggaatattggtgagctgcatatataaatttgacagatagctatttacatagccttctaagtaaaggcaatgaattctccatttcctactggaggatttatttaaataaaatatgcttattaaacactcctgcaaagatggttttattagtaccctggtcattttgttcaaggaagggttatattgcattctcacgtgaaatataaaaagcaagtcttgcccaataaaaacgctacattgtgtgtattttttgttcagctaagaattggaaaagtatttgcttgccttttaagttactgacatcagcttccaccagtgtaaaaattgagtaaaacctgaagttttgcataaaatgcaaatcggtgcctgtgcttgaaggttgctgtagagcatctgaccccttattaccaccttaagcaatgtatatgccatgcattaccatgcactaattcaatcacaggtgtttctatctagatttaaatatatttgtcaatgaatgtggaatagaaaatctaaacatgacaataatagacatatctttgtatggtaccagttagttttgccgtggatcagatggtttataaaagtaataaccataaagcaaaaaataatttgaaagcccgtctattcctatgctcaataaagttaagtttttcttcattagaacagttttatgatttatttgtctaggagtatgtcagaaaaatcaggcttttagtaggaattactcctattccccctgaagtcaggaccagtgcctgtgatctccattactttattttcctggaggtattagccaacacagttagatcagagaaagcaattgaagccaggcatgaaggctggcgcccgtaatcccagctactaaggctggaggatcacttcagcccaggagtttaaggctgcagtgagctatgatgatgccactgtactgcagcttgggtaacagattgagaacctgtctcattaaaaaaaaaaaaaaaaaaaaagccgttagacacacaggaaaaatccagaagggtaaactaaactaaagctacaattaatatgggaatttggaagaagtggtaggatttaaaatacagaaacagtttatgtataggatagctataagtaaatactgaaacacattatgcctctgtaattggggttgacacatgaacagaatagcagacacaatgcatatgaaagttacagaatatggtaaaagtggggtaaagatgggtttttaatgatactaagataactgaaaataggcatatagatatattccaagccgcctgacgatctaattgtaaaaagtaaagcatacaaatactagaagaaaatggaggaaaacgacattatatgtgacttaaaacctagaagaaataaataaaactattgatcaattttaactacataaaaatgtttataggacaagaaaaaccccaccataacccaaggcaaacaatgtattgacaggattccaataattaagaatacttcatacaaaaagaaatgtaaatgacctttaacatgtaaagatgctcaccttgttcagaagagaataaaccagtgtttttacctttcacttgaaaaagaagtataaaaacaactgtattgagttgaggctgtggagaaataaggacacatatatgggaatggaatgcaaaagttaaactttggttaacaagaatatttgggcaggtgcagtggctcacacctgtaatcccaacaccttgggaggccaaggtgggcggatcacttgaggtcaggagttcaagaccatctggccaacatggtgaaaccctgtctctactgaaaataaaaaaaactagctgcgcgcnatgcgctgcgcaagcangcaangcnnaanaaagcanaanagcgcgcagcaatgcacgcgcgaaagccctaaanctgcaanaatgnngcaagcaagcaggngcaagcagcantaaaatgncaaaaaagccgcagncaagcagncttgcaagctgcagcatgcagcgtgtgntgcaaaaatgcaaagtaaaagcaantgnngctgcaaaagcagctnaagcaagtatgtgctagtaagcagnagcagntagtnntgcgcnnaagtaaaaaaagtaaagcangtgcaaaagtagtgtaagtgtgtagtaaatgtgtgcaaaaaaagcaaagt

SEQ ID NO: 374143 - DNA, 1949 bp, Homo sapiens
  misc_feature (1759)..(1759): n is a, c, g, or t
ggtggagccaggcttggcgggctgtgcgtgctcgcggtgggcggtggcggcggctgcctcgcgaaggttcgagatccgtcgcgtgcgggaggcgggccgcgatcttgcgcagggtcggtgtgggcgcaggctgcagcgccgcgactcgtgcgggtaggcgtctgcgctcggtttgagggctcggcgcggggtttcctgttccttcttctgcgcggctgcagctcgggacttcggcctgacccagcccccatggcttcagaagagctacagaaagatctagaagaggtaaaggtgttgctggaaaaggctactaggaaaagagtacgtgatgcccttacagctgaaaaatccaagattgagacagaaatcaagaacaagatgcaacagaaatcacagaagaaagcagaacttcttgataatgaaaaaccagctgctgtggttgctcccattacaacgggctatacggtgaaaatcagtaattatggatgggatcagtcagataagtttgtgaaaatctacattaccttaactggagttcatcaagttcccactgagaatgtgcaggtgcatttcacagagaggtcatttgatcttttggtaaagaatctaaatgggaagagttactccatgattgtgaacaatctcttgaaacccatctctgtggaaggcagttcaaaaaaagtcaagactgatacagttcttatattgtgtagaaagaaagtggaaaacacaaggtgggattacctgacccaggttgaaaaggagtgcaaagaaaaagagaagccctcctatgacactgaaacagatcctagtgagggattgatgaatgttctaaagaaaatttatgaagatggagacgatgatatgaagcgaaccattaataaagcctgggtggaatcaagagagaagcaagccaaaggagacacggaattttgagactttaaagtcgttttgggaactgtgatgtgatgtggaaatactgatgtttccagtaagggaatattggtgagctgcatatataaatttgacagatagctatttacatagccttctaagtaaaggcaatgaattctccatttcctactggaggatttatttaaataaaatatgcttattaaacactcctgcaaagatggttttattagtaccctggtcattttgttcaaggaagggttatattgcattctcacgtgaaatataaaaagcaagtcttgcccaataaaaacgctacattgtgtgtattttttgttcagctaagaattggaaaagtatttgcttgccttttaagttactgacatcagcttccaccagtgtaaaaattgagtaaaacctgaagttttgcataaaatgcaaatcggtgcctgtgcttgaaggttgctgtagagcatctgaccccttattaccaccttaagcaatgtatatgccatgcattaccatgcactaattcaatcacaggtgtttctatctagatttaaatatatttgtcaatgaatgtggaatagaaaatctaaacatgacaataatagacatatctttgtatggtaccagttagttttgccgtggatcagatggtttataaaagtaataaccataaagcaaaaaataatttgaaagcccgtctattcctatgctcaataaagttaagtttttcttcattaaaaaaaacaagataattaaaaatacacagaaaacaaaaaaaagaggggggggtctaatatctccggggggccaattaacgtgacacattttttggaagggncccagagggggtataaaagaagagggggggtcaaatgcgggggaactgctctggtcttgggaaccctccttgggttaggaccccagataagcccgggaaagatatggtggacgttctgcgttgtcgtgatatatttaattatgataatttctgagatcaatattaattggtatagttggtatatatagag

SEQ ID NO: 374144 - DNA, 1526 bp, Homo sapiens
ggtggagccaggcttggcgggctgtgcgtgctcgcggtgggcggtggcggcggctgcctcgcgaaggttcgagatccgtcgcgtgcgggaggcgggccgcgatcttgcgcagggtcggtgtgggcgcaggctgcagcgccgcgactcgtgcgggtaggcgtctgcgctcggtttgagggctcggcgcggggtttcctgttccttcttctgcgcggctgcagctcgggacttcggcctgacccagcccccatggcttcagaagagctacagaaagatctagaagaggtaaaggtgttgctggaaaaggctactaggaaaagagtacgtgatgcccttacagctgaaaaatccaagattgagacagaaatcaagaacaagatgcaacagaaatcacagaagaaagcagaacttcttgataatgaaaaaccagctgctgtggttgctcccattacaacgggctatacggtgaaaatcagtaattatggatgggatcagtcagataagtttgtgaaaatctacattaccttaactggagttcatcaagttcccactgagaatgtgcaggtgcatttcacagagaggtcatttgatcttttggtaaagaatctaaatgggaagagttactccatgattgtgaacaatctcttgaaacccatctctgtggaaggcagttcaaaaaaagtcaagactgatacagttcttatattgtgtagaaagaaagtggaaaacacaaggtgggattacctgacccaggttgaaaaggagtgcaaagaaaaagagaagccctcctatgacactgaaacagatcctagtgagggattgatgaatgttctaaagaaaatttatgaagatggagacgatgatatgaagcgaaccattaataaagcctgggtggaatcaagagagaagcaagccaaaggagacacggaattttgagactttaaagtcgttttgggaactgtgatgtgatgtggaaatactgatgtttccagtaagggaatattggtgagctgcatatataaatttgacagatagctatttacatagccttctaagtaaaggcaatgaattctccatttcctactggaggatttatttaaataaaatatgcttattaaacactcctgcaaagatggttttattagtaccctggtcattttgttcaaggaagggttatattgcattctcacgtgaaatataaaaagcaagtcttgcccaataaaaacgctacattgtgtgtattttttgttcagctaagaattggaaaagtatttgcttgccttttaagttactgacatcagcttccaccagtgtaaaaattgagtaaaacctgaagttttgcataaaatgcaaatcggtgcctgtgcttgaaggttgctgtagagcatctgaccccttattaccaccttaagcaatttagttttgccgtggatcagatggtttataaaagtaataaccataaagcaaaaaataatttgaaagcccgtctattcctatgctcaataaagttaagtttttcttcatta

SEQ ID NO: 374145 - DNA, 1389 bp, Homo sapiens
ggtggagccaggcttggcgggctgtgcgtgctcgcggtgggcggtggcggcggctgcctcgcgaaggttcgagatccgtcgcgtgcgggaggcgggccgcgatcttgcgcagggtcggtgtgggcgcaggctgcagcgccgcgactcgtgcgggtaggcgtctgcgctcggtttgagggctcggcgcggggtttcctgttccttcttctgcgcggctgcagctcgggacttcggcctgacccagcccccatggcttcagaagagctacagaaagatctagaagaggtaaaggtgttgctggaaaaggctactaggaaaagagtacgtgatgcccttacagctgaaaaatccaagattgagacagaaatcaagaacaagatgcaacagaaatcacagaagaaagcagaacttcttgataatgaaaaaccagctgctgtggttgctcccattacaacgggctatacggtgaaaatcagtaattatggatgggatcagtcagataagtttgtgaaaatctacattaccttaactggagttcatcaagttcccactgagaatgtgcaggtgcatttcacagagaggtcatttgatcttttggtaaagaatctaaatgggaagagttactccatgattgtgaacaatctcttgaaacccatctctgtggaaggcagttcaaaaaaagtcaagactgatacagttcttatattgtgtagaaagaaagtggaaaacacaaggtgggattacctgacccaggttgaaaaggagtgcaaagaaaaagagaagccctcctatgacactgaaacagatcctagtgagggattgatgaatgttctaaagaaaatttatgaagatggagacgatgatatgaagcgaaccattaataaagcctgggtggaatcaagagagaagcaagccaaaggagacacggaattttgagactttaaagtcgttttgggaactgtgatgtgatgtggaaatactgatgtttccagtaagggaatattggtgagctgcatatataaatttgacagatagctatttacatagccttctaagtaaaggcaatgaattctccatttcctactggaggatttatttaaataaaatatgcttattaaacactcctgcaaagatggttttaaaaaaaaaaaaaaaaaaaaaaaaaaaaaaaaaaaaaaaacaaaaaaaaaaaaaaaaaaaaaaaaaaaaacatgtcgcccgcttgggcccagccgattttagacttgggcaagttaatccatgtggccgaatttcgggctaattgggccaattcgccttatagggggtcgattaacaatcaattggccgtggtttaaaaacttgggaatgggaaaaaccttgggtttcccatttccgcttgggtcccct

SEQ ID NO: 374146 - DNA, 1607 bp, Homo sapiens
ggtggagccaggcttggcgggctgtgcgtgctcgcggtgggcggtggcggcggctgcctcgcgaaggttcgagatccgtcgcgtgcgggaggcgggccgcgatcttgcgtctgcgctcggtttgagggctcggcgcggggtttcctgttccttcttctgcgcggctgcagctcgggacttcggcctgacccagcccccatggcttcagaagagctacagaaagatctagaagaggtaaaggtgttgctggaaaaggctactaggaaaagagtacgtgatgcccttacagctgaaaaatccaagattgagacagaaatcaagaacaagatgcaacagaaatcacagaagaaagcagaacttcttgataatgaaaaaccagctgctgtggttgctcccattacaacgggctatacggtgaaaatcagtaattatggatgggatcagtcagataagtttgtgaaaatctacattaccttaactggagttcatcaagttcccactgagaatgtgcaggtgcatttcacagagaggtcatttgatcttttggtaaagaatctaaatgggaagagttactccatgattgtgaacaatctcttgaaacccatctctgtggaaggcagttcaaaaaaagtcaagactgatacagttcttatattgtgtagaaagaaagtggaaaacacaaggtgggattacctgacccaggttgaaaaggagtgcaaagaaaaagagaagccctcctatgacactgaaacagatcctagtgagggattgatgaatgttctaaagaaaatttatgaagatggagacgatgatatgaagcgaaccattaataaagcctgggtggaatcaagagagaagcaagccaaaggagacacggaattttgagactttaaagtcgttttgggaactgtgatgtgatgtggaaatactgatgtttccagtaagggaatattggtgagctgcatatataaatttgacagatagctatttacatagccttctaagtaaaggcaatgaattctccatttcctactggaggatttatttaaataaaatatgcttattaaacactcctgcaaagatggttttattagtaccctggtcattttgttcaaggaagggttatattgcattctcacgtgaaatataaaaagcaagtcttgcccaataaaaacgctacattgtgtgtattttttgttcagctaagaattggaaaagtatttgcttgccttttaagttactgacatcagcttccaccagtgtaaaaattgagtaaaacctgaagttttgcataaaatgcaaatcggtgcctgtgcttgaaggttgctgtagagcatctgaccccttattaccaccttaagcaatgtatatgccatgcattaccatgcactaattcaatcacaggtgtttctatctagatttaaatatatttgtcaatgaatgtggaatagaaaatctaaacatgacaataatagacatatctttgtatggtaccagttagttttgccgtggatcagatggtttataaaagtaataaccataaagcaaaaaataatttgaaagcccgtctattcctatgctcaataaagttaagtttttcttcatta

SEQ ID NO: 374147 - DNA, 1737 bp, Homo sapiens
tgggcttccgctacagggcccggtcacgaggccaacgtagctccacctctacggcggccagtgatgacgccaccacgtcggaactgttagaccgcggtgacgtctccaccgcgccaaactcactgaaaatcaaaccgctaccattaggagccctccacgcttaacatatccgttctttctcgtttgaaagtaaccaggctgctcctccccatttttcgccttcttctcgcggaggctgagagactaaccttacacaacatggcggcctggtgtgtctggtgtcctagagcggacgaaagcaggtgactctctagtcaacttccgacttggactccgaagatcgctacagaaagatctagaagaggtaaaggtgttgctggaaaaggctactaggaaaagagtacgtgatgcccttacagctgaaaaatccaagattgagacagaaatcaagaacaagatgcaacagaaatcacagaagaaagcagaacttcttgataatgaaaaaccagctgctgtggttgctcccattacaacgggctatacggtgaaaatcagtaattatggatgggatcagtcagataagtttgtgaaaatctacattaccttaactggagttcatcaagttcccactgagaatgtgcaggtgcatttcacagagaggtcatttgatcttttggtaaagaatctaaatgggaagagttactccatgattgtgaacaatctcttgaaacccatctctgtggaaggcagttcaaaaaaagtcaagactgatacagttcttatattgtgtagaaagaaagtggaaaacacaaggtgggattacctgacccaggttgaaaaggagtgcaaagaaaaagagaagccctcctatgacactgaaacagatcctagtgagggattgatgaatgttctaaagaaaatttatgaagatggagacgatgatatgaagcgaaccattaataaagcctgggtggaatcaagagagaagcaagccaaaggagacacggaattttgagactttaaagtcgttttgggaactgtgatgtgatgtggaaatactgatgtttccagtaagggaatattggtgagctgcatatataaatttgacagatagctatttacatagccttctaagtaaaggcaatgaattctccatttcctactggaggatttatttaaataaaatatgcttattaaacactcctgcaaagatggttttattagtaccctggtcattttgttcaaggaagggttatattgcattctcacgtgaaatataaaaagcaagtcttgcccaataaaaacgctacattgtgtgtattttttgttcagctaagaattggaaaagtatttgcttgccttttaagttactgacatcagcttccaccagtgtaaaaattgagtaaaacctgaagttttgcataaaatgcaaatcggtgcctgtgcttgaaggttgctgtagagcatctgaccccttattaccaccttaagcaatgtatatgccatgcattaccatgcactaattcaatcacaggtgtttctatctagatttaaatatatttgtcaatgaatgtggaatagaaaatctaaacatgacaataatagacatatctttgtatggtaccagttagttttgccgtggatcagatggtttataaaagtaataaccataaagcaaaaaataatttgaaagcccgtctattcctatgctcaataaagttaagtttttcttcatta

SEQ ID NO: 374148 - DNA, 1609 bp, Homo sapiens
ggtggagccaggcttggcgggctgtgcgtgctcgcggtgggcggtggcggcggctgcctcgcgaaggttcgagatccgtcgcgtgcgggaggcgggccgcgatcttgcgcagggtcggtgtgggcgcaggctgcagcgccgcgactcgtgcgggtaggcgtctgcgctcggtttgagggctcggcgcggggtttcctgttccttcttctgcgcggctgcagctcgggacttcggcctgacccagcccccatggcttcagaagagctacagaaagatctagaagaggtaaaggtgttgctggaaaaggctactaggaaaagagtacgtgatgcccttacagctgaaaaatccaagattgagacagaaatcaagaacaagatgcaacagaaatcacagaagaaagcagaacttcttgataatgaaaaaccagctgctgtggttgctcccattacaacgggctatacggtgaaaatcagtaattatggatgggatcagtcagataagtttgtgaaaatctacattaccttaactggagttcatcaagttcccactgagaatgtgcaggtgcatttcacagagaggtcatttgatcttttggtaaagaatctaaatgggaagagttactccatgattgtgaacaatctcttgaaacccatctctgtggaaggcagttcaaaaaaagtcaagactgatacagttcttatattgtgtagaaagaaagtggaaaacacaaggtgggattacctgacccaggttgaaaaggagtgcaaagaaaaagagaagccctcctatgacactgaaacagatcctagtgagggattgatgaatgttctaaagcctgggtggaatcaagagagaagcaagccaaaggagacacggaattttgagactttaaagtcgttttgggaactgtgatgtgatgtggaaatactgatgtttccagtaagggaatattggtgagctgcatatataaatttgacagatagctatttacatagccttctaagtaaaggcaatgaattctccatttcctactggaggatttatttaaataaaatatgcttattaaacactcctgcaaagatggttttattagtaccctggtcattttgttcaaggaagggttatattgcattctcacgtgaaatataaaaagcaagtcttgcccaataaaaacgctacattgtgtgtattttttgttcagctaagaattggaaaagtatttgcttgccttttaagttactgacatcagcttccaccagtgtaaaaattgagtaaaacctgaagttttgcataaaatgcaaatcggtgcctgtgcttgaaggttgctgtagagcatctgaccccttattaccaccttaagcaatgtatatgccatgcattaccatgcactaattcaatcacaggtgtttctatctagatttaaatatatttgtcaatgaatgtggaatagaaaatctaaacatgacaataatagacatatctttgtatggtaccagttagttttgccgtggatcagatggtttataaaagtaataaccataaagcaaaaaataatttgaaagcccgtctattcctatgctcaataaagttaagtttttcttcatta

SEQ ID NO: 374149 - DNA, 1622 bp, Homo sapiens
tgggcttccgctacagggcccggtcacgaggccaacgtagctccacctctacggcggccagtgatgacgccaccacgtcggaactgttagaccgcggtgacgtctccaccgcgccaaactcactgaaaatcaaaccgctaccattaggagccctccacgcttaacatatccgttctttctcgtttgaaagtaaccaggctgctcctccccatttttcgccttcttctcgcggaggctgagagactaaccttacacaacatggcggcctggtgtgtctggtgtcctagagcggacgaaagcaggtgactctctagtcaacttccgacttggactccgaagatcggtctgcgctcggtttgagggctcggcgcggggtttcctgttccttcttctgcgcggctgcagctcgggacttcggcctgacccagcccccatggcttcagaagaggatgggatcagtcagataagtttgtgaaaatctacattaccttaactggagttcatcaagttcccactgagaatgtgcaggtgcatttcacagagaggtcatttgatcttttggtaaagaatctaaatgggaagagttactccatgattgtgaacaatctcttgaaacccatctctgtggaaggcagttcaaaaaaagtcaagactgatacagttcttatattgtgtagaaagaaagtggaaaacacaaggtgggattacctgacccaggttgaaaaggagtgcaaagaaaaagagaagccctcctatgacactgaaacagatcctagtgagggattgatgaatgttctaaagaaaatttatgaagatggagacgatgatatgaagcgaaccattaataaagcctgggtggaatcaagagagaagcaagccaaaggagacacggaattttgagactttaaagtcgttttgggaactgtgatgtgatgtggaaatactgatgtttccagtaagggaatattggtgagctgcatatataaatttgacagatagctatttacatagccttctaagtaaaggcaatgaattctccatttcctactggaggatttatttaaataaaatatgcttattaaacactcctgcaaagatggttttattagtaccctggtcattttgttcaaggaagggttatattgcattctcacgtgaaatataaaaagcaagtcttgcccaataaaaacgctacattgtgtgtattttttgttcagctaagaattggaaaagtatttgcttgccttttaagttactgacatcagcttccaccagtgtaaaaattgagtaaaacctgaagttttgcataaaatgcaaatcggtgcctgtgcttgaaggttgctgtagagcatctgaccccttattaccaccttaagcaatgtatatgccatgcattaccatgcactaattcaatcacaggtgtttctatctagatttaaatatatttgtcaatgaatgtggaatagaaaatctaaacatgacaataatagacatatctttgtatggtaccagttagttttgccgtggatcagatggtttataaaagtaataaccataaagcaaaaaataatttgaaagcccgtctattcctatgctcaataaagttaagtttttcttcatta

SEQ ID NO: 374150 - DNA, 1360 bp, Homo sapiens
ttgagaccagcctggccaacatggtgaaactctgtctctactaaaaatacaaaaattagccgggcatggtggcatgtgcctgtaatcccagctactcgggaggctgaggcagacagaattgtttgaacctgggaggcggaggttgcagtgaaccgagatgcgccactgcactccagcctgggcaacagagcaggactgtctcaaaaaaaaaaaaaaaaaaaaaatcatgggaaatccctgtgcctaaaaatagcccctaactattttgatgacctctttcgtgcaccaagtgtgtgcatgcttgatacgtgtgtgttgttttcattaagatgaatttgtgcgtgccgttttgattgtaaatatctttgggtactctgtcttccttcttatccctctacttcctgccagtgttaacaacctgaatgatagtatcttccggtgctttcgtttccccattgttgtatatgttttctttttaaaggaagccctcctatgacactgaaacagatcctagtgagggattgatgaatgttctaaagaaaatttatgaagatggagacgatgatatgaagcgaaccattaataaagcctgggtggaatcaagagagaagcaagccaaaggagacacggaattttgagactttaaagtcgttttgggaactgtgatgtgatgtggaaatactgatgtttccagtaagggaatattggtgagctgcatatataaatttgacagatagctatttacatagccttctaagtaaaggcaatgaattctccatttcctactggaggatttatttaaataaaatatgcttattaaacactcctgcaaagatggttttattagtaccctggtcattttgttcaaggaagggttatattgcattctcacgtgaaatataaaaagcaagtcttgcccaataaaaacgctacattgtgtgtattttttgttcagctaagaattggaaaagtatttgcttgccttttaagttactgacatcagcttccaccagtgtaaaaattgagtaaaacctgaagttttgcataaaatgcaaatcggtgcctgtgcttgaaggttgctgtagagcatctgaccccttattaccaccttaagcaatgtatatgccatgcattaccatgcactaattcaatcacaggtgtttctatctagatttaaatatatttgtcaatgaatgtggaatagaaaatctaaacatgacaataatagacatatctttgtatggtaccagttagttttgccgtggatcagatggtttataaaagtaataaccataaagcaaaaaataatttgaaagcccgtctattcctatgctcaataaagttaagtttttcttcatta

SEQ ID NO: 374151 - DNA, 1105 bp, Homo sapiens
tgggcttccgctacagggcccggtcacgaggccaacgtagctccacctctacggcggccagtgatgacgccaccacgtcggaactgttagaccgcggtgacgtctccaccgcgccaaactcactgaaaatcaaaccgctaccattaggagccctccacgcttaacatatccgttctttctcgtttgaaagtaaccaggctgctcctccccatttttcgccttcttctcgcggaggctgagagactaaccttacacaacatggcggcctggtgtgtctggtgtcctagagcggacgaaagcaggtgactctctagtcaacttccgacttggactccgaagatcggtctgcgctcggtttgagggctcggcgcggggtttcctgttccttcttctgcgcggctgcagctcgggacttcggcctgacccagcccccatggcttcagaagaggatgggatcagtcagataagtttgtgaaaatctacattaccttaactggagttcatcaagttcccactgagaatgtgcaggtgcatttcacagagaggtcatttgatcttttggtaaagaatctaaatgggaagagttactccatgattgtgaacaatctcttgaaacccatctctgtggaaggcagttcaaaaaaagtcaagactgatacagttcttatattgtgtagaaagaaagtggaaaacacaaggtgggattacctgacccaggttgaaaaggagtgcaaagaaaaagagaagccctcctatgacactgaaacagatcctagtgagggattgatgaatgttctaaagaaaatttatgaagatggagacgatgatatgaagcgaaccattaataaagcctgggtggaatcaagagagaagcaagccaaaggagacacggaattttgagactttaaagtcgttttgggaactgtgatgtgatgtggaaatactgatgtttccagtaagggaatattggtgagctgcatatataaatttgacagatagctatttacatagccttctaagtaaaggcaatgaattctccatttcctactggaggatttatttaaataaaatatgcttattaaacactcctgcaaagatggtttta

SEQ ID NO: 374152 - DNA, 845 bp, Homo sapiens
  misc_feature (816)..(816): n is a, c, g, or t
ggtggagccaggcttggcgggctgtgcgtgctcgcggtgggcggtggcggcggctgcctcgcgaaggttcgagatccgtcgcgtgcgggaggcgggccgcgatcttgcgcagggtcggtgtgggcgcaggctgcagcgccgcgactcgtgcgggtaggcgtctgcgctcggtttgagggctcggcgcggggtttcctgttccttcttctgcgcggctgcagctcgggacttcggcctgacccagcccccatggcttcagaagagctacagaaagatctagaagaggtaaaggtgttgctggaaaaggctactaggaaaagagtacgtgatgcccttacagctgaaaaatccaagattgagacagaaatcaagaacaagatgcaacagaaatcacagaagaaagcagaacttcttgataatgaaaaaccagctgctgtggttgctcccattacaacgggctatacggtgaaaatcagtaattatggatgggatcagtcagataagtttgtgaaaatctacattaccttaactggagttcatcaagttcccactgagaatgtgcaggtgcatttcacagagaggtcatttgatcttttggtaaagaatctaaatgggaagagttactccatgattgtgaacaatctcttgaaacccatctctgtggaaggcagttcaaaaaaattagattcattaccttaactggagttcatcagttcccctgagaatgtgcaggtgcatttcacagagaggtcatttgatcttttggtaaagaatctaaatgggaagagttactccatgattgtgaacatctcttgnactgccttccacagagatgggtttcaagc

SEQ ID NO: 374153 - DNA, 1658 bp, Homo sapiens
ggtggagccaggcttggcgggctgtgcgtgctcgcggtgggcggtggcggcggctgcctcgcgaaggttcgagatccgtcgcgtgcgggaggcgggccgcgatcttgcgcagggtcggtgtgggcgcaggctgcagcgccgcgactcgtgcgggtaggcgtctgcgctcggtttgagggctcggcgcggggtttcctgttccttcttctgcgcggctgcagctcgggacttcggcctgacccagcccccatggcttcagaagagctacagaaagatctagaagaggtaaaggtgttgctggaaaaggctactaggaaaagagtacgtgatgcccttacagctgaaaaatccaagattgagacagaaatcaagaacaagatgcaacagaaatcacagaagaaagcagaacttcttgataatgaaaaaccagctgctgtggttgctcccattacaacgggctatacggtgaaaatcagtaattatggatgggatcagtcagataagtttgtgaaaatctacattaccttaactggagttcatcaagttcccactgagaatgtgcaggtgcatttcacagagaggtcatttgatcttttggtaaagaatctaaatgggaagagttactccatgattgtgaacaatctcttgaaacccatctctgtggaaggcagttcaaaaaaagtcaagactgatacagttcttatattgtgtagaaagaaagtggaaaacacaaggtgggattacctgacccaggttgaaaaggagtgcaaagaaaaagagaagccctcctatgacactgaaacagatcctagtgagggattgatgaatgttctaaagaaaatttatgaagatggagacgatgatatgaagcgaaccattaataaagcctgggtggaatcaagagagaagcaagccaaaggagacacggaattttgagactttaaagtcgttttgggaactgtgatgtgatgtggaaatactgatgtttccagtaagggaatattggtgagctgcatatataaatttgacagatagctatttacatagccttctaagtaaaggcaatgaattctccatttcctactggaggatttatttaaataaaatatgcttattaaacactcctgcaaagatggttttattagtaccctggtcattttgttcaaggaagggttatattgcattctcacgtgaaatataaaaagcaagtcttgcccaataaaaacgctacattgtgtgtattttttgttcagctaagaattggaaaagtatttgcttgccttttaagttactgacatcagcttccaccagtgtaaaaattgagtaaaacctgaagttttgcataaaatgcaaatcggtgcctgtgcttgaaggttgctgtagagcatctgaccccttattaccaccttaagcaatgtatatgccatgcattaccatgcactaattcaatcacaggtgtttctatctagatttaaatatatttgtcaatgaatgtggaatagaaaatctaaacatgacaataatagacatatctttgtatggtaccagttagttttgccgtggatcagatggtttataaaagtaataaccataaagcaaaaaataatttgaaagcccgtctattcctatgctcaataaagttaagtttttcttcatta

SEQ ID NO: 374154 - DNA, 794 bp, Homo sapiens
  misc_feature (765)..(765): n is a, c, g, or t
ggtggagccaggcttggcgggctgtgcgtgctcgcggtgggcggtggcggcggctgcctcgcgaaggttcgagatccgtcgcgtgcgggaggcgggccgcgatcttgcgtctgcgctcggtttgagggctcggcgcggggtttcctgttccttcttctgcgcggctgcagctcgggacttcggcctgacccagcccccatggcttcagaagagctacagaaagatctagaagaggtaaaggtgttgctggaaaaggctactaggaaaagagtacgtgatgcccttacagctgaaaaatccaagattgagacagaaatcaagaacaagatgcaacagaaatcacagaagaaagcagaacttcttgataatgaaaaaccagctgctgtggttgctcccattacaacgggctatacggtgaaaatcagtaattatggatgggatcagtcagataagtttgtgaaaatctacattaccttaactggagttcatcaagttcccactgagaatgtgcaggtgcatttcacagagaggtcatttgatcttttggtaaagaatctaaatgggaagagttactccatgattgtgaacaatctcttgaaacccatctctgtggaaggcagttcaaaaaaattagattcattaccttaactggagttcatcagttcccctgagaatgtgcaggtgcatttcacagagaggtcatttgatcttttggtaaagaatctaaatgggaagagttactccatgattgtgaacatctcttgnactgccttccacagagatgggtttcaagc

SEQ ID NO: 374155 - DNA, 1016 bp, Homo sapiens
  misc_feature (1002)..(1002): n is a, c, g, or t
tgggcttccgctacagggcccggtcacgaggccaacgtagctccacctctacggcggccagtgatgacgccaccacgtcggaactgttagaccgcggtgacgtctccaccgcgccaaactcactgaaaatcaaaccgctaccattaggagccctccacgcttaacatatccgttctttctcgtttgaaagtaaccaggctgctcctccccatttttcgccttcttctcgcggaggctgagagactaaccttacacaacatggcggcctggtgtgtctggtgtcctagagcggacgaaagcaggtgactctctagtcaacttccgacttggactccgaagatcggtctgcgctcggtttgagggctcggcgcggggtttcctgttccttcttctgcgcggctgcagctcgggacttcggcctgacccagcccccatggcttcagaagagctacagaaagatctagaagaggtaaaggtgttgctggaaaaggctactaggaaaagagtacgtgatgcccttacagctgaaaaatccaagattgagacagaaatcaagaacaagatgcaacagaaatcacagaagaaagcagaacttcttgataatgaaaaaccagctgctgtggttgctcccattacaacgggctatacggatgggatcagtcagataagtttgtgaaaatctacattaccttaactggagttcatcaagttcccactgagaatgtgcaggtgcatttcacagagaggtcatttgatcttttggtaaagaatctaaatgggaagagttactccatgattgtgaacaatctcttgaaacccatctctgtggaaggcagttcaaaaaaagtcaagactgatacagttcttatattgtgtagaaagaaagtggaaaacacaaggtgggattacctgacccaggttgaaaaggagtgcaaagaaaaagacctctatgacactgaaccgatctagtggggattgatgatgtctaaagttatggatggnaccatgtttgagcg

SEQ ID NO: 374156 - DNA, 1141 bp, Homo sapiens
ggtggagccaggcttggcgggctgtgcgtgctcgcggtgggcggtggcggcggctgcctcgcgaaggttcgagatccgtcgcgtgcgggaggcgggccgcgatcttgcgcagggtcggtgtgggcgcaggctgcagcgccgcgactcgtgcgggtaggcgtctgcgctcggtttgagggctcggcgcggggtttcctgttccttcttctgcgcggctgcagctcgggacttcggcctgacccagcccccatggcttcagaagagctacagaaagatctagaagaggtaaaggtgttgctggaaaaggctactaggaaaagagtacgtgatgcccttacagctgaaaaatccaagattgagacagaaatcaagaacaagatgcaacagaaatcacagaagaaagcagaacttcttgataatgaaaaaccagctgctgtggttgctcccattacaacgggctatacggtgaaaatcagtaattatggatgggatcagtcagataagtttgtgaaaatctacattaccttaactggagttcatcaagttcccactgagaatgtgcaggtgcatttcacagagaggtcatttgatcttttggtaaagaatctaaatgggaagagttactccatgattgtgaacaatctcttgaaacccatctctgtggaaggcagttcaaaaaaagtcaagactgatacagttcttatattgtgtagaaagaaagtggaaaacacaaggtgggattacctgacccaggttgaaaaggagtgcaaagaaaaagagaagccctcctatgacactgaaacagatcctagtgagggattgatgaatgttctaaagaaaatttatgaagatggagacgatgatatgaagcgaaccattaataaagcctgggtggaatcaagagagaagcaagccaaaggagacacggaattttgagactttaaagtcgttttgggaactgtgatgtgatgtggaaatactgatgtttccagtaagggaatattggtgagctgcatatataaatttgacagatagctatttacatagccttctaagtaaaggcaatgaattctccatttcctactggaggatttatttaaataaaatatgcttattaaacactcctgcaaagatggtttta

SEQ ID NO: 374157 - DNA, 1842 bp, Homo sapiens
tgggcttccgctacagggcccggtcacgaggccaacgtagctccacctctacggcggccagtgatgacgccaccacgtcggaactgttagaccgcggtgacgtctccaccgcgccaaactcactgaaaatcaaaccgctaccattaggagccctccacgcttaacatatccgttctttctcgtttgaaagtaaccaggctgctcctccccatttttcgccttcttctcgcggaggctgagagactaaccttacacaacatggcggcctggtgtgtctggtgtcctagagcggacgaaagcaggtgactctctagtcaacttccgacttggactccgaagatcggtctgcgctcggtttgagggctcggcgcggggtttcctgttccttcttctgcgcggctgcagctcgggacttcggcctgacccagcccccatggcttcagaagagctacagaaagatctagaagaggtaaaggtgttgctggaaaaggctactaggaaaagagtacgtgatgcccttacagctgaaaaatccaagattgagacagaaatcaagaacaagatgcaacagaaatcacagaagaaagcagaacttcttgataatgaaaaaccagctgctgtggttgctcccattacaacgggctatacggtgaaaatcagtaattatggatgggatcagtcagataagtttgtgaaaatctacattaccttaactggagttcatcaagttcccactgagaatgtgcaggtgcatttcacagagaggtcatttgatcttttggtaaagaatctaaatgggaagagttactccatgattgtgaacaatctcttgaaacccatctctgtggaaggcagttcaaaaaaagtcaagactgatacagttcttatattgtgtagaaagaaagtggaaaacacaaggtgggattacctgacccaggttgaaaaggagtgcaaagaaaaagagaagccctcctatgacactgaaacagatcctagtgagggattgatgaatgttctaaagaaaatttatgaagatggagacgatgatatgaagcgaaccattaataaagcctgggtggaatcaagagagaagcaagccaaaggagacacggaattttgagactttaaagtcgttttgggaactgtgatgtgatgtggaaatactgatgtttccagtaagggaatattggtgagctgcatatataaatttgacagatagctatttacatagccttctaagtaaaggcaatgaattctccatttcctactggaggatttatttaaataaaatatgcttattaaacactcctgcaaagatggttttattagtaccctggtcattttgttcaaggaagggttatattgcattctcacgtgaaatataaaaagcaagtcttgcccaataaaaacgctacattgtgtgtattttttgttcagctaagaattggaaaagtatttgcttgccttttaagttactgacatcagcttccaccagtgtaaaaattgagtaaaacctgaagttttgcataaaatgcaaatcggtgcctgtgcttgaaggttgctgtagagcatctgaccccttattaccaccttaagcaatgtatatgccatgcattaccatgcactaattcaatcacaggtgtttctatctagatttaaatatatttgtcaatgaatgtggaatagaaaatctaaacatgacaataatagacatatctttgtatggtaccagttagttttgccgtggatcagatggtttataaaagtaataaccataaagcaaaaaataatttgaaagcccgtctattcctatgctcaataaagttaagtttttcttcatta

SEQ ID NO: 374158 - DNA, 1603 bp, Homo sapiens
ggtggagccaggcttggcgggctgtgcgtgctcgcggtgggcggtggcggcggctgcctcgcgaaggttcgagatccgtcgcgtgcgggaggcgggccgcgatcttgcgcagggtcggtgtgggcgcaggctgcagcgccgcgactcgtgcgggtaggcgtctgcgctcggtttgagggctcggcgcggggtttcctgttccttcttctgcgcggctgcagctcgggacttcggcctgacccagcccccatggcttcagaagagctacagaaagatctagaagaggtaaaggtgttgctggaaaaggctactaggaaaagagtacgtgatgcccttacagctgaaaaatccaagattgagacagaaatcaagaacaagatgcaacagaaatcacagaagaaagcagaacttcttgataatgaaaaaccagctgctgtggttgctcccattacaacgggctatacggtgaaaatcagtaattatggatgggatcagtcagataagtttgtgaaaatctacattaccttaactggagttcatcaagttcccactgagaatgtgcaggtgcatttcacagagaggtcatttgatcttttggtaaagaatctaaatgggaagagttactccatgattgtgaacaatctcttgaaacccatctctgtggaaggcagttcaaaaaaagtcaagactgatacagttcttatattgtgtagaaagaaagtggaaaacacaaggtgggattacctgacccaggttgaaaaggagtgcaaagaaaaagagaagccctcctatgacactgaaacagatcctagtgagggattgatgaatgttctaaagaaaatttatgaagatggagacgatgatatgaagcgaaccattaataaattaaagtcgttttgggaactgtgatgtgatgtggaaatactgatgtttccagtaagggaatattggtgagctgcatatataaatttgacagatagctatttacatagccttctaagtaaaggcaatgaattctccatttcctactggaggatttatttaaataaaatatgcttattaaacactcctgcaaagatggttttattagtaccctggtcattttgttcaaggaagggttatattgcattctcacgtgaaatataaaaagcaagtcttgcccaataaaaacgctacattgtgtgtattttttgttcagctaagaattggaaaagtatttgcttgccttttaagttactgacatcagcttccaccagtgtaaaaattgagtaaaacctgaagttttgcataaaatgcaaatcggtgcctgtgcttgaaggttgctgtagagcatctgaccccttattaccaccttaagcaatgtatatgccatgcattaccatgcactaattcaatcacaggtgtttctatctagatttaaatatatttgtcaatgaatgtggaatagaaaatctaaacatgacaataatagacatatctttgtatggtaccagttagttttgccgtggatcagatggtttataaaagtaataaccataaagcaaaaaataatttgaaagcccgtctattcctatgctcaataaagttaagtttttcttcatta

SEQ ID NO: 374159 - DNA, 1642 bp, Homo sapiens
ggcagtgcaaatatccaagaagaggaagtttgtcgctgatggcatcttcaaagctgaactgaatgagtttcttactcgggagctggctgaagatggctactctggagttgaggtgcgagttacaccaaccaggacagaaatcattatcttagccaccagaacacagaatgcggggtttcctgttccttcttctgcgcggctgcagctcgggacttcggcctgacccagcccccatggcttcagaagagctacagaaagatctagaagaggtaaaggtgttgctggaaaaggctactaggaaaagagtacgtgatgcccttacagctgaaaaatccaagattgagacagaaatcaagaacaagatgcaacagaaatcacagaagaaagcagaacttcttgataatgaaaaaccagctgctgtggttgctcccattacaacgggctatacggtgaaaatcagtaattatggatgggatcagtcagataagtttgtgaaaatctacattaccttaactggagttcatcaagttcccactgagaatgtgcaggtgcatttcacagagaggtcatttgatcttttggtaaagaatctaaatgggaagagttactccatgattgtgaacaatctcttgaaacccatctctgtggaaggcagttcaaaaaaagtcaagactgatacagttcttatattgtgtagaaagaaagtggaaaacacaaggtgggattacctgacccaggttgaaaaggagtgcaaagaaaaagagaagccctcctatgacactgaaacagatcctagtgagggattgatgaatgttctaaagaaaatttatgaagatggagacgatgatatgaagcgaaccattaataaagcctgggtggaatcaagagagaagcaagccaaaggagacacggaattttgagactttaaagtcgttttgggaactgtgatgtgatgtggaaatactgatgtttccagtaagggaatattggtgagctgcatatataaatttgacagatagctatttacatagccttctaagtaaaggcaatgaattctccatttcctactggaggatttatttaaataaaatatgcttattaaacactcctgcaaagatggttttattagtaccctggtcattttgttcaaggaagggttatattgcattctcacgtgaaatataaaaagcaagtcttgcccaataaaaacgctacattgtgtgtattttttgttcagctaagaattggaaaagtatttgcttgccttttaagttactgacatcagcttccaccagtgtaaaaattgagtaaaacctgaagttttgcataaaatgcaaatcggtgcctgtgcttgaaggttgctgtagagcatctgaccccttattaccaccttaagcaatgtatatgccatgcattaccatgcactaattcaatcacaggtgtttctatctagatttaaatatatttgtcaatgaatgtggaatagaaaatctaaacatgacaataatagacatatctttgtatggtaccagttagttttgccgtggatcagatggtttataaaagtaataaccataaagcaaaaaataatttgaaagcccgtctattcctatgctcaataaagttaagtttttcttcatta

SEQ ID NO: 374160 - DNA, 1723 bp, Homo sapiens
  misc_feature (209)..(209): n is a, c, g, or t
  misc_feature (211)..(211): n is a, c, g, or t
gctagtagcatcaggctggcgcgcgtgtcgcagtgatctaagtgaacagtgtgtcagtaggttgccctctacggaaggtcctgagatcctgactacgtgcgttgaattcgtcacgaaattacatatgcacgcgcacgcggtgcggtgtcgggcaagcgttgctgaacgaaggcatcgcaaatcggtagttgcgtgtgaaggtcgtcttngntgcgtgcaatcgttatcgaagcgagctgccagtccgcggcggagccctatatctccttcatgccccggtcgtgagctcgggacttcggcctgacccagcccccatggcttcagaagagctacagaaagatctagaagaggtaaaggtgttgctggaaaaggctactaggaaaagagtacgtgatgcccttacagctgaaaaatccaagattgagacagaaatcaagaacaagatgcaacagaaatcacagaagaaagcagaacttcttgataatgaaaaaccagctgctgtggttgctcccattacaacgggctatacggtgaaaatcagtaattatggatgggatcagtcagataagtttgtgaaaatctacattaccttaactggagttcatcaagttcccactgagaatgtgcaggtgcatttcacagagaggtcatttgatcttttggtaaagaatctaaatgggaagagttactccatgattgtgaacaatctcttgaaacccatctctgtggaaggcagttcaaaaaaagtcaagactgatacagttcttatattgtgtagaaagaaagtggaaaacacaaggtgggattacctgacccaggttgaaaaggagtgcaaagaaaaagagaagccctcctatgacactgaaacagatcctagtgagggattgatgaatgttctaaagaaaatttatgaagatggagacgatgatatgaagcgaaccattaataaagcctgggtggaatcaagagagaagcaagccaaaggagacacggaattttgagactttaaagtcgttttgggaactgtgatgtgatgtggaaatactgatgtttccagtaagggaatattggtgagctgcatatataaatttgacagatagctatttacatagccttctaagtaaaggcaatgaattctccatttcctactggaggatttatttaaataaaatatgcttattaaacactcctgcaaagatggttttattagtaccctggtcattttgttcaaggaagggttatattgcattctcacgtgaaatataaaaagcaagtcttgcccaataaaaacgctacattgtgtgtattttttgttcagctaagaattggaaaagtatttgcttgccttttaagttactgacatcagcttccaccagtgtaaaaattgagtaaaacctgaagttttgcataaaatgcaaatcggtgcctgtgcttgaaggttgctgtagagcatctgaccccttattaccaccttaagcaatgtatatgccatgcattaccatgcactaattcaatcacaggtgtttctatctagatttaaatatatttgtcaatgaatgtggaatagaaaatctaaacatgacaataatagacatatctttgtatggtaccagttagttttgccgtggatcagatggtttataaaagtaataaccataaagcaaaaaataatttgaaagcccgtctattcctatgctcaataaagttaagtttttcttcatta

SEQ ID NO: 374161 - DNA, 1690 bp, Homo sapiens
cccgcgccagtcagtgcgccgccttcccgggggacacctcactcgccccttgctgcgccgtcggctccccagcgcttccactcgacctcgcaccccactcgcctgctgggctcgagcgggggtgtgcggcgattatccgtgcaggcggtgcggggagtgggtctgggagagcggccctttgcgcgtgttcctcaggccctttctgccctggtttcccagccagtggacaggaagcttcattcaagcaaagctgggtgcaaacatgagtgtcgttcttggtagagggcggttggaagctacagaaagatctagaagaggtaaaggtgttgctggaaaaggctactaggaaaagagtacgtgatgcccttacagctgaaaaatccaagattgagacagaaatcaagaacaagatgcaacagaaatcacagaagaaagcagaacttcttgataatgaaaaaccagctgctgtggttgctcccattacaacgggctatacggtgaaaatcagtaattatggatgggatcagtcagataagtttgtgaaaatctacattaccttaactggagttcatcaagttcccactgagaatgtgcaggtgcatttcacagagaggtcatttgatcttttggtaaagaatctaaatgggaagagttactccatgattgtgaacaatctcttgaaacccatctctgtggaaggcagttcaaaaaaagtcaagactgatacagttcttatattgtgtagaaagaaagtggaaaacacaaggtgggattacctgacccaggttgaaaaggagtgcaaagaaaaagagaagccctcctatgacactgaaacagatcctagtgagggattgatgaatgttctaaagaaaatttatgaagatggagacgatgatatgaagcgaaccattaataaagcctgggtggaatcaagagagaagcaagccaaaggagacacggaattttgagactttaaagtcgttttgggaactgtgatgtgatgtggaaatactgatgtttccagtaagggaatattggtgagctgcatatataaatttgacagatagctatttacatagccttctaagtaaaggcaatgaattctccatttcctactggaggatttatttaaataaaatatgcttattaaacactcctgcaaagatggttttattagtaccctggtcattttgttcaaggaagggttatattgcattctcacgtgaaatataaaaagcaagtcttgcccaataaaaacgctacattgtgtgtattttttgttcagctaagaattggaaaagtatttgcttgccttttaagttactgacatcagcttccaccagtgtaaaaattgagtaaaacctgaagttttgcataaaatgcaaatcggtgcctgtgcttgaaggttgctgtagagcatctgaccccttattaccaccttaagcaatgtatatgccatgcattaccatgcactaattcaatcacaggtgtttctatctagatttaaatatatttgtcaatgaatgtggaatagaaaatctaaacatgacaataatagacatatctttgtatggtaccagttagttttgccgtggatcagatggtttataaaagtaataaccataaagcaaaaaataatttgaaagcccgtctattcctatgctcaataaagttaagtttttcttcatta

SEQ ID NO: 374162 - DNA, 1100 bp, Homo sapiens
ccgatgaatagcgaagtgccgatgaatagcgaggtgccgatgaatagtcgctattcatcggcaccctccatgattgtgaacaatctcttgaaacccatctctgtggaaggcagttcaaaaaaagtcaagactgatacagttcttatattgtgtagaaagaaagtggaaaacacaaggtgggattacctgacccaggttgaaaaggagtgcaaagaaaaagagaagccctcctatgacactgaaacagatcctagtgagggattgatgaatgttctaaagaaaatttatgaagatggagacgatgatatgaagcgaaccattaataaagcctgggtggaatcaagagagaagcaagccaaaggagacacggaattttgagactttaaagtcgttttgggaactgtgatgtgatgtggaaatactgatgtttccagtaagggaatattggtgagctgcatatataaatttgacagatagctatttacatagccttctaagtaaaggcaatgaattctccatttcctactggaggatttatttaaataaaatatgcttattaaacactcctgcaaagatggttttattagtaccctggtcattttgttcaaggaagggttatattgcattctcacgtgaaatataaaaagcaagtcttgcccaataaaaacgctacattgtgtgtattttttgttcagctaagaattggaaaagtatttgcttgccttttaagttactgacatcagcttccaccagtgtaaaaattgagtaaaacctgaagttttgcataaaatgcaaatcggtgcctgtgcttgaaggttgctgtagagcatctgaccccttattaccaccttaagcaatgtatatgccatgcattaccatgcactaattcaatcacaggtgtttctatctagatttaaatatatttgtcaatgaatgtggaatagaaaatctaaacatgacaataatagacatatctttgtatggtaccagttagttttgccgtggatcagatggtttataaaagtaataaccataaagcaaaaaataatttgaaagcccgtctattcctatgctcaataaagttaagtttttcttcatta

SEQ ID NO: 374163 - DNA, 775 bp, Homo sapiens
ggtggagccaggcttggcgggctgtgcgtgctcgcggtgggcggtggcggcggctgcctcgcgaaggttcgagatccgtcgcgtgcgggaggcgggccgcgatcttgcgcagggtcggtgtgggcgcaggctgcagcgccgcgactcgtgcgggtaggcgtctgcgctcggtttgagggctcggcgcggggtttcctgttccttcttctgcgcggctgcagctcgggacttcggcctgacccagcccccatggcttcagaagagctacagaaagatctagaagaggtaaaggtgttgctggaaaaggctactaggaaaagagtacgtgatgcccttacagctgaaaaatccaagattgagacagaaatcaagaacaagatgcaacagaaatcacagaagaaagcagaacttcttgataatgaaaaaccagctgctgtggttgctcccattacaacgggctatacggtgaaaatcagtaattatggatgggatcagtcagataagtttgtgaaaatctacattaccttaactggagttcatcaagttcccactgagaatgtgcaggtgcatttcacagagaggtcatttgatcttttggtaaagaatctaaatgggaagagttactccatgattgtgaacaatctcttgaaacccatctctgtggaaggcagttcaaaaaaaaggcgttttccaattcagaatgatacagttctactatcgtgtagaaacaaacatgcaaacacatcggatctggttgacgatgacccagcactga

SEQ ID NO: 374164 - DNA, 1326 bp, Homo sapiens
tcatgtaatcccacctactcgggaggctgaggcacaagaatcacttgaacccagcaggtggaggttgcagtgagccaagactgctcctctgcactccagcctgggcaacagagtaagactgtctcaaacaaaacaaaacaaaaaacagtatcttaacctgtacattatgtttctttatctagatataaacaacatcagcctactgacatggtcatggaaaacctgaagaaattactcacatattgtgaagatgtttacctgtattacaagttggcatacgaacacaagttttatgaaattgtaaatgtgcttctgaaggaccctcagacaggttgctgtctaaaggacatgctagcaggttagatgatttcataggtgtctgttttcttgtactgttagcagattctgacagatgtgatgagaagaagaatgcattggagatctttgctaaagttgaacaatcccggtactgtaccatatcagtcctttgtgggtagtaggtagcaagtaagaaacttttcaggaggaaattcctatttaaaatagattgattttagatgattgttcatccacaccattttatatagatactagtattaagatcaaaagcttcctcttcctcaggacagcttctactttagatgatccaataatgattaaagaatacctgtacctgcagattccagtttcaaagaaatttaattattatttacacagttaaggaacaggtgatacattttcatttgttagaaactgatctttctgtaataaaatagattttcaattcagtgtatgtcattattactgctaaggaaatcttagcccttgtctgccttaaaggaatctttatttaatttactgtaattattgctgtgtagtcactacttttgttaatttctcaaatcacttagatgatggtcttgttttccacttagtaggtatacagagctttgacgttcctattatttcctatataagagaaatttaaaacattttttgttctttctgtcttaggggaataaaaaaacactaaccacacatttggttaaactgcttaggagaagacataataaagattccccaatctatacttaacagccataaacctgagttacaggctcagttactccaaataaatagttcttataggtacttaattaattaggccttggtatctaaataacaaaataatgtccccaaataaataagaggaaggcagccctatacctttgttgctctatggtgacaacataaggacctggcaaatcactcatgttttaaagctgtaactatgtcaagcatttattaagatttagtagagaacgt

SEQ ID NO: 374165 - DNA, 904 bp, Homo sapiens
atacaaatagggcatgtgacagtttttttaatctcaaagagggaatgtactttcaggtaagacctttgtaagatgacagatacctccagggtcttcaagccttttttttttttttaggaatcaggtcacaatgtgaaaagtccttggaattccatgagaaaacacaactttatttcagaaataagctttgaactttgaaaacaagagcaggtacactgttttccagaactagtttctggaaccagatcacagtgttgtcttttttaaaaaataggtagtaagtggttaagagacaattgaatagtacgtgacaggagtgactatttctttctaactggagtcagccctccatatccttgggatccacatccaaggattcaaccaacctcagatgggaaatattcaaaagaacaaacaaacaatttaaaaaaaagaaaaacaatagaacaattaaaaataataccaatttaaaaatacagtataacaactatctacatggcatttacatttattgggtattataagtgatctagagtaatctaaagtgtatggggaaatgtgcataggctatatataaatactatgctattttacagggacttgagcatccttctgtggattttggtatccaagggtttcaggaaccaatcccccatggataccaagagatgactagactcatatcaaaatatcttctgacttcaaatttatctaaaaaaagacatttttgtttgatattttcttgggtttagaggaactttaaactgagctattctgctggtcttattaatagaaggatggtgccatctttctaagatattcatgctctatgaatacaacatcagaaagtaagtgataacaaatggaggttataggagggtaattagtgtagagggaaaaatgt

SEQ ID NO: 374166 - DNA, 6335 bp, Homo sapiens
ccggaattccggggtcgactactactactaaattcgcggccgcgtcgactgaagacccagggcatgcagtgtttttcccttggcacaaagtgtattcctgtagacagtagtggagaccagcagctgtgctttgttttgacagagaatggactctctctgattttgtttggtttgactcaagaagagtttttaaacagactcatgatccatggaagtgccagcactgtggacactctttgtcatctcaatggctggggaaggtgctcaattcccatacatgcactagaggccgggatagaaaatcgtcagctggacacagtaaatttctttttgaagagcaaggaaaatctttttaatccatcctcaaaatcttctgtatctgatcagtttgatcacttgtcatcccatttatatttaagaaatgtggaagagctgataccagcattggatttactttgctcggcaattagagaaagttattctgaaccccaaagcaaacacttttcagaacaattgcttaatcttacactgtctttccttaacaaccaaataaaggagcttttcattcacactgaagaactagatgaacatctgcaaaaaggagtgaacattttgactagctacattaatgaacttcgaaccttcatgataaagtttccttggaagctaacagatgctatagatgaatatgatgtacatgaaaatgtccccaaagtaaaggagagcaatatatggaagaaactcagctttgaggaagttattgccagcgccattttaaacaacaaaataccagaggcacagactttcttcaggattgatagtcattctgctcaaaaacttgaggagcttattggcataggcctaaatttggtctttgacaatttaaaaaagaacaatataaaggaagcctctgaacttttgaagaatatggggtttgatgtaaaaggccaattgctcaagatctgcttctatacaactaataaaaatatacgtgactttttggttgaaattttaaaagaaaaaaattatttttctgaaaaagagaaaagaactatagacttcgtgcatcaagttgagaagctttatttgggacatttccaagaaaatatgcaaatccagtcatttcccaggtactggataaaggaacaagattttttcaagcacaagtctgttttggactcattcctgaaatatgattgtaaagatgaatttaacaaacaggaccatagaattgtgttaaattgggctctgtggtgggatcaactaacacaagaatccatccttctccccaggataagtccagaagaatacaaatcatattcccctgaagccctctggagatacctcacagctcgccatgattggttaaacattatcttatggattggagaatttcaaacccagcatagttatgcttcacttcagcagaacaaatggccccttctgactgttgatgttattaaccagaatacttcctgtaacaactacatgaggaatgaaattttagataagctggccaggaatggggtttttttggcatctgaactggaagactttgaatgcttcctcctaagactgagccgtattggaggtgtaatacaggataccctccctgttcaaaactacaagaccaaagaaggttgggatttccattctcaattcattctctattgtttggagcacagtctgcagcatcttctttatgtctaccttgactgttacaaatcccaaactgatcttccaggctagccttgcaaatgctcagattttgattcccaccaatcaggccagtgtaagcagtatgctattggaaggacataccctcctggcccttgctactacaatgtattctcctgggggtgtcagtcaggttgttcagaatgaagaaaatgaaaactgtttgaagaaagtggatccccagctattgaagatggcattaactccttaccccaagctaaaaactgctctcttcccacagtgcactcctcctagtgtcctgccatctgatattacaatctaccaccttattcagtcattatcaccctttgatcctagcagattgtttggctggcagtctgctaacacactagctataggagatgcatggagtcatctcccacatttctctagccctgacctggttaataaatatgctatagtggaacgtctgaattttgcttattatttacataatgggcggccatcatttgcatttggtacttttctggtccaggaattaatcaagagcaagactcccaagcagctgatccagcaagtaggcaatgaagcctatgttatagggctctcctccttccacataccttcaataggagctgcatgtgtttgtttcttagaattgcttggccttgacagcctcaagctcagagttgatatgaaagtggccaatataattttgagctacaagtgcagaaatgaagatgctcagtacagctttatcagagagtctgtagccgaaaaactatctaaactagctgatggtgaaaagacaaccacagaagaattgcttgttctcttagaagaaggtacatggaacagcattcagcaacaggaaataaagaggttatccagtgaatctagcagccaatgggcattagtggtgcagttctgcaggctacacaatatgaaactaagcatatcttaccttagagaatgtgccaaagcaaatgattggctgcagttcattattcacagccaactccacaactaccacccagcagaggtgaaatcccttatccagtacttcagcccagtcattcaagaccacttaaggctggcttttgagaacttgccctcagtgcccacctccaaaatggacagcgatcaagtctgcaataagtgcccccaggaacttcaaggaagcaaacaagagatgaccgatttatttgaaattctgctccaatgctcagaggagccagactcctggcactggcttctggttgaagcagtgaaacaacaggcccctatcctcagtgttctggcctcatgtctccagggtgccagtgccatttcttgtctctgtgtttggatcatcacttctgtggaggacaatgttgcaactgaagcaatgggacacattcaggactcaacagaggaccatacctggaaccttgaggatctttcagtcatctggagaacattattaacaagacaaaagagcaaaactctcatcagaggtttccagcttttctttaaggattccccgttactactggtgatggagatgtatgaactgtgtatgttcttcaggaattataaagaagctgaagctaaacttctggagtttcagaagagccttgaaacgcttaacacagcagccacaaaggtccaccctgtcatccctgccatgtggctggaggatcaggtgtgtttccttttgaagcttatgctacagcagtgtaagacccagtatgagctggggaagcttttacagctctttgttgaaagagagcatctcttctctgatggtccagatgtgaaaaagctttgcatcctttgccagattttgaaggatacatccatagccattaatcatacaattattaccagctacagcattgagaatcttcagcatgaatgtagatctatttggaaagactgcagacagatggacaattcgctttggccaggagggtagcagaattagctgagttacctgtggacaacttggttattaaagagataacacaggaaatgcagaccctaaaacacattgaacagtggtcactaaaacaagcaagaattgacttctggaaaaaatgccatgagaattttaagaaaaattcaatttcaagcaaagcagcttcttcctttttctcaacccaggcccatgtggcatgtgagcacccaactggatggagcagcatggaggagcgccatctgctgctcaccttggcagggcactggcttgcccaggaggacgtggtgcccttggataagctggaggagctggagaagcagatctggctgtgccgcatcacccagcacactcttggaagaaatcaggaggaaacagagcccagattttctcgacagatctcaactagtggtgaactttcctttgatagtttagccagtgagttttccttctccaagttggctgctctgaacacatcaaaatacttagaacttaacagccttccatccaaagagacatgcgagaatagattggattggaaagagcaggagtcactaaactttttgattgggcgcctactggatgatggctgtgtgcatgaagcaagtagagtatgccggtattttcatttttataatccagatgtcgccttggtattgcactgcagagcactggcctcaggggaagctagtatggaggatctgcacccagagatccatgctctcctacaaagtgctgagctgcttgaggaagaagcacccgacattcccctaaggagagtccacagcacttcaagtctggatagtcagaagtttgtgacagtgccctccagtaatgaagtggtaactaacctggaagtgctgacaagcaaatgcctccatgggaagaactactgtcgacaggtcctctgtctgtatgatcttgccaaggagttgggctgttcctacacagatgttgctgctcaggatggtgaagccatgctccggaaaatcttggcctctcagcagcctgaccgatgcaaacgagcccaggccttcatcagcacacagggccttaagccagatactgtggctgaactcgtggcagaagaggtgacacgggagctgcttacttcatcacagggaacaggacataagcagatgttcaacccaacagaggaaagccagacatttcttcagctgaccactctgtgtcaagaccgcacattggtaggcatgaagttgttggataagatttcctccgttccccatggggaactgtcttgcaccacagagctcctgatcctggcccatcattgcttcaccctgacgtgccacatggagggcatcatccgagtcctacaggccgcccacatgctcacagataaccacctggcccccagtgaggagtatgggctggtggtacggctcctcactggcattggaaggtacaacgagatgacatacatatttgatttgctgcataaaaagcactactttgaagtgctaatgaggaagaagttggatccgagtggtaccctgaaaacagccctgctggactacatcaaacgctgccgtcctggagacagtgaaaagcacaatatgattgccctgtgcttcagcatgtgccgggagattggcgagaaccacgaggcagctgcccgcatccaactgaaattgattgagtctcagccctgggaggacagcctcaaggatgggcaccagctgaaacaactgctgctgaaggccctgactctgatgttggatgcagcagagagttatgccaaggactcctgtgtgcgacaggcccagcactgtcagcggctcaccaagttgataactctgcagattcactttctgaacactggccagaacacaatgctcatcaacttgggccgccacaagctgatggactgtattctggccctacctcggttctaccaggcttctattgtggctgaggcctacgattttgttccagattgggctgaaattttataccagcaagtgattcttaaaggagactttaattacttggaagaatttaagcagcaaaggttattaaagtccagtatatttgaagagatttccaaaaaatataaacaacatcagcctactgacatggtcatggaaaacctgaagaaattactcacatattgtgaagatgtttacctgtattacaagttggcatacgaacacaagttttatgaaattgtaaatgtgcttctgaaggaccctcagacaggttgctgtctaaaggacatgctagcaggttagatgatttcataggtgtctgttttcttgtactgttagcagattctgacagatgtgatgagaagaagaatgcattggagatctttgctaaagttgaacaatcccggtactgtaccatatcagtcctttgtgggtagtaggtagcaagtaagaaacttttcaggaggaaattcctatttaaaatagattgattttagatgattgttcatccacaccattttatatagatactagtattaagatcaaaagcttcctcttcctcaggacagcttctactttagatgatccaataatgattaaagaatacctgtacctgcagattccagtttcaaagaaatttaattattatttacacagttaaggaacaggtgatacattttcatttgttagaaactgatctttctgtaataaaatagattttcaattca

SEQ ID NO: 374167 - DNA, 7553 bp, Homo sapiens
ggaggctgagtatctcctgatcacttagttaattttatggggttttttctttctccctcatctgagttatagttctctgtctctacatttttgatgttgtggatggtacatatgtagctcatgtggatttagcacttcacaaagaagacatgtgtaatgagcagcaacaggagccagccaagatttcttcatttacttcactgaaagtttctcaagacctcgatgttgcagtgattgtcagctcctccaactccgcagttgctcttaacttaaatttgtatttcaggcaacacccaggacacctactgtgtgaaagaatactagaagatcttcctattcaaggacctaagggcgtagatgaagatgatcctgttaactctgcctacaacatgaaactggccaagttttccttccaaattgataggtcttggaaagcccagctatcatcattgaatgaaacaataaagaactccaaactggaggtttcctgttgtgctccatggttccaggatattttgcatttggagtcacctgaatctggtaaccacagtacaagtgtgcagagctgggccttcattccacaggacataatgcatgggcaatataatgttctacagaaagatcatgccaagaccagtgatccaggaagatcatggaaaataatgcacatcagtgaacaagaggaacccatagagcttaaatgtgtgtctgtgacaggattcactgcactgtttacttgggaagtggaaaggatgggctataccattaccctctgggatttggagacccagggcatgcagtgtttttcccttggcacaaagtgtattcctgtagacagtagtggagaccagcagctgtgctttgttttgacagagaatggactctctctgattttgtttggtttgactcaagaagagtttttaaacagactcatgatccatggaagtgccagcactgtggacactctttgtcatctcaatggctggggaaggtgctcaattcccatacatgcactagaggccgggatagaaaatcgtcagctggacacagtaaatttctttttgaagagcaaggaaaatctttttaatccatcctcaaaatcttctgtatctgatcagtttgatcacttgtcatcccatttatatttaagaaatgtggaagagctgataccagcattggatttactttgctcggcaattagagaaagttattctgaaccccaaagcaaacacttttcagaacaattgcttaatcttacactgtctttccttaacaaccaaataaaggagcttttcattcacactgaagaactagatgaacatctgcaaaaaggagtgaacattttgactagctacattaatgaacttcgaaccttcatgataaagtttccttggaagctaacagatgctatagatgaatatgatgtacatgaaaatgtccccaaagtaaaggagagcaatatatggaagaaactcagctttgaggaagttattgccagcgccattttaaacaacaaaataccagaggcacagactttcttcaggattgatagtcattctgctcaaaaacttgaggagcttattggcataggcctaaatttggtctttgacaatttaaaaaagaacaatataaaggaagcctctgaacttttgaagaatatggggtttgatgtaaaaggccaattgctcaagatctgcttctatacaactaataaaaatatacgtgactttttggtaggtaaaggtgagactacatagtatacattttctagaaagcctgggtgaaaaacttggaagaaaaccttggaagaaaaaccttaagtaattttaatgttcaactaatatctaataagtaaaagtgtgacaaccccttcatctttttttccccttcatctttcttcaatgactattttacatttgtggcaaaagaaaatttgtgttaacatacattaactcaaatgttcaaaatataattcttgaatggcatattatctcatgactttttttaataatctttaattcccagcactaccttatttgataatctcatgacattttttgcaaaagtgcttgattttttgtaaagtcactgctttaattactttttattcaaggttgaaattttaaaagaaaaaaattatttttctgaaaaagagaaaagaactatagacttcgtgcatcaagttgagaagctttatttgggacatttccaagaaaatatgcaaatccagtcatttcccaggtactggataaaggaacaagattttttcaagcacaagtctgttttggactcattcctgaaatatgattgtaaagatgaatttaacaaacaggaccatagaattgtgttaaattgggctctgtggtgggatcaactaacacaagaatccatccttctccccaggataagtccagaagaatacaaatcatattcccctgaagccctctggagatacctcacagctcgccatgattggttaaacattatcttatggattggagaatttcaaacccagcatagttatgcttcacttcagcagaacaaatggccccttctgactgttgatgttattaaccagaatacttcctgtaacaactacatgaggaatgaaattttagataagctggccaggaatggggtttttttggcatctgaactggaagactttgaatgcttcctcctaagactgagccgtattggaggtgtaatacaggataccctccctgttcaaaactacaagaccaaagaaggttgggatttccattctcaattcattctctattgtttggagcacagtctgcagcatcttctttatgtctaccttgactgttacaaacttagtcctgaaaattgtccctttttggaaaaaaaagagttacatgaagcacacccttggtttgaatttttagttcagtgtcgacaagttgccagtaacttaacagatcccaaactgatcttccaggctagccttgcaaatgctcagattttgattcccaccaatcaggccagtgtaagcagtatgctattggaaggacataccctcctggcccttgctactacaatgtattctcctgggggtgtcagtcaggttgttcagaatgaagaaaatgaaaactgtttgaagaaagtggatccccagctattgaagatggcattaactccttaccccaagctaaaaactgctctcttcccacagtgcactcctcctagtgtcctgccatctgatattacaatctaccaccttattcagtcattatcaccctttgatcctagcagattgtttggctggcagtctgctaacacactagctataggagatgcatggagtcatctcccacatttctctagccctgacctggttaataaatatgctatagtggaacgtctgaattttgcttattatttacataatgggcggccatcatttgcatttggtacttttctggtccaggaattaatcaagagcaagactcccaagcagctgatccagcaagtaggcaatgaagcctatgttatagggctctcctccttccacataccttcaataggagctgcatgtgtttgtttcttagaattgcttggccttgacagcctcaagctcagagttgatatgaaagtggccaatataattttgagctacaagtgcagaaatgaagatgctcagtacagctttatcagagagtctgtagccgaaaaactatctaaactagctgatggtgaaaagacaaccacagaagaattgcttgttctcttagaagaaggtacatggaacagcattcagcaacaggaaataaagaggttatccagtgaatctagcagccaatgggcattagtggtgcagttctgcaggctacacaatatgaaactaagcatatcttaccttagagaatgtgccaaagcaaatgattggctgcagttcattattcacagccaactccacaactaccacccagcagaggtgaaatcccttatccagtacttcagcccagtcattcaagaccacttaaggctggcttttgagaacttgccctcagtgcccacctccaaaatggacagcgatcaagtctgcaataagtgcccccaggaacttcaaggaagcaaacaagagatgaccgatttatttgaaattctgctccaatgctcagaggagccagactcctggcactggcttctggttgaagcagtgaaacaacaggcccctatcctcagtgttctggcctcatgtctccagggtgccagtgccatttcttgtctctgtgtttggatcatcacttctgtggaggacaatgttgcaactgaagcaatgggacacattcaggactcaacagaggaccatacctggaaccttgaggatctttcagtcatctggagaacattattaacaagacaaaagagcaaaactctcatcagaggtttccagcttttctttaaggattccccgttactactggtgatggagatgtatgaactgtgtatgttcttcaggaattataaagaagctgaagctaaacttctggagtttcagaagagccttgaaacgcttaacacagcagccacaaaggtccaccctgtcatccctgccatgtggctggaggatcaggtgtgtttccttttgaagcttatgctacagcagtgtaagacccagtatgagctggggaagcttttacagctctttgttgaaagagagcatctcttctctgatggtccagatgtgaaaaagctttgcatcctttgccagattttgaaggatacatccatagccattaatcatacaattattaccagctacagcattgagaatcttcagcatgaatgtagatctatttggaaagactgcagacagatggacaattcgctttggccaggagggtagcagaattagctgagttacctgtggacaacttggttattaaagagataacacaggaaatgcagaccctaaaacacattgaacagtggtcactaaaacaagcaagaattgacttctggaaaaaatgccatgagaattttaagaaaaattcaatttcaagcaaagcagcttcttcctttttctcaacccaggcccatgtggcatgtgagcacccaactggatggagcagcatggaggagcgccatctgctgctcaccttggcagggcactggcttgcccaggaggacgtggtgcccttggataagctggaggagctggagaagcagatctggctgtgccgcatcacccagcacactcttggaagaaatcaggaggaaacagagcccagattttctcgacagatctcaactagtggtgaactttcctttgatagtttagccagtgagttttccttctccaagttggctgctctgaacacatcaaaatacttagaacttaacagccttccatccaaagagacatgcgagaatagattggattggaaagagcaggagtcactaaactttttgattgggcgcctactggatgatggctgtgtgcatgaagcaagtagagtatgccggtattttcatttttataatccagatgtcgccttggtattgcactgcagagcactggcctcaggggaagctagtatggaggatctgcacccagagatccatgctctcctacaaagtgctgagctgcttgaggaagaagcacccgacattcccctaaggagagtccacagcacttcaagtctggatagtcagaagtttgtgacagtgccctccagtaatgaagtggtaactaacctggaagtgctgacaagcaaatgcctccatgggaagaactactgtcgacaggtcctctgtctgtatgatcttgccaaggagttgggctgttcctacacagatgttgctgctcaggatggtgaagccatgctccggaaaatcttggcctctcagcagcctgaccgatgcaaacgagcccaggccttcatcagcacacagggccttaagccagatactgtggctgaactcgtggcagaagaggtgacacgggagctgcttacttcatcacagggaacaggacataagcagatgttcaacccaacagaggaaagccagacatttcttcagctgaccactctgtgtcaagaccgcacattggtaggcatgaagttgttggataagatttcctccgttccccatggggaactgtcttgcaccacagagctcctgatcctggcccatcattgcttcaccctgacgtgccacatggagggcatcatccgagtcctacaggccgcccacatgctcacagataaccacctggcccccagtgaggagtatgggctggtggtacggctcctcactggcattggaaggtacaacgagatgacatacatatttgatttgctgcataaaaagcactactttgaagtgctaatgaggaagaagttggatccgagtggtaccctgaaaacagccctgctggactacatcaaacgctgccgtcctggagacagtgaaaagcacaatatgattgccctgtgcttcagcatgtgccgggagattggcgagaaccacgaggcagctgcccgcatccaactgaaattgattgagtctcagccctgggaggacagcctcaaggatgggcaccagctgaaacaactgctgctgaaggccctgactctgatgttggatgcagcagagagttatgccaaggactcctgtgtgcgacaggcccagcactgtcagcggctcaccaagttgataactctgcagattcactttctgaacactggccagaacacaatgctcatcaacttgggccgccacaagctgatggactgtattctggccctacctcggttctaccaggcttctattgtggctgaggcctacgattttgttccagattgggctgaaattttataccagcaagtgattcttaaaggagactttaattacttggaagaatttaagcagcaaaggttattaaagtccagtatatttgaagagatttccaaaaaatataaacaacatcagcctactgacatggtcatggaaaacctgaagaaattactcacatattgtgaagatgtttacctgtattacaagttggcatacgaacacaagttttatgaaattgtaaatgtgcttctgaaggaccctcagacaggttgctgtctaaaggacatgctagcaggttagatgatttcataggtgtctgttttcttgtactgttagcagattctgacagatgtgatgagaagaagaatgcattggagatctttgctaaagttgaacaatcccggtactgtaccatatcagtcctttgtgggtagtaggtagcaagtaagaaacttttcaggaggaaattcctatttaaaatagattgattttagatgattgttcatccacaccattttatatagatactagtattaagatcaaaagcttcctcttcctcaggacagcttctactttagatgatccaataatgattaaagaatacctgtacctgcagattccagtttcaaagaaatttaattattatttacacagttaaggaacaggtgatacattttcatttgttagaaactgatctttctgtaataaaatagattttcaattca

SEQ ID NO: 374168 - DNA, 7430 bp, Homo sapiens
ggaggctgagtatctcctgatcacttagttaattttatggggttttttctttctccctcatctgagttatagttctctgtctctacatttttgatgttgtggatggtacatatgtagctcatgtggatttagcacttcacaaagaagacatgtgtaatgagcagcaacaggagccagccaagatttcttcatttacttcactgaaagtttctcaagacctcgatgttgcagtgattgtcagctcctccaactccgcagttgctcttaacttaaatttgtatttcaggcaacacccaggacacctactgtgtgaaagaatactagaagatcttcctattcaaggacctaagggcgtagatgaagatgatcctgttaactctgcctacaacatgaaactggccaagttttccttccaaattgataggtcttggaaagcccagctatcatcattgaatgaaacaataaagaactccaaactggaggtttcctgttgtgctccatggttccaggatattttgcatttggagtcacctgaatctggtaaccacagtacaagtgtgcagagctgggccttcattccacaggacataatgcatgggcaatataatgttctacagaaagatcatgccaagaccagtgatccaggaagatcatggaaaataatgcacatcagtgaacaagaggaacccatagagcttaaatgtgtgtctgtgacaggattcactgcactgtttacttgggaagtggaaaggatgggctataccattaccctctgggatttggagacccagggcatgcagtgtttttcccttggcacaaagtgtattcctgtagacagtagtggagaccagcagctgtgctttgttttgacagagaatggactctctctgattttgtttggtttgactcaagaagagtttttaaacagactcatgatccatggaagtgccagcactgtggacactctttgtcatctcaatggctggggaaggtgctcaattcccatacatgcactagaggccgggatagaaaatcgtcagctggacacagtaaatttctttttgaagagcaaggaaaatctttttaatccatcctcaaaatcttctgtatctgatcagtttgatcacttgtcatcccatttatatttaagaaatgtggaagagctgataccagcattggatttactttgctcggcaattagagaaagttattctgaaccccaaagcaaacacttttcagaacaattgcttaatcttacactgtctttccttaacaaccaaataaaggagcttttcattcacactgaagaactagatgaacatctgcaaaaaggagtgaacattttgactagctacattaatgaacttcgaaccttcatgataaagtttccttggaagctaacagatgctatagatgaatatgatgtacatgaaaatgtccccaaagtaaaggagagcaatatatggaagaaactcagctttgaggaagttattgccagcgccattttaaacaacaaaataccagaggcacagactttcttcaggattgatagtcattctgctcaaaaacttgaggagcttattggcataggcctaaatttggtctttgacaatttaaaaaagaacaatataaaggaagcctctgaacttttgaagaatatggggtttgatgtaaaaggccaattgctcaagatctgcttctatacaactaataaaaatatacgtgactttttggttgaaattttaaaagaaaaaaattatttttctgaaaaagagaaaagaactatagacttcgtgcatcaagttgagaagctttatttgggacatttccaagaaaatatgcaaatccagtcatttcccaggtactggataaaggaacaagattttttcaagcacaagtctgttttggactcattcctgaaatatgattgtaaagatgaatttaacaaacaggaccatagaattgtgttaaattgggctctgtggtgggatcaactaacacaagaatccatccttctccccaggataagtccagaagaatacaaatcatattcccctgaagccctctggagatacctcacagctcgccatgattggttaaacattatcttatggattggagaatttcaaacccagcatagttatgcttcacttcagcagaacaaatggccccttctgactgttgatgttattaaccagaatacttcctgtaacaactacatgaggaatgaaattttagataagctggccaggaatggggtttttttggcatctgaactggaagactttgaatgcttcctcctaagactgagccgtattggaggtgtaatacaggataccctccctgttcaaaactacaagaccaaagaaggttgggatttccattctcaattcattctctattgtttggagcacagtctgcagcatcttctttatgtctaccttgactgttacaaacttagtcctgaaaattgtccctttttggaaaaaaaagagttacatgaagcacacccttggtttgaatttttagttcagtgtcgacaagttgccagtaacttaacagatcccaaactgatcttccaggctagccttgcaaatgctcagattttgattcccaccaatcaggccagtgtaagcagtatgctattggaaggacataccctcctggcccttgctactacaatgtattctcctgggggtgtcagtcaggttgttcagaatgaagaaaatgaaaactgtttgaagaaagtggatccccagctattgaagatggcattaactccttaccccaagctaaaaactgctctcttcccacagtgcactcctcctagtgtcctgccatctgatattacaatctaccaccttattcagtcattatcaccctttgatcctagcagattgtttggctggcagtctgctaacacactagctataggagatgcatggagtcatctcccacatttctctagccctgacctggttaataaatatgctatagtggaacgtctgaattttgcttattatttacataatgggcggccatcatttgcatttggtacttttctggtccaggaattaatcaagagcaagactcccaagcagctgatccagcaagtaggcaatgaagcctatgttatagggctctcctccttccacataccttcaataggagctgcatgtgtttgtttcttagaattgcttggccttgacagcctcaagctcagagttgatatgaaagtggccaatataattttgagctacaagtgcagaaatgaagatgctcagtacagctttatcagagagtctgtaggtacagcaccttttatctggcctgctttgtttagagaaggtgtgacgaggtctaaggcattgaattgtgagtgtttggggagaaaatggttatcttcttggttttatccttttcctgcagagtgtgtgttctttgtctcactttcttgggcactttaattgggttctgaaatggccctgagccacactattcaaacagaaatgctcaggttttgactttttctcttcaccatattttgttgtttatatttcttacagccgaaaaactatctaaactagctgatggtgaaaagacaaccacagaagaattgcttgttctcttagaagaaggtacatggaacagcattcagcaacaggaaataaagaggttatccagtgaatctagcagccaatgggcattagtggtgcagttctgcaggctacacaatatgaaactaagcatatcttaccttagagaatgtgccaaagcaaatgattggctgcagttcattattcacagccaactccacaactaccacccagcagaggtgaaatcccttatccagtacttcagcccagtcattcaagaccacttaaggctggcttttgagaacttgccctcagtgcccacctccaaaatggacagcgatcaagtctgcaataagtgcccccaggaacttcaaggaagcaaacaagagatgaccgatttatttgaaattctgctccaatgctcagaggagccagactcctggcactggcttctggttgaagcagtgaaacaacaggcccctatcctcagtgttctggcctcatgtctccagggtgccagtgccatttcttgtctctgtgtttggatcatcacttctgtggaggacaatgttgcaactgaagcaatgggacacattcaggactcaacagaggaccatacctggaaccttgaggatctttcagtcatctggagaacattattaacaagacaaaagagcaaaactctcatcagaggtttccagcttttctttaaggattccccgttactactggtgatggagatgtatgaactgtgtatgttcttcaggaattataaagaagctgaagctaaacttctggagtttcagaagagccttgaaacgcttaacacagcagccacaaaggtccaccctgtcatccctgccatgtggctggaggatcaggtgtgtttccttttgaagcttatgctacagcagtgtaagacccagtatgagctggggaagcttttacagctctttgttgaaagagagcatctcttctctgatggtccagatgtgaaaaagctttgcatcctttgccagattttgaaggatacatccatagccattaatcatacaattattaccagctacagcattgagaatcttcagcatgaatgtagatctatttggaaagactgcagacagatggacaattcgctttggccaggagggtagcagaattagctgagttacctgtggacaacttggttattaaagagataacacaggaaatgcagaccctaaaacacattgaacagtggtcactaaaacaagcaagaattgacttctggaaaaaatgccatgagaattttaagaaaaattcaatttcaagcaaagcagcttcttcctttttctcaacccaggcccatgtggcatgtgagcacccaactggatggagcagcatggaggagcgccatctgctgctcaccttggcagggcactggcttgcccaggaggacgtggtgcccttggataagctggaggagctggagaagcagatctggctgtgccgcatcacccagcacactcttggaagaaatcaggaggaaacagagcccagattttctcgacagatctcaactagtggtgaactttcctttgatagtttagccagtgagttttccttctccaagttggctgctctgaacacatcaaaatacttagaacttaacagccttccatccaaagagacatgcgagaatagattggattggaaagagcaggagtcactaaactttttgattgggcgcctactggatgatggctgtgtgcatgaagcaagtagagtatgccggtattttcatttttataatccagatgtcgccttggtattgcactgcagagcactggcctcaggggaagctagtatggaggatctgcacccagagatccatgctctcctacaaagtgctgagctgcttgaggaagaagcacccgacattcccctaaggagagtccacagcacttcaagtctggatagtcagaagtttgtgacagtgccctccagtaatgaagtggtaactaacctggaagtgctgacaagcaaatgcctccatgggaagaactactgtcgacaggtcctctgtctgtatgatcttgccaaggagttgggctgttcctacacagatgttgctgctcaggatggtgaagccatgctccggaaaatcttggcctctcagcagcctgaccgatgcaaacgagcccaggccttcatcagcacacagggccttaagccagatactgtggctgaactcgtggcagaagaggtgacacgggagctgcttacttcatcacagggaacaggacataagcagatgttcaacccaacagaggaaagccagacatttcttcagctgaccactctgtgtcaagaccgcacattggtaggcatgaagttgttggataagatttcctccgttccccatggggaactgtcttgcaccacagagctcctgatcctggcccatcattgcttcaccctgacgtgccacatggagggcatcatccgagtcctacaggccgcccacatgctcacagataaccacctggcccccagtgaggagtatgggctggtggtacggctcctcactggcattggaaggtacaacgagatgacatacatatttgatttgctgcataaaaagcactactttgaagtgctaatgaggaagaagttggatccgagtggtaccctgaaaacagccctgctggactacatcaaacgctgccgtcctggagacagtgaaaagcacaatatgattgccctgtgcttcagcatgtgccgggagattggcgagaaccacgaggcagctgcccgcatccaactgaaattgattgagtctcagccctgggaggacagcctcaaggatgggcaccagctgaaacaactgctgctgaaggccctgactctgatgttggatgcagcagagagttatgccaaggactcctgtgtgcgacaggcccagcactgtcagcggctcaccaagttgataactctgcagattcactttctgaacactggccagaacacaatgctcatcaacttgggccgccacaagctgatggactgtattctggccctacctcggttctaccaggcttctattgtggctgaggcctacgattttgttccagattgggctgaaattttataccagcaagtgattcttaaaggagactttaattacttggaagaatttaagcagcaaaggttattaaagtccagtatatttgaagagatttccaaaaaatataaacaacatcagcctactgacatggtcatggaaaacctgaagaaattactcacatattgtgaagatgtttacctgtattacaagttggcatacgaacacaagttttatgaaattgtaaatgtgcttctgaaggaccctcagacaggttgctgtctaaaggacatgctagcaggttagatgatttcataggtgtctgttttcttgtactgttagcagattctgacagatgtgatgagaagaagaatgcattggagatctttgctaaagttgaacaatcccggtactgtaccatatcagtcctttgtgggtagtaggtagcaagtaagaaacttttcaggaggaaattcctatttaaaatagattgattttagatgattgttcatccacaccattttatatagatactagtattaagatcaaaagcttcctcttcctcaggacagcttctactttagatgatccaataatgattaaagaatacctgtacctgcagattccagtttcaaagaaatttaattattatttacacagttaaggaacaggtgatacattttcatttgttagaaactgatctttctgtaataaaatagattttcaattca

SEQ ID NO: 374169 - DNA, 7625 bp, Homo sapiens
ggaggctgagtatctcctgatcacttagttaattttatggggttttttctttctccctcatctgagttatagttctctgtctctacatttttgatgttgtggatggtacatatgtagctcatgtggatttagcacttcacaaagaagacatgtgtaatgagcagcaacaggagccagccaagatttcttcatttacttcactgaaagtttctcaagacctcgatgttgcagtgattgtcagctcctccaactccgcagttgctcttaacttaaatttgtatttcaggcaacacccaggacacctactgtgtgaaagaatactagaagatcttcctattcaaggacctaagggcgtagatgaagatgatcctgttaactctgcctacaacatgaaactggccaagttttccttccaaattgataggtcttggaaagcccagctatcatcattgaatgaaacaataaagaactccaaactggaggtttcctgttgtgctccatggttccaggatattttgcatttggagtcacctgaatctggtaaccacagtacaagtgtgcagagctgggccttcattccacaggacataatgcatgggcaatataatgttctacagaaagatcatgccaagaccagtgatccaggaagatcatggaaaataatgcacatcagtgaacaagaggaacccatagagcttaaatgtgtgtctgtgacaggattcactgcactgtttacttgggaagtggaaaggatgggctataccattaccctctgggatttggagacccagggcatgcagtgtttttcccttggcacaaagtgtattcctgtagacagtagtggagaccagcagctgtgctttgttttgacagagaatggactctctctgattttgtttggtttgactcaagaagagtttttaaacagactcatgatccatggaagtgccagcactgtggacactctttgtcatctcaatggctggggaaggtgctcaattcccatacatgcactagaggccgggatagaaaatcgtcagctggacacagtaaatttctttttgaagagcaaggaaaatctttttaatccatcctcaaaatcttctgtatctgatcagtttgatcacttgtcatcccatttatatttaagaaatgtggaagagctgataccagcattggatttactttgctcggcaattagagaaagttattctgaaccccaaagcaaacacttttcagaacaattgcttaatcttacactgtctttccttaacaaccaaataaaggagcttttcattcacactgaagaactagatgaacatctgcaaaaaggagtgaacattttgactagctacattaatgaacttcgaaccttcatgataaagtttccttggaagctaacagatgctatagatgaatatgatgtacatgaaaatgtccccaaagtaaaggagagcaatatatggaagaaactcagctttgaggaagttattgccagcgccattttaaacaacaaaataccagaggcacagactttcttcaggattgatagtcattctgctcaaaaacttgaggagcttattggcataggcctaaatttggtctttgacaatttaaaaaagaacaatataaaggaagcctctgaacttttgaagaatatggggtttgatgtaaaaggccaattgctcaagatctgcttctatacaactaataaaaatatacgtgactttttggtaggtaaaggtgagactacatagtatacattttctagaaagcctgggtgaaaaacttggaagaaaaccttggaagaaaaaccttaagtaattttaatgttcaactaatatctaataagtaaaagtgtgacaaccccttcatctttttttccccttcatctttcttcaatgactattttacatttgtggcaaaagaaaatttgtgttaacatacattaactcaaatgttcaaaatataattcttgaatggcatattatctcatgactttttttaataatctttaattcccagcactaccttatttgataatctcatgacattttttgcaaaagtgcttgattttttgtaaagtcactgctttaattactttttattcaaggttgaaattttaaaagaaaaaaattatttttctgaaaaagagaaaagaactatagacttcgtgcatcaagttgagaagctttatttgggacatttccaagaaaatatgcaaatccagtcatttcccaggtactggataaaggaacaagattttttcaagcacaagtctgttttggactcattcctgaaatatgattgtaaagatgaatttaacaaacaggaccatagaattgtgttaaattgggctctgtggtgggatcaactaacacaagaatccatccttctccccaggataagtccagaagaatacaaatcatattcccctgaagccctctggagatacctcacagctcgccatgattggttaaacattatcttatggattggagaatttcaaacccagcatagttatgcttcacttcagcagaacaaatggccccttctgactgttgatgttattaaccagaatacttcctgtaacaactacatgaggaatgaaattttagataagctggccaggaatggggtttttttggcatctgaactggaagactttgaatgcttcctcctaagactgagccgtattggaggtgtaatacaggataccctccctgttcaaaactacaagaccaaagaaggttgggatttccattctcaattcattctctattgtttggagcacagtctgcagcatcttctttatgtctaccttgactgttacaaacttagtcctgaaaattgtccctttttggaaaaaaaagagttacatgaagcacacccttggtttgaatttttagttcagtgtcgacaagttgccagtaacttaacagatcccaaactgatcttccaggctagccttgcaaatgctcagattttgattcccaccaatcaggccagtgtaagcagtatgctattggaaggacataccctcctggcccttgctactacaatgtattctcctgggggtgtcagtcaggttgttcagaatgaagaaaatgaaaactgtttgaagaaagtggatccccagctattgaagatggcattaactccttaccccaagctaaaaactgctctcttcccacagtgcactcctcctagtgtcctgccatctgatattacaatctaccaccttattcagtcattatcaccctttgatcctagcagattgtttggctggcagtctgctaacacactagctataggagatgcatggagtcatctcccacatttctctagccctgacctggttaataaatatgctatagtggaacgtctgaattttgcttattatttacataatgggcggccatcatttgcatttggtacttttctggtccaggaattaatcaagagcaagactcccaagcagctgatccagcaagtaggcaatgaagcctatgttatagggctctcctccttccacataccttcaataggagctgcatgtgtttgtttcttagaattgcttggccttgacagcctcaagctcagagttgatatgaaagtggccaatataattttgagctacaagtgcagaaatgaagatgctcagtacagctttatcagagagtctgtagccgaaaaactatctaaactagctgatggtgaaaagacaaccacagaagaattgcttgttctcttagaagaaggtacatggaacagcattcagcaacaggaaataaagaggttatccagtgaatctagcagccaatgggcattagtggtgcagttctgcaggctacacaatatgaaactaagcatatcttaccttagagaatgtgccaaagcaaatgattggctgcagttcattattcacagccaactccacaactaccacccagcagaggtgaaatcccttatccagtacttcagcccagtcattcaagaccacttaaggctggcttttgagaacttgccctcagtgcccacctccaaaatggacagcgatcaagtctgcaataagtgcccccaggaacttcaaggaagcaaacaagagatgaccgatttatttgaaattctgctccaatgctcagaggagccagactcctggcactggcttctggttgaagcagtgaaacaacaggcccctatcctcagtgttctggcctcatgtctccagggtgccagtgccatttcttgtctctgtgtttggatcatcacttctgtggaggacaatgttgcaactgaagcaatgggacacattcaggactcaacagaggaccatacctggaaccttgaggatctttcagtcatctggagaacattattaacaagacaaaagagcaaaactctcatcagaggtttccagcttttctttaaggattccccgttactactggtgatggagatgtatgaactgtgtatgttcttcaggaattataaagaagctgaagctaaacttctggagtttcagaagagccttgaaacgcttaacacagcagccacaaaggtccaccctgtcatccctgccatgtggctggaggatcaggtgtgtttccttttgaagcttatgctacagcagtgtaagacccagtatgagctggggaagcttttacagctctttgttgaaagagagcatctcttctctgatggtaaagaggattaggctgccttcagccaaatctgtcactgaagctatgcaaacggcccagccttctgagaaggtccagatgtgaaaaagctttgcatcctttgccagattttgaaggatacatccatagccattaatcatacaattattaccagctacagcattgagaatcttcagcatgaatgtagatctatttggaaagactgcagacagatggacaattcgctttggccaggagggtagcagaattagctgagttacctgtggacaacttggttattaaagagataacacaggaaatgcagaccctaaaacacattgaacagtggtcactaaaacaagcaagaattgacttctggaaaaaatgccatgagaattttaagaaaaattcaatttcaagcaaagcagcttcttcctttttctcaacccaggcccatgtggcatgtgagcacccaactggatggagcagcatggaggagcgccatctgctgctcaccttggcagggcactggcttgcccaggaggacgtggtgcccttggataagctggaggagctggagaagcagatctggctgtgccgcatcacccagcacactcttggaagaaatcaggaggaaacagagcccagattttctcgacagatctcaactagtggtgaactttcctttgatagtttagccagtgagttttccttctccaagttggctgctctgaacacatcaaaatacttagaacttaacagccttccatccaaagagacatgcgagaatagattggattggaaagagcaggagtcactaaactttttgattgggcgcctactggatgatggctgtgtgcatgaagcaagtagagtatgccggtattttcatttttataatccagatgtcgccttggtattgcactgcagagcactggcctcaggggaagctagtatggaggatctgcacccagagatccatgctctcctacaaagtgctgagctgcttgaggaagaagcacccgacattcccctaaggagagtccacagcacttcaagtctggatagtcagaagtttgtgacagtgccctccagtaatgaagtggtaactaacctggaagtgctgacaagcaaatgcctccatgggaagaactactgtcgacaggtcctctgtctgtatgatcttgccaaggagttgggctgttcctacacagatgttgctgctcaggatggtgaagccatgctccggaaaatcttggcctctcagcagcctgaccgatgcaaacgagcccaggccttcatcagcacacagggccttaagccagatactgtggctgaactcgtggcagaagaggtgacacgggagctgcttacttcatcacagggaacaggacataagcagatgttcaacccaacagaggaaagccagacatttcttcagctgaccactctgtgtcaagaccgcacattggtaggcatgaagttgttggataagatttcctccgttccccatggggaactgtcttgcaccacagagctcctgatcctggcccatcattgcttcaccctgacgtgccacatggagggcatcatccgagtcctacaggccgcccacatgctcacagataaccacctggcccccagtgaggagtatgggctggtggtacggctcctcactggcattggaaggtacaacgagatgacatacatatttgatttgctgcataaaaagcactactttgaagtgctaatgaggaagaagttggatccgagtggtaccctgaaaacagccctgctggactacatcaaacgctgccgtcctggagacagtgaaaagcacaatatgattgccctgtgcttcagcatgtgccgggagattggcgagaaccacgaggcagctgcccgcatccaactgaaattgattgagtctcagccctgggaggacagcctcaaggatgggcaccagctgaaacaactgctgctgaaggccctgactctgatgttggatgcagcagagagttatgccaaggactcctgtgtgcgacaggcccagcactgtcagcggctcaccaagttgataactctgcagattcactttctgaacactggccagaacacaatgctcatcaacttgggccgccacaagctgatggactgtattctggccctacctcggttctaccaggcttctattgtggctgaggcctacgattttgttccagattgggctgaaattttataccagcaagtgattcttaaaggagactttaattacttggaagaatttaagcagcaaaggttattaaagtccagtatatttgaagagatttccaaaaaatataaacaacatcagcctactgacatggtcatggaaaacctgaagaaattactcacatattgtgaagatgtttacctgtattacaagttggcatacgaacacaagttttatgaaattgtaaatgtgcttctgaaggaccctcagacaggttgctgtctaaaggacatgctagcaggttagatgatttcataggtgtctgttttcttgtactgttagcagattctgacagatgtgatgagaagaagaatgcattggagatctttgctaaagttgaacaatcccggtactgtaccatatcagtcctttgtgggtagtaggtagcaagtaagaaacttttcaggaggaaattcctatttaaaatagattgattttagatgattgttcatccacaccattttatatagatactagtattaagatcaaaagcttcctcttcctcaggacagcttctactttagatgatccaataatgattaaagaatacctgtacctgcagattccagtttcaaagaaatttaattattatttacacagttaaggaacaggtgatacattttcatttgttagaaactgatctttctgtaataaaatagattttcaattca

SEQ ID NO: 374170 - DNA, 7445 bp, Homo sapiens
ggaggctgagtatctcctgatcacttagttaattttatggggttttttctttctccctcatctgagttatagttctctgtctctacatttttgatgttgtggatggtacatatgtagctcatgtggatttagcacttcacaaagaagacatgtgtaatgagcagcaacaggagccagccaagatttcttcatttacttcactgaaagtttctcaagacctcgatgttgcagtgattgtcagctcctccaactccgcagttgctcttaacttaaatttgtatttcaggcaacacccaggacacctactgtgtgaaagaatactagaagatcttcctattcaaggacctaagggcgtagatgaagatgatcctgttaactctgcctacaacatgaaactggccaagttttccttccaaattgataggtcttggaaagcccagctatcatcattgaatgaaacaataaagaactccaaactggaggtttcctgttgtgctccatggttccaggatattttgcatttggagtcacctgaatctggtaaccacagtacaagtgtgcagagctgggccttcattccacaggacataatgcatgggcaatataatgttctacagaaagatcatgccaagaccagtgatccaggaagatcatggaaaataatgcacatcagtgaacaagaggaacccatagagcttaaatgtgtgtctgtgacaggattcactgcactgtttacttgggaagtggaaaggatgggctataccattaccctctgggatttggagacccagggcatgcagtgtttttcccttggcacaaagtgtattcctgtagacagtagtggagaccagcagctgtgctttgttttgacagagaatggactctctctgattttgtttggtttgactcaagaagagtttttaaacagactcatgatccatggaagtgccagcactgtggacactctttgtcatctcaatggctggggaaggtgctcaattcccatacatgcactagaggccgggatagaaaatcgtcagctggacacagtaaatttctttttgaagagcaaggaaaatctttttaatccatcctcaaaatcttctgtatctgatcagtttgatcacttgtcatcccatttatatttaagaaatgtggaagagctgataccagcattggatttactttgctcggcaattagagaaagttattctgaaccccaaagcaaacacttttcagaacaattgcttaatcttacactgtctttccttaacaaccaaataaaggagcttttcattcacactgaagaactagatgaacatctgcaaaaaggagtgaacattttgactagctacattaatgaacttcgaaccttcatgataaagtttccttggaagctaacagatgctatagatgaatatgatgtacatgaaaatgtccccaaagtaaaggagagcaatatatggaagaaactcagctttgaggaagttattgccagcgccattttaaacaacaaaataccagaggcacagactttcttcaggattgatagtcattctgctcaaaaacttgaggagcttattggcataggcctaaatttggtctttgacaatttaaaaaagaacaatataaaggaagcctctgaacttttgaagaatatggggtttgatgtaaaaggccaattgctcaagatctgcttctatacaactaataaaaatatacgtgactttttggtaggtaaaggtgagactacatagtatacattttctagaaagcctgggtgaaaaacttggaagaaaaccttggaagaaaaaccttaagtaattttaatgttcaactaatatctaataagtaaaagtgtgacaaccccttcatctttttttccccttcatctttcttcaatgactattttacatttgtggcaaaagaaaatttgtgttaacatacattaactcaaatgttcaaaatataattcttgaatggcatattatctcatgactttttttaataatctttaattcccagcactaccttatttgataatctcatgacattttttgcaaaagtgcttgattttttgtaaagtcactgctttaattactttttattcaaggttgaaattttaaaagaaaaaaattatttttctgaaaaagagaaaagaactatagacttcgtgcatcaagttgagaagctttatttgggacatttccaagaaaatatgcaaatccagtcatttcccaggtactggataaaggaacaagattttttcaagcacaagtctgttttggactcattcctgaaatatgattgtaaagatgaatttaacaaacaggaccatagaattgtgttaaattgggctctgtggtgggatcaactaacacaagaatccatccttctccccaggataagtccagaagaatacaaatcatattcccctgaagccctctggagatacctcacagctcgccatgattggttaaacattatcttatggattggagaatttcaaacccagcatagttatgcttcacttcagcagaacaaatggccccttctgactgttgatgttattaaccagaatacttcctgtaacaactacatgaggaatgaaattttagataagctggccaggaatggggtttttttggcatctgaactggaagactttgaatgcttcctcctaagactgagccgtattggaggtgtaatacaggataccctccctgttcaaaactacaagaccaaagaaggttgggatttccattctcaattcattctctattgtttggagcacagtctgcagcatcttctttatgtctaccttgactgttacaaacttagtcctgaaaattgtccctttttggaaaaaaaagagttacatgaagcacacccttggtttgaatttttagttcagtgtcgacaagttgccagtaacttaacagatcccaaactgatcttccaggctagccttgcaaatgctcagattttgattcccaccaatcaggccagtgtaagcagtatgctattggaaggacataccctcctggcccttgctactacaatgtattctcctgggggtgtcagtcaggttgttcagaatgaagaaaatgaaaactgtttgaagaaagtggatccccagctattgaagatggcattaactccttaccccaagctaaaaactgctctcttcccacagtgcactcctcctagtgtcctgccatctgatattacaatctaccaccttattcagtcattatcaccctttgatcctagcagattgtttggctggcagtctgctaacacactagctataggagatgcatggagtcatctcccacatttctctagccctgacctggttaataaatatgctatagtggaacgtctgaattttgcttattatttacataatgggcggccatcatttgcatttggtacttttctggtccaggaattaatcaagagcaagactcccaagcagctgatccagcaagtaggcaatgaagcctatgttatagggctctcctccttccacataccttcaataggagctgcatgtgtttgtttcttagaattgcttggccttgacagcctcaagctcagagttgatatgaaagtggccaatataattttgagctacaagtgcagaaatgaagatgctcagtacagctttatcagagagtctgtagccgaaaaactatctaaactagctgatggtgaaaagacaaccacagaagaattgcttgttctcttagaagaaggtacatggaacagcattcagcaacaggaaataaagaggttatccagtgaatctagcagccaatgggcattagtggtgcagttctgcaggctacacaatatgaaactaagcatatcttaccttagagaatgtgccaaagcaaatgattggctgcagttcattattcacagccaactccacaactaccacccagcagaggtgaaatcccttatccagtacttcagcccagtcattcaagaccacttaaggctggcttttgagaacttgccctcagtgcccacctccaaaatggacagcgatcaagtctgcaataagtgcccccaggaacttcaaggaagcaaacaagagatgaccgatttatttgaaattctgctccaatgctcagaggagccagactcctggcactggcttctggttgaagcagtgaaacaacaggcccctatcctcagtgttctggcctcatgtctccagggtgccagtgccatttcttgtctctgtgtttggatcatcacttctgtggaggacaatgttgcaactgaagcaatgggacacattcaggactcaacagaggaccatacctggaaccttgaggatctttcagtcatctggagaacattattaacaagacaaaagagcaaaactctcatcagaggtttccagcttttctttaaggattccccgttactactggtgatggagatgtatgaactgtgtatgttcttcaggaattataaagaagctgaagctaaacttctggagtttcagaagagccttgaaacgcttaacacagcagccacaaaggtccaccctgtcatccctgccatgtggctggaggatcaggtgtgtttccttttgaagcttatgctacagcagtgtaagacccagtatgagctggggaagcttttacagctctttgttgaaagagagcatctcttctctgatggtccagatgtgaaaaagctttgcatcctttgccagattttgaaggatacatccatagccattaatcatacaattattaccagctacagcattgagaatcttcagcatgaatgtagatctatttggaaagactgcagacagatggacaattcgctttggccaggagggtagcagaattagctgagttacctgtggacaacttggttattaaagagataacacaggaaatgcagaccctaaaacacattgaacagtggtcactaaaacaagcaagaattgacttctggaaaaaatgccatgagaattttaagaaaaattcaatttcaagcaaagcagcttcttcctttttctcaacccaggcccatgtggcatgtgagcacccaactggatggagcagcatggaggagcgccatctgctgctcaccttggcagggcactggcttgcccaggaggacgtggtgcccttggataagctggaggagctggagaagcagatctggctgtgccgcatcacccagcacactcttggaagaaatcaggaggaaacagagcccagattttctcgacagatctcaactagtggtgaactttcctttgatagtttagccagtgagttttccttctccaagttggctgctctgaacacatcaaaatacttagaacttaacagccttccatccaaagagacatgcgagaatagattggattggaaagagcaggagtcactaaactttttgattgggcgcctactggatgatggctgtgtgcatgaagcaagtagagtatgccggtattttcatttttataatccagatgtcgccttggtattgcactgcagagcactggcctcaggggaagctagtatggaggatctgcacccagagatccatgctctcctacaaagtgctgagctgcttgaggaagaagcacccgacattcccctaaggagagtccacagcacttcaagtctggatagtcagaagtttgtgacagtgccctccagtaatgaagtggtaactaacctggaagtgctgacaagcaaatgcctccatgggaagaactactgtcgacaggtcctctgtctgtatgatcttgccaaggagttgggctgttcctacacagatgttgctgctcaggatggtgaagccatgctccggaaaatcttggcctctcagcagcctgaccgatgcaaacgagcccaggccttcatcagcacacagggccttaagccagatactgtggctgaactcgtggcagaagaggtgacacgggagctgcttacttcatcacagggaacaggacataagcagatgttcaacccaacagaggaaagccagacatttcttcagctgaccactctgtgtcaagaccgcacattggtaggcatgaagttgttggataagatttcctccgttccccatggggaactgtcttgcaccacagagctcctgatcctggcccatcattgcttcaccctgacgtgccacatggagggcatcatccgagtcctacaggccgcccacatgctcacagataaccacctggcccccagtgaggagtatgggctggtgagtggtaccctgaaaacagccctgctggactacatcaaacgctgccgtcctggagacagtgaaaagcacaatatgattgccctgtgcttcagcatgtgccgggagattggcgagaaccacgaggcagctgcccgcatccaactgaaattgattgagtctcagccctgggaggacagcctcaaggatgggcaccagctgaaacaactgctgctgaaggccctgactctgatgttggatgcagcagagagttatgccaaggactcctgtgtgcgacaggcccagcactgtcagcggctcaccaagttgataactctgcagattcactttctgaacactggccagaacacaatgctcatcaacttgggccgccacaagctgatggactgtattctggccctacctcggttctaccaggcttctattgtggctgaggcctacgattttgttccagattgggctgaaattttataccagcaagtgattcttaaaggagactttaattacttggaagaatttaagcagcaaaggttattaaagtccagtatatttgaagagatttccaaaaaatataaacaacatcagcctactgacatggtcatggaaaacctgaagaaattactcacatattgtgaagatgtttacctgtattacaagttggcatacgaacacaagttttatgaaattgtaaatgtgcttctgaaggaccctcagacaggttgctgtctaaaggacatgctagcaggttagatgatttcataggtgtctgttttcttgtactgttagcagattctgacagatgtgatgagaagaagaatgcattggagatctttgctaaagttgaacaatcccggtactgtaccatatcagtcctttgtgggtagtaggtagcaagtaagaaacttttcaggaggaaattcctatttaaaatagattgattttagatgattgttcatccacaccattttatatagatactagtattaagatcaaaagcttcctcttcctcaggacagcttctactttagatgatccaataatgattaaagaatacctgtacctgcagattccagtttcaaagaaatttaattattatttacacagttaaggaacaggtgatacattttcatttgttagaaactgatctttctgtaataaaatagattttcaattca

SEQ ID NO: 374171 - DNA, 7760 bp, Homo sapiens
ggaggctgagtatctcctgatcacttagttaattttatggggttttttctttctccctcatctgagttatagttctctgtctctacatttttgatgttgtggatggtacatatgtagctcatgtggatttagcacttcacaaagaagacatgtgtaatgagcagcaacaggagccagccaagatttcttcatttacttcactgaaagtttctcaagacctcgatgttgcagtgattgtcagctcctccaactccgcagttgctcttaacttaaatttgtatttcaggcaacacccaggacacctactgtgtgaaagaatactagaagatcttcctattcaaggacctaagggcgtagatgaagatgatcctgttaactctgcctacaacatgaaactggccaagttttccttccaaattgataggtcttggaaagcccagctatcatcattgaatgaaacaataaagaactccaaactggaggtttcctgttgtgctccatggttccaggatattttgcatttggagtcacctgaatctggtaaccacagtacaagtgtgcagagctgggccttcattccacaggacataatgcatgggcaatataatgttctacagaaagatcatgccaagaccagtgatccaggaagatcatggaaaataatgcacatcagtgaacaagaggaacccatagagcttaaatgtgtgtctgtgacaggattcactgcactgtttacttgggaagtggaaaggatgggctataccattaccctctgggatttggagacccagggcatgcagtgtttttcccttggcacaaagtgtattcctgtagacagtagtggagaccagcagctgtgctttgttttgacagagaatggactctctctgattttgtttggtttgactcaagaagagtttttaaacagactcatgatccatggaagtgccagcactgtggacactctttgtcatctcaatggctggggaaggtgctcaattcccatacatgcactagaggccgggatagaaaatcgtcagctggacacagtaaatttctttttgaagagcaaggaaaatctttttaatccatcctcaaaatcttctgtatctgatcagtttgatcacttgtcatcccatttatatttaagaaatgtggaagagctgataccagcattggatttactttgctcggcaattagagaaagttattctgaaccccaaagcaaacacttttcagaacaattgcttaatcttacactgtctttccttaacaaccaaataaaggagcttttcattcacactgaagaactagatgaacatctgcaaaaaggagtgaacattttgactagctacattaatgaacttcgaaccttcatgataaagtttccttggaagctaacagatgctatagatgaatatgatgtacatgaaaatgtccccaaagtaaaggagagcaatatatggaagaaactcagctttgaggaagttattgccagcgccattttaaacaacaaaataccagaggcacagactttcttcaggattgatagtcattctgctcaaaaacttgaggagcttattggcataggcctaaatttggtctttgacaatttaaaaaagaacaatataaaggaagcctctgaacttttgaagaatatggggtttgatgtaaaaggccaattgctcaagatctgcttctatacaactaataaaaatatacgtgactttttggtaggtaaaggtgagactacatagtatacattttctagaaagcctgggtgaaaaacttggaagaaaaccttggaagaaaaaccttaagtaattttaatgttcaactaatatctaataagtaaaagtgtgacaaccccttcatctttttttccccttcatctttcttcaatgactattttacatttgtggcaaaagaaaatttgtgttaacatacattaactcaaatgttcaaaatataattcttgaatggcatattatctcatgactttttttaataatctttaattcccagcactaccttatttgataatctcatgacattttttgcaaaagtgcttgattttttgtaaagtcactgctttaattactttttattcaaggttgaaattttaaaagaaaaaaattatttttctgaaaaagagaaaagaactatagacttcgtgcatcaagttgagaagctttatttgggacatttccaagaaaatatgcaaatccagtcatttcccaggtactggataaaggaacaagattttttcaagcacaagtctgttttggactcattcctgaaatatgattgtaaagatgaatttaacaaacaggaccatagaattgtgttaaattgggctctgtggtgggatcaactaacacaagaatccatccttctccccaggataagtccagaagaatacaaatcatattcccctgaagccctctggagatacctcacagctcgccatgattggttaaacattatcttatggattggagaatttcaaacccagcatagttatgcttcacttcagcagaacaaatggccccttctgactgttgatgttattaaccagaatacttcctgtaacaactacatgaggaatgaaattttagataagctggccaggaatggggtttttttggcatctgaactggaagactttgaatgcttcctcctaagactgagccgtattggaggtgtaatacaggataccctccctgttcaaaactacaagaccaaagaaggttgggatttccattctcaattcattctctattgtttggagcacagtctgcagcatcttctttatgtctaccttgactgttacaaacttagtcctgaaaattgtccctttttggaaaaaaaagagttacatgaagcacacccttggtttgaatttttagttcagtgtcgacaagttgccagtaacttaacagatcccaaactgatcttccaggctagccttgcaaatgctcagattttgattcccaccaatcaggccagtgtaagcagtatgctattggaaggacataccctcctggcccttgctactacaatgtattctcctgggggtgtcagtcaggttgttcagaatgaagaaaatgaaaactgtttgaagaaagtggatccccagctattgaagatggcattaactccttaccccaagctaaaaactgctctcttcccacagtgcactcctcctagtgtcctgccatctgatattacaatctaccaccttattcagtcattatcaccctttgatcctagcagattgtttggctggcagtctgctaacacactagctataggagatgcatggagtcatctcccacatttctctagccctgacctggttaataaatatgctatagtggaacgtctgaattttgcttattatttacataatgggcggccatcatttgcatttggtacttttctggtccaggaattaatcaagagcaagactcccaagcagctgatccagcaagtaggcaatgaagcctatgttatagggctctcctccttccacataccttcaataggagctgcatgtgtttgtttcttagaattgcttggccttgacagcctcaagctcagagttgatatgaaagtggccaatataattttgagctacaagtgcagaaatgaagatgctcagtacagctttatcagagagtctgtagccgaaaaactatctaaactagctgatggtgaaaagacaaccacagaagaattgcttgttctcttagaagaaggtacatggaacagcattcagcaacaggaaataaagaggttatccagtgaatctagcagccaatgggcattagtggtgcagttctgcaggctacacaatatgaaactaagcatatcttaccttagagaatgtgccaaagcaaatgattggctgcagttcattattcacagccaactccacaactaccacccagcagaggtgaaatcccttatccagtacttcagcccagtcattcaagaccacttaaggctggcttttgagaacttgccctcagtgcccacctccaaaatggacagcgatcaagtctgcaataagtgcccccaggaacttcaaggaagcaaacaagagatgaccgatttatttgaaattctgctccaatgctcagaggagccagactcctggcactggcttctggttgaagcagtgaaacaacaggcccctatcctcagtgttctggcctcatgtctccagggtgccagtgccatttcttgtctctgtgtttggatcatcacttctgtggaggacaatgttgcaactgaagcaatgggacacattcaggactcaacagaggaccatacctggaaccttgaggatctttcagtcatctggagaacattattaacaagacaaaagagcaaaactctcatcagaggtttccagcttttctttaaggattccccgttactactggtgatggagatgtatgaactgtgtatgttcttcaggaattataaagaagctgaagctaaacttctggagtttcagaagagccttgaaacgcttaacacagcagccacaaaggtccaccctgtcatccctgccatgtggctggaggatcaggtgtgtttccttttgaagcttatgctacagcagtgtaagacccagtatgagctggggaagcttttacagctctttgttgaaagagagcatctcttctctgatggtccagatgtgaaaaagctttgcatcctttgccagattttgaaggatacatccatagccattaatcatacaattattaccagctacagcattgagaatcttcagcatgaatgtagatctatttggaaagactgcagacagatggacaattcgctttggccaggagggtagcagaattagctgagttacctgtggacaacttggttattaaagagataacacaggaaatgcagaccctaaaacacattgaacagtggtcactaaaacaagcaagaattgacttctggaaaaaatgccatgagaattttaagaaaaattcaatttcaagcaaagcagcttcttcctttttctcaacccaggcccatgtggcatgtgagcacccaactggatggagcagcatggaggagcgccatctgctgctcaccttggcagggcactggcttgcccaggaggacgtggtgcccttggataagctggaggagctggagaagcagatctggctgtgccgcatcacccagcacactcttggaagaaatcaggaggaaacagagcccagattttctcgacagatctcaactagtggtgaactttcctttgatagtttagccagtgagttttccttctccaagttggctgctctgaacacatcaaaatacttagaacttaacagccttccatccaaagagacatgcgagaatagattggattggaaagagcaggagtcactaaactttttgattgggcgcctactggatgatggctgtgtgcatgaagcaagtagagtatgccggtattttcatttttataatccagatgtcgccttggtattgcactgcagagcactggcctcaggggaagctagtatggaggatctgcacccagagatccatgctctcctacaaagtgctgagctgcttgaggaagaagcacccgacattcccctaaggagagtccacagcacttcaagtctggatagtcagaagtttgtgacagtgccctccagtaatgaagtggtaactaacctggaagtgctgacaagcaaatgcctccatgggaagaactactgtcgacaggtcctctgtctgtatgatcttgccaaggagttgggctgttcctacacagatgttgctgctcaggatggtgaagccatgctccggaaaatcttggcctctcagcagcctgaccgatgcaaacgagcccaggccttcatcagcacacagggccttaagccagatactgtggctgaactcgtggcagaagaggtgacacgggagctgcttacttcatcacagggaacaggacataagcagatgttcaacccaacagaggaaagccagacatttcttcagctgaccactctgtgtcaagaccgcacattggtaggcatgaagttgttggataagatttcctccgttccccatggggaactgtcttgcaccacagagctcctgatcctggcccatcattgcttcaccctgacgtgccacatggagggcatcatccgagtcctacaggccgcccacatgctcacagataaccacctggcccccagtgaggagtatgggctggtggtacggctcctcactggcattggaaggtacaacgagatgacatacatatttgatttgctgcataaaaagcactactttgaagtgctaatgaggaagaagttggatccgagtggtaccctgaaaacagccctgctggactacatcaaacgctgccgtcctggagacagtgaaaagcacaatatgattgccctgtgcttcagcatgtgccgggagattggcgagaaccacgaggcagctgcccgcatccaactgaaattgattgagtctcagccctgggaggacagcctcaaggatgggcaccagctgaaacaactgctgctgaaggccctgactctgatgttggatgcagcagagagttatgccaaggtaacccaaaggcttttttcagactggccttgggacttgctgtctgcagtaaaattattttcttttgtccttgggctctttccaggtgaagcgggagggcatcataggccaaccaggaacagaaggggtgaataccgttgtgagggttcacacaggaggtgacaactaggtctttctctactgtgcctctccacccttgttcctcaggactcctgtgtgcgacaggcccagcactgtcagcggctcaccaagttgataactctgcagattcactttctgaacactggccagaacacaatgctcatcaacttgggccgccacaagctgatggactgtattctggccctacctcggttctaccaggcttctattgtggctgaggcctacgattttgttccagattgggctgaaattttataccagcaagtgattcttaaaggagactttaattacttggaagaatttaagcagcaaaggttattaaagtccagtatatttgaagagatttccaaaaaatataaacaacatcagcctactgacatggtcatggaaaacctgaagaaattactcacatattgtgaagatgtttacctgtattacaagttggcatacgaacacaagttttatgaaattgtaaatgtgcttctgaaggaccctcagacaggttgctgtctaaaggacatgctagcaggttagatgatttcataggtgtctgttttcttgtactgttagcagattctgacagatgtgatgagaagaagaatgcattggagatctttgctaaagttgaacaatcccggtactgtaccatatcagtcctttgtgggtagtaggtagcaagtaagaaacttttcaggaggaaattcctatttaaaatagattgattttagatgattgttcatccacaccattttatatagatactagtattaagatcaaaagcttcctcttcctcaggacagcttctactttagatgatccaataatgattaaagaatacctgtacctgcagattccagtttcaaagaaatttaattattatttacacagttaaggaacaggtgatacattttcatttgttagaaactgatctttctgtaataaaatagattttcaattca

SEQ ID NO: 374172 - DNA, 8172 bp, Homo sapiens
ggaggctgagtatctcctgatcacttagttaattttatggggttttttctttctccctcatctgagttatagttctctgtctctacatttttgatgttgtggatggtacatatgtagctcatgtggatttagcacttcacaaagaagacatgtgtaatgagcagcaacaggagccagccaagatttcttcatttacttcactgaaagtttctcaagacctcgatgttgcagtgattgtcagctcctccaactccgcagttgctcttaacttaaatttgtatttcaggcaacacccaggacacctactgtgtgaaagaatactagaagatcttcctattcaaggacctaagggcgtagatgaagatgatcctgttaactctgcctacaacatgaaactggccaagttttccttccaaattgataggtcttggaaagcccagctatcatcattgaatgaaacaataaagaactccaaactggaggtttcctgttgtgctccatggttccaggatattttgcatttggagtcacctgaatctggtaaccacagtacaagtgtgcagagctgggccttcattccacaggacataatgcatgggcaatataatgttctacagaaagatcatgccaagaccagtgatccaggaagatcatggaaaataatgcacatcagtgaacaagaggaacccatagagcttaaatgtgtgtctgtgacaggattcactgcactgtttacttgggaagtggaaaggatgggctataccattaccctctgggatttggagacccagggcatgcagtgtttttcccttggcacaaagtgtattcctgtagacagtagtggagaccagcagctgtgctttgttttgacagagaatggactctctctgattttgtttggtttgactcaagaagagtttttaaacagactcatgatccatggaagtgccagcactgtggacactctttgtcatctcaatggctggggaaggtgctcaattcccatacatgcactagaggccgggatagaaaatcgtcagctggacacagtaaatttctttttgaagagcaaggaaaatctttttaatccatcctcaaaatcttctgtatctgatcagtttgatcacttgtcatcccatttatatttaagaaatgtggaagagctgataccagcattggatttactttgctcggcaattagagaaagttattctgaaccccaaagcaaacacttttcagaacaattgcttaatcttacactgtctttccttaacaaccaaataaaggagcttttcattcacactgaagaactagatgaacatctgcaaaaaggagtgaacattttgactagctacattaatgaacttcgaaccttcatgataaagtttccttggaagctaacagatgctatagatgaatatgatgtacatgaaaatgtccccaaagtaaaggagagcaatatatggaagaaactcagctttgaggaagttattgccagcgccattttaaacaacaaaataccagaggcacagactttcttcaggattgatagtcattctgctcaaaaacttgaggagcttattggcataggcctaaatttggtctttgacaatttaaaaaagaacaatataaaggaagcctctgaacttttgaagaatatggggtttgatgtaaaaggccaattgctcaagatctgcttctatacaactaataaaaatatacgtgactttttggtaggtaaaggtgagactacatagtatacattttctagaaagcctgggtgaaaaacttggaagaaaaccttggaagaaaaaccttaagtaattttaatgttcaactaatatctaataagtaaaagtgtgacaaccccttcatctttttttccccttcatctttcttcaatgactattttacatttgtggcaaaagaaaatttgtgttaacatacattaactcaaatgttcaaaatataattcttgaatggcatattatctcatgactttttttaataatctttaattcccagcactaccttatttgataatctcatgacattttttgcaaaagtgcttgattttttgtaaagtcactgctttaattactttttattcaaggttgaaattttaaaagaaaaaaattatttttctgaaaaagagaaaagaactatagacttcgtgcatcaagttgagaagctttatttgggacatttccaagaaaatatgcaaatccagtcatttcccaggtactggataaaggaacaagattttttcaagcacaagtctgttttggactcattcctgaaatatgattgtaaagatgaatttaacaaacaggaccatagaattgtgttaaattgggctctgtggtgggatcaactaacacaagaatccatccttctccccaggataagtccagaagaatacaaatcatattcccctgaagccctctggagatacctcacagctcgccatgattggttaaacattatcttatggattggagaatttcaaacccagcatagttatgcttcacttcagcagaacaaatggccccttctgactgttgatgttattaaccagaatacttcctgtaacaactacatgaggaatgaaattttagataagctggccaggaatggggtttttttggcatctgaactggaagactttgaatgcttcctcctaagactgagccgtattggaggtgtaatacaggataccctccctgttcaaaactacaagaccaaagaaggttgggatttccattctcaattcattctctattgtttggagcacagtctgcagcatcttctttatgtctaccttgactgttacaaacttagtcctgaaaattgtccctttttggaaaaaaaagagttacatgaagcacacccttggtttgaatttttagttcagtgtcgacaagttgccagtaacttaacagatcccaaactgatcttccaggctagccttgcaaatgctcagattttgattcccaccaatcaggccagtgtaagcagtatgctattggaaggacataccctcctggcccttgctactacaatgtattctcctgggggtgtcagtcaggttgttcagaatgaagaaaatgaaaactgtttgaagaaagtggatccccagctattgaagatggcattaactccttaccccaagctaaaaactgctctcttcccacagtgcactcctcctagtgtcctgccatctgatattacaatctaccaccttattcagtcattatcaccctttgatcctagcagattgtttggctggcagtctgctaacacactagctataggagatgcatggagtcatctcccacatttctctagccctgacctggttaataaatatgctatagtggaacgtctgaattttgcttattatttacataatgggcggccatcatttgcatttggtacttttctggtccaggaattaatcaagagcaagactcccaagcagctgatccagcaagtaggcaatgaagcctatgttatagggctctcctccttccacataccttcaataggagctgcatgtgtttgtttcttagaattgcttggccttgacagcctcaagctcagagttgatatgaaagtggccaatataattttgagctacaagtgcagaaatgaagatgctcagtacagctttatcagagagtctgtagccgaaaaactatctaaactagctgatggtgaaaagacaaccacagaagaattgcttgttctcttagaagaaggtacatggaacagcattcagcaacaggaaataaagaggttatccagtgaatctagcagccaatgggcattagtggtgcagttctgcaggctacacaatatgaaactaagcatatcttaccttagagaatgtgccaaagcaaatgattggctgcagttcattattcacagccaactccacaactaccacccagcagaggtgaaatcccttatccagtacttcagcccagtcattcaagaccacttaaggctggcttttgagaacttgccctcagtgcccacctccaaaatggacagcgatcaagtctgcaataagtgcccccaggaacttcaaggaagcaaacaagagatgaccgatttatttgaaattctgctccaatgctcagaggagccagactcctggcactggcttctggttgaagcagtgaaacaacaggcccctatcctcagtgttctggcctcatgtctccagggtgccagtgccatttcttgtctctgtgtttggatcatcacttctgtggaggacaatgttgcaactgaagcaatgggacacattcaggactcaacagaggaccatacctggaaccttgaggatctttcagtcatctggagaacattattaacaagacaaaagagcaaaactctcatcagaggtttccagcttttctttaaggattccccgttactactggtgatggagatgtatgaactgtgtatgttcttcaggaattataaagaagctgaagctaaacttctggagtttcagaagagccttgaaacgcttaacacagcagccacaaaggtccaccctgtcatccctgccatgtggctggaggatcaggtgtgtttccttttgaagcttatgctacagcagtgtaagacccagtatgagctggggaagcttttacagctctttgttgaaagagagcatctcttctctgatggtccagatgtgaaaaagctttgcatcctttgccagattttgaaggatacatccatagccattaatcatacaattattaccagctacagcattgagaatcttcagcatgaatgtagatctatttggaaagactgcagacagatggacaattcgctttggccaggagggtagcagaattagctgagttacctgtggacaacttggttattaaagagataacacaggaaatgcagaccctaaaacacattgaacagtggtcactaaaacaagcaagaattgacttctggaaaaaatgccatgagaattttaagaaaaattcaatttcaagcaaagcagcttcttcctttttctcaacccaggcccatgtggcatgtgagcacccaactggatggagcagcatggaggagcgccatctgctgctcaccttggcagggcactggcttgcccaggaggacgtggtgcccttggataagctggaggagctggagaagcagatctggctgtgccgcatcacccagcacactcttggaagaaatcaggaggaaacagagcccagattttctcgacagatctcaactagtggtgaactttcctttgatagtttagccagtgagttttccttctccaagttggctgctctgaacacatcaaaatacttagaacttaacagccttccatccaaagagacatgcgagaatagattggattggaaagagcaggagtcactaaactttttgattgggcgcctactggatgatggctgtgtgcatgaagcaagtagagtatgccggtattttcatttttataatccagatgtcgccttggtattgcactgcagagcactggcctcaggggaagctagtatggaggatctgcacccagagatccatgctctcctacaaagtgctgagctgcttgaggaagaagcacccgacattcccctaaggagagtccacagcacttcaagtctggatagtcagaagtttgtgacagtgccctccagtaatgaagtggtaactaacctggaagtgctgacaagcaaatgcctccatgggaagaactactgtcgacaggtcctctgtctgtatgatcttgccaaggagttgggctgttcctacacagatgttgctgctcaggatggtgaagccatgctccggaaaatcttggcctctcagcagcctgaccgatgcaaacgagcccaggccttcatcagcacacagggccttaagccagatactgtggctgaactcgtggcagaagaggtgacacgggagctgcttacttcatcacagggaacaggacataagcagatgttcaacccaacagaggaaagccagacatttcttcagctgaccactctgtgtcaagaccgcacattggtaggcatgaagttgttggataagatttcctccgttccccatggggaactgtcttgcaccacagagctcctgatcctggcccatcattgcttcaccctgacgtgccacatggagggcatcatccgagtcctacaggccgcccacatgctcacagataaccacctggcccccagtgaggagtatgggctggtggtacggctcctcactggcattggaaggtacaacgagatgacatacatatttgatttgctgcataaaaagcactactttgaagtgctaatgaggaagaagttggatccgagtggtaccctgaaaacagccctgctggactacatcaaacgctgccgtcctggagacagtgaaaagcacaatatgattgccctgtgcttcagcatgtgccgggagattggcgagaaccacgaggcagctgcccgcatccaactgaaattgattgagtctcagccctggggtgagtgaggtcacagccacactaccagaacagtgctgctagctaggtaaaattccttttttttttttttttttgagacagagtctcgctctgtccccaggctggagtgcagtggcacgatctcagctccctgcaacctccgcctcccaggttcaagtgattctcccgcctcagcctcccaagtagtgacagagtgtgactccatctcaaaaaaagaatgttgaggtgggtatgtcgctcagcaggacccccacttgggcagacagatggaatggagactttgaaggcatgtgcaatttaggattgtactcttggatctatagcctatatatccagggtatcatccaccaggaaccaacatgcacgttgataccatgtaagccttccttgatgttttggagaaatgaggcattagaaggggcactgaatcctactgcggagtgaagttacaataagcgtatgcatttctggcccaataacctttatctgagtgaggtgttcctgcctgcctgtgaacatggctgggatgtttctattctagccacgatcacaatgagtgggatgagaacagtgagctttgggagtcagactcggcaaatcttctttatttcccctacagaggacagcctcaaggatgggcaccagctgaaacaactgctgctgaaggccctgactctgatgttggatgcagcagagagttatgccaaggactcctgtgtgcgacaggcccagcactgtcagcggctcaccaagttgataactctgcagattcactttctgaacactggccagaacacaatgctcatcaacttgggccgccacaagctgatggactgtattctggccctacctcggttctaccaggcttctattgtggctgaggcctacgattttgttccagattgggctgaaattttataccagcaagtgattcttaaaggagactttaattacttggaagaatttaagcagcaaaggttattaaagtccagtatatttgaagagatttccaaaaaatataaacaacatcagcctactgacatggtcatggaaaacctgaagaaattactcacatattgtgaagatgtttacctgtattacaagttggcatacgaacacaagttttatgaaattgtaaatgtgcttctgaaggaccctcagacaggttgctgtctaaaggacatgctagcaggttagatgatttcataggtgtctgttttcttgtactgttagcagattctgacagatgtgatgagaagaagaatgcattggagatctttgctaaagttgaacaatcccggtactgtaccatatcagtcctttgtgggtagtaggtagcaagtaagaaacttttcaggaggaaattcctatttaaaatagattgattttagatgattgttcatccacaccattttatatagatactagtattaagatcaaaagcttcctcttcctcaggacagcttctactttagatgatccaataatgattaaagaatacctgtacctgcagattccagtttcaaagaaatttaattattatttacacagttaaggaacaggtgatacattttcatttgttagaaactgatctttctgtaataaaatagattttcaattca

SEQ ID NO: 374173 - DNA, 8091 bp, Homo sapiens
ggaggctgagtatctcctgatcacttagttaattttatggggttttttctttctccctcatctgagttatagttctctgtctctacatttttgatgttgtggatggtacatatgtagctcatgtggatttagcacttcacaaagaagacatgtgtaatgagcagcaacaggagccagccaagatttcttcatttacttcactgaaagtttctcaagacctcgatgttgcagtgattgtcagctcctccaactccgcagttgctcttaacttaaatttgtatttcaggcaacacccaggacacctactgtgtgaaagaatactagaagatcttcctattcaaggacctaagggcgtagatgaagatgatcctgttaactctgcctacaacatgaaactggccaagttttccttccaaattgataggtcttggaaagcccagctatcatcattgaatgaaacaataaagaactccaaactggaggtttcctgttgtgctccatggttccaggatattttgcatttggagtcacctgaatctggtaaccacagtacaagtgtgcagagctgggccttcattccacaggacataatgcatgggcaatataatgttctacagaaagatcatgccaagaccagtgatccaggaagatcatggaaaataatgcacatcagtgaacaagaggaacccatagagcttaaatgtgtgtctgtgacaggattcactgcactgtttacttgggaagtggaaaggatgggctataccattaccctctgggatttggagacccagggcatgcagtgtttttcccttggcacaaagtgtattcctgtagacagtagtggagaccagcagctgtgctttgttttgacagagaatggactctctctgattttgtttggtttgactcaagaagagtttttaaacagactcatgatccatggaagtgccagcactgtggacactctttgtcatctcaatggctggggaaggtgctcaattcccatacatgcactagaggccgggatagaaaatcgtcagctggacacagtaaatttctttttgaagagcaaggaaaatctttttaatccatcctcaaaatcttctgtatctgatcagtttgatcacttgtcatcccatttatatttaagaaatgtggaagagctgataccagcattggatttactttgctcggcaattagagaaagttattctgaaccccaaagcaaacacttttcagaacaattgcttaatcttacactgtctttccttaacaaccaaataaaggagcttttcattcacactgaagaactagatgaacatctgcaaaaaggagtgaacattttgactagctacattaatgaacttcgaaccttcatgataaagtttccttggaagctaacagatgctatagatgaatatgatgtacatgaaaatgtccccaaagtaaaggagagcaatatatggaagaaactcagctttgaggaagttattgccagcgccattttaaacaacaaaataccagaggcacagactttcttcaggattgatagtcattctgctcaaaaacttgaggagcttattggcataggcctaaatttggtctttgacaatttaaaaaagaacaatataaaggaagcctctgaacttttgaagaatatggggtttgatgtaaaaggccaattgctcaagatctgcttctatacaactaataaaaatatacgtgactttttggtaggtaaaggtgagactacatagtatacattttctagaaagcctgggtgaaaaacttggaagaaaaccttggaagaaaaaccttaagtaattttaatgttcaactaatatctaataagtaaaagtgtgacaaccccttcatctttttttccccttcatctttcttcaatgactattttacatttgtggcaaaagaaaatttgtgttaacatacattaactcaaatgttcaaaatataattcttgaatggcatattatctcatgactttttttaataatctttaattcccagcactaccttatttgataatctcatgacattttttgcaaaagtgcttgattttttgtaaagtcactgctttaattactttttattcaaggttgaaattttaaaagaaaaaaattatttttctgaaaaagagaaaagaactatagacttcgtgcatcaagttgagaagctttatttgggacatttccaagaaaatatgcaaatccagtcatttcccaggtactggataaaggaacaagattttttcaagcacaagtctgttttggactcattcctgaaatatgattgtaaagatgaatttaacaaacaggaccatagaattgtgttaaattgggctctgtggtgggatcaactaacacaagaatccatccttctccccaggataagtccagaagaatacaaatcatattcccctgaagccctctggagatacctcacagctcgccatgattggttaaacattatcttatggattggagaatttcaaacccagcatagttatgcttcacttcagcagaacaaatggccccttctgactgttgatgttattaaccagaatacttcctgtaacaactacatgaggaatgaaattttagataagctggccaggaatggggtttttttggcatctgaactggaagactttgaatgcttcctcctaagactgagccgtattggaggtgtaatacaggataccctccctgttcaaaactacaagaccaaagaaggttgggatttccattctcaattcattctctattgtttggagcacagtctgcagcatcttctttatgtctaccttgactgttacaaacttagtcctgaaaattgtccctttttggaaaaaaaagagttacatgaagcacacccttggtttgaatttttagttcagtgtcgacaagttgccagtaacttaacagatcccaaactgatcttccaggctagccttgcaaatgctcagattttgattcccaccaatcaggccagtgtaagcagtatgctattggaaggacataccctcctggcccttgctactacaatgtattctcctgggggtgtcagtcaggttgttcagaatgaagaaaatgaaaactgtttgaagaaagtggatccccagctattgaagatggcattaactccttaccccaagctaaaaactgctctcttcccacagtgcactcctcctagtgtcctgccatctgatattacaatctaccaccttattcagtcattatcaccctttgatcctagcagattgtttggctggcagtctgctaacacactagctataggagatgcatggagtcatctcccacatttctctagccctgacctggttaataaatatgctatagtggaacgtctgaattttgcttattatttacataatgggcggccatcatttgcatttggtacttttctggtccaggaattaatcaagagcaagactcccaagcagctgatccagcaagtaggcaatgaagcctatgttatagggctctcctccttccacataccttcaataggagctgcatgtgtttgtttcttagaattgcttggccttgacagcctcaagctcagagttgatatgaaagtggccaatataattttgagctacaagtgcagaaatgaagatgctcagtacagctttatcagagagtctgtagccgaaaaactatctaaactagctgatggtgaaaagacaaccacagaagaattgcttgttctcttagaagaaggtacatggaacagcattcagcaacaggaaataaagaggttatccagtgaatctagcagccaatgggcattagtggtgcagttctgcaggctacacaatatgaaactaagcatatcttaccttagagaatgtgccaaagcaaatgattggctgcagttcattattcacagccaactccacaactaccacccagcagaggtgaaatcccttatccagtacttcagcccagtcattcaagaccacttaaggctggcttttgagaacttgccctcagtgcccacctccaaaatggacagcgatcaagtctgcaataagtgcccccaggaacttcaaggaagcaaacaagagatgaccgatttatttgaaattctgctccaatgctcagaggagccagactcctggcactggcttctggttgaagcagtgaaacaacaggcccctatcctcagtgttctggcctcatgtctccagggtgccagtgccatttcttgtctctgtgtttggatcatcacttctgtggaggacaatgttgcaactgaagcaatgggacacattcaggactcaacagaggaccatacctggaaccttgaggatctttcagtcatctggagaacattattaacaagacaaaagagcaaaactctcatcagaggtttccagcttttctttaaggattccccgttactactggtgatggagatgtatgaactgtgtatgttcttcaggaattataaagaagctgaagctaaacttctggagtttcagaagagccttgaaacgcttaacacagcagccacaaaggtccaccctgtcatccctgccatgtggctggaggatcaggtgtgtttccttttgaagcttatgctacagcagtgtaagacccagtatgagctggggaagcttttacagctctttgttgaaagagagcatctcttctctgatggtccagatgtgaaaaagctttgcatcctttgccagattttgaaggatacatccatagccattaatcatacaattattaccagctacagcattgagaatcttcagcatgaatgtagatctatttggaaagactgcagacagatggacaattcgctttggccaggagggtagcagaattagctgagttacctgtggacaacttggttattaaagagataacacaggaaatgcagaccctaaaacacattgaacagtggtcactaaaacaagcaagaattgacttctggaaaaaatgccatgagaattttaagaaaaattcaatttcaagcaaagcagcttcttcctttttctcaacccaggcccatgtggcatgtgagcacccaactggatggagcagcatggaggagcgccatctgctgctcaccttggcagggcactggcttgcccaggaggacgtggtgcccttggataagctggaggagctggagaagcagatctggctgtgccgcatcacccagcacactcttggaagaaatcaggaggaaacagagcccagattttctcgacagatctcaactagtggtgaactttcctttgatagtttagccagtgagttttccttctccaagttggctgctctgaacacatcaaaatacttagaacttaacagccttccatccaaagagacatgcgagaatagattggattggaaagagcaggagtcactaaactttttgattgggcgcctactggatgatggctgtgtgcatgaagcaagtagagtatgccggtattttcatttttataatccagatgtcgccttggtattgcactgcagagcactggcctcaggggaagctagtatggaggatctgcacccagagatccatgctctcctacaaagtgctgagctgcttgaggaagaagcacccgacattcccctaaggagagtccacagcacttcaagtctggatagtcagaagtttgtgacagtgccctccagtaatgaagtggtaactaacctggaagtgctgacaagcaaatgcctccatgggaagaactactgtcgacaggtcctctgtctgtatgatcttgccaaggagttgggctgttcctacacagatgttgctgctcaggatggtgaagccatgctccggaaaatcttggcctctcagcagcctgaccgatgcaaacgagcccaggccttcatcagcacacagggccttaagccagatactgtggctgaactcgtggcagaagaggtgacacgggagctgcttacttcatcacagggaacaggacataagcagatgttcaacccaacagaggaaagccagacatttcttcagctgaccactctgtgtcaagaccgcacattggtaggcatgaagttgttggataagatttcctccgttccccatggggaactgtcttgcaccacagagctcctgatcctggcccatcattgcttcaccctgacgtgccacatggagggcatcatccgagtcctacaggccgcccacatgctcacagataaccacctggcccccagtgaggagtatgggctggtggtacggctcctcactggcattggaaggtacaacgagatgacatacatatttgatttgctgcataaaaagcactactttgaagtgctaatgaggaagaagttggatccgagtggtaccctgaaaacagccctgctggactacatcaaacgctgccgtcctggagacagtgaaaagcacaatatgattgccctgtgcttcagcatgtgccgggagattggcgagaaccacgaggcagctgcccgcatccaactgaaattgattgagtctcagccctgggaggacagcctcaaggatgggcaccagctgaaacaactgctgctgaaggccctgactctgatgttggatgcagcagagagttatgccaaggactcctgtgtgcgacaggcccagcactgtcagcggctcaccaagttgataactctgcagattcactttctgaacactggccagaacacaatgctcatcaacttgggccgccacaagctgatggactgtattctggccctacctcggttctaccaggcttctattgtggctgaggcctacgattttgttccagattgggctgaaattttataccagcaagtgattcttaaaggagactttaattacttggaagaatttaagcagcaaaggttattaaagtccagtatatttgaagagatttccaaaaaatataaacaacatcagcctactgacatggtcatggaaaacctgaagaaattactcacatattgtgaagatgtttacctgtattacaagttggcatacgaacacaagttttatgaaattgtaaatgtgcttctgaaggaccctcagacaggttgctgtctaaaggacatgctagcaggttagatgatttcataggtgtctgttttcttgtactgttagcagattctgacagatgtgatgagaagaagaatgcattggagatctttgctaaagttgaacaatcccggtactgtaccatatcagtcctttgtgggtagtaggtagcaagtaagaaacttttcaggaggaaattcctatttaaaatagattgattttagatgattgttcatccacaccattttatatagatactagtattaagatcaaaagcttcctcttcctcaggacagcttctactttagatgatccaataatgattaaagaatacctgtacctgcagattccagtttcaaagaaatttaattattatttacacagttaaggaacaggtgatacattttcatttgttagaaactgatctttctgtaataaaatagattttcaattcagtgtatgtcattattactgctaaggaaatcttagcccttgtctgccttaaaggaatctttatttaatttactgtaattattgctgtgtagtcactacttttgttaatttctcaaatcacttagatgatggtcttgttttccacttagtaggtatacagagctttgacgttcctattatttcctatataagagaaatttaaaacattttttgttctttctgtcttaggggaataaaaaaacactaaccacacatttggttaaactgcttaggagaagacataataaagattccccaatctatacttaacagccataaacctgagttacaggctcagttactccaaataaatagttcttataggtacttaattaattaggccttggtatctaaataacaaaataatgtccccaaataaataagaggaaggcagccctatacctttgttgctctatggtgacaacataaggacctggcaaatcactcatgttttaaagctgtaactatgtcaagcatttattaagatttagtagagaacgt

SEQ ID NO: 374174 - DNA, 8188 bp, Homo sapiens
  misc_feature (6358)..(6358): n is a, c, g, or t
  misc_feature (6363)..(6364): n is a, c, g, or t
  misc_feature (6426)..(6426): n is a, c, g, or t
  misc_feature (6428)..(6428): n is a, c, g, or t
  misc_feature (6497)..(6498): n is a, c, g, or t
  misc_feature (6504)..(6504): n is a, c, g, or t
  misc_feature (6611)..(6611): n is a, c, g, or t
  misc_feature (6623)..(6623): n is a, c, g, or t
  misc_feature (6652)..(6652): n is a, c, g, or t
  misc_feature (6691)..(6691): n is a, c, g, or t
  misc_feature (6711)..(6711): n is a, c, g, or t
  misc_feature (6755)..(6755): n is a, c, g, or t
ggaggctgagtatctcctgatcacttagttaattttatggggttttttctttctccctcatctgagttatagttctctgtctctacatttttgatgttgtggatggtacatatgtagctcatgtggatttagcacttcacaaagaagacatgtgtaatgagcagcaacaggagccagccaagatttcttcatttacttcactgaaagtttctcaagacctcgatgttgcagtgattgtcagctcctccaactccgcagttgctcttaacttaaatttgtatttcaggcaacacccaggacacctactgtgtgaaagaatactagaagatcttcctattcaaggacctaagggcgtagatgaagatgatcctgttaactctgcctacaacatgaaactggccaagttttccttccaaattgataggtcttggaaagcccagctatcatcattgaatgaaacaataaagaactccaaactggaggtttcctgttgtgctccatggttccaggatattttgcatttggagtcacctgaatctggtaaccacagtacaagtgtgcagagctgggccttcattccacaggacataatgcatgggcaatataatgttctacagaaagatcatgccaagaccagtgatccaggaagatcatggaaaataatgcacatcagtgaacaagaggaacccatagagcttaaatgtgtgtctgtgacaggattcactgcactgtttacttgggaagtggaaaggatgggctataccattaccctctgggatttggagacccagggcatgcagtgtttttcccttggcacaaagtgtattcctgtagacagtagtggagaccagcagctgtgctttgttttgacagagaatggactctctctgattttgtttggtttgactcaagaagagtttttaaacagactcatgatccatggaagtgccagcactgtggacactctttgtcatctcaatggctggggaaggtgctcaattcccatacatgcactagaggccgggatagaaaatcgtcagctggacacagtaaatttctttttgaagagcaaggaaaatctttttaatccatcctcaaaatcttctgtatctgatcagtttgatcacttgtcatcccatttatatttaagaaatgtggaagagctgataccagcattggatttactttgctcggcaattagagaaagttattctgaaccccaaagcaaacacttttcagaacaattgcttaatcttacactgtctttccttaacaaccaaataaaggagcttttcattcacactgaagaactagatgaacatctgcaaaaaggagtgaacattttgactagctacattaatgaacttcgaaccttcatgataaagtttccttggaagctaacagatgctatagatgaatatgatgtacatgaaaatgtccccaaagtaaaggagagcaatatatggaagaaactcagctttgaggaagttattgccagcgccattttaaacaacaaaataccagaggcacagactttcttcaggattgatagtcattctgctcaaaaacttgaggagcttattggcataggcctaaatttggtctttgacaatttaaaaaagaacaatataaaggaagcctctgaacttttgaagaatatggggtttgatgtaaaaggccaattgctcaagatctgcttctatacaactaataaaaatatacgtgactttttggttgaaattttaaaagaaaaaaattatttttctgaaaaagagaaaagaactatagacttcgtgcatcaagttgagaagctttatttgggacatttccaagaaaatatgcaaatccagtcatttcccaggtactggataaaggaacaagattttttcaagcacaagtctgttttggactcattcctgaaatatgattgtaaagatgaatttaacaaacaggaccatagaattgtgttaaattgggctctgtggtgggatcaactaacacaagaatccatccttctccccaggataagtccagaagaatacaaatcatattcccctgaagccctctggagatacctcacagctcgccatgattggttaaacattatcttatggattggagaatttcaaacccagcatagttatgcttcacttcagcagaacaaatggccccttctgactgttgatgttattaaccagaatacttcctgtaacaactacatgaggaatgaaattttagataagctggccaggaatggggtttttttggcatctgaactggaagactttgaatgcttcctcctaagactgagccgtattggaggtgtaatacaggataccctccctgttcaaaactacaagaccaaagaaggttgggatttccattctcaattcattctctattgtttggagcacagtctgcagcatcttctttatgtctaccttgactgttacaaacttagtcctgaaaattgtccctttttggaaaaaaaagagttacatgaagcacacccttggtttgaatttttagttcagtgtcgacaagttgccagtaacttaacagatcccaaactgatcttccaggctagccttgcaaatgctcagattttgattcccaccaatcaggccagtgtaagcagtatgctattggaaggacataccctcctggcccttgctactacaatgtattctcctgggggtgtcagtcaggttgttcagaatgaagaaaatgaaaactgtttgaagaaagtggatccccagctattgaagatggcattaactccttaccccaagctaaaaactgctctcttcccacagtgcactcctcctagtgtcctgccatctgatattacaatctaccaccttattcagtcattatcaccctttgatcctagcagattgtttggctggcagtctgctaacacactagctataggagatgcatggagtcatctcccacatttctctagccctgacctggttaataaatatgctatagtggaacgtctgaattttgcttattatttacataatgggcggccatcatttgcatttggtacttttctggtccaggaattaatcaagagcaagactcccaagcagctgatccagcaagtaggcaatgaagcctatgttatagggctctcctccttccacataccttcaataggagctgcatgtgtttgtttcttagaattgcttggccttgacagcctcaagctcagagttgatatgaaagtggccaatataattttgagctacaagtgcagaaatgaagatgctcagtacagctttatcagagagtctgtagccgaaaaactatctaaactagctgatggtgaaaagacaaccacagaagaattgcttgttctcttagaagaaggtacatggaacagcattcagcaacaggaaataaagaggttatccagtgaatctagcagccaatgggcattagtggtgcagttctgcaggctacacaatatgaaactaagcatatcttaccttagagaatgtgccaaagcaaatgattggctgcagttcattattcacagccaactccacaactaccacccagcagaggtgaaatcccttatccagtacttcagcccagtcattcaagaccacttaaggctggcttttgagaacttgccctcagtgcccacctccaaaatggacagcgatcaagtctgcaataagtgcccccaggaacttcaaggaagcaaacaagagatgaccgatttatttgaaattctgctccaatgctcagaggagccagactcctggcactggcttctggttgaagcagtgaaacaacaggcccctatcctcagtgttctggcctcatgtctccagggtgccagtgccatttcttgtctctgtgtttggatcatcacttctgtggaggacaatgttgcaactgaagcaatgggacacattcaggactcaacagaggaccatacctggaaccttgaggatctttcagtcatctggagaacattattaacaagacaaaagagcaaaactctcatcagaggtttccagcttttctttaaggattccccgttactactggtgatggagatgtatgaactgtgtatgttcttcaggaattataaagaagctgaagctaaacttctggagtttcagaagagccttgaaacgcttaacacagcagccacaaaggtccaccctgtcatccctgccatgtggctggaggatcaggtgtgtttccttttgaagcttatgctacagcagtgtaagacccagtatgagctggggaagcttttacagctctttgttgaaagagagcatctcttctctgatggtccagatgtgaaaaagctttgcatcctttgccagattttgaaggatacatccatagccattaatcatacaattattaccagctacagcattgagaatcttcagcatgaatgtagatctatttggaaagactgcagacagatggacaattcgctttggccaggagggtagcagaattagctgagttacctgtggacaacttggttattaaagagataacacaggaaatgcagaccctaaaacacattgaacagtggtcactaaaacaagcaagaattgacttctggaaaaaatgccatgagaattttaagaaaaattcaatttcaagcaaagcagcttcttcctttttctcaacccaggcccatgtggcatgtgagcacccaactggatggagcagcatggaggagcgccatctgctgctcaccttggcagggcactggcttgcccaggaggacgtggtgcccttggataagctggaggagctggagaagcagatctggctgtgccgcatcacccagcacactcttggaagaaatcaggaggaaacagagcccagattttctcgacagatctcaactagtggtgaactttcctttgatagtttagccagtgagttttccttctccaagttggctgctctgaacacatcaaaatacttagaacttaacagccttccatccaaagagacatgcgagaatagattggattggaaagagcaggagtcactaaactttttgattgggcgcctactggatgatggctgtgtgcatgaagcaagtagagtatgccggtattttcatttttataatccagatgtcgccttggtattgcactgcagagcactggcctcaggggaagctagtatggaggatctgcacccagagatccatgctctcctacaaagtgctgagctgcttgaggaagaagcacccgacattcccctaaggagagtccacagcacttcaagtctggatagtcagaagtttgtgacagtgccctccagtaatgaagtggtaactaacctggaagtgctgacaagcaaatgcctccatgggaagaactactgtcgacaggtcctctgtctgtatgatcttgccaaggagttgggctgttcctacacagatgttgctgctcaggatggtgaagccatgctccggaaaatcttggcctctcagcagcctgaccgatgcaaacgagcccaggccttcatcagcacacagggccttaagccagatactgtggctgaactcgtggcagaagaggtgacacgggagctgcttacttcatcacagggaacaggacataagcagatgttcaacccaacagaggaaagccagacatttcttcagctgaccactctgtgtcaagaccgcacattggtaggcatgaagttgttggataagatttcctccgttccccatggggaactgtcttgcaccacagagctcctgatcctggcccatcattgcttcaccctgacgtgccacatggagggcatcatccgagtcctacaggccgcccacatgctcacagataaccacctggcccccagtgaggagtatgggctggtggtacggctcctcactggcattggaaggtacaacgagatgacatacatatttgatttgctgcataaaaagcactactttgaagtgctaatgaggaagaagttggatccgagtggtaccctgaaaacagccctgctggactacatcaaacgctgccgtcctggagacagtgaaaagcacaatatgattgccctgtgcttcagcatgtgccgggagattggcgagaaccacgaggcagctgcccgcatccaactgaaattgattgagtctcagccctggggtgagtgaggtcacagccacactaccagaacagtgctgctagctaggtaaaattccttttttttttttttttttgagacagagtctcgctctgtccccaggctggagtgcagtggcacgatctcagctccctgcaacctccgcctcccaggttcaagtgattctcccgcctcagcctcccaagtagcngggannacaagcacctgccaccacacccggctaattttttgtatttttaatagagatggggtttgacnangttggccaggctggtcttgaactcctgacctggtgaactgcccacgttggcctcccaaagtgctgggannacaggngtgagccaccatgcccggccctcgataaaattcttacagcaaaggacaagagcccatgagatgggctattagaatcttgaggtaggtggcccggcacagtggctcangcctgtaatccnagcactttgggaggccaaggtaggtggantgcctgagctcaggagttcaacaccagcctgggcaacanggtgcaatcctgtctctacnaaaatacaaaaaaaaaatagccaggtgtggcggcatgcacctgnaatcccaactacttgggaggctgaagcaggtggatcacttgaacccgggaggcggaggttgcagtgagccaagatcgcgcccattgcactccagcgtaggtgacagagtgtgactccatctcaaaaaaagaatgttgaggtgggtatgtcgctcagcaggacccccacttgggcagacagatggaatggagactttgaaggcatgtgcaatttaggattgtactcttggatctatagcctatatatccagggtatcatccaccaggaaccaacatgcacgttgataccatgtaagccttccttgatgttttggagaaatgaggcattagaaggggcactgaatcctactgcggagtgaagttacaataagcgtatgcatttctggcccaataacctttatctgagtgaggtgttcctgcctgcctgtgaacatggctgggatgtttctattctagccacgatcacaatgagtgggatgagaacagtgagctttgggagtcagactcggcaaatcttctttatttcccctacagaggacagcctcaaggatgggcaccagctgaaacaactgctgctgaaggccctgactctgatgttggatgcagcagagagttatgccaaggtaacccaaaggcttttttcagactggccttgggacttgctgtctgcagtaaaattattttcttttgtccttgggctctttccaggtgaagcgggagggcatcataggccaaccaggaacagaaggggtgaataccgttgtgagggttcacacaggaggtgacaactaggtctttctctactgtgcctctccacccttgttcctcaggactcctgtgtgcgacaggcccagcactgtcagcggctcaccaagttgataactctgcagattcactttctgaacactggccagaacacaatgctcatcaacttgggccgccacaagctgatggactgtattctggccctacctcggttctaccaggtgagcaagaaagcaaactgtagccagcactgctagcatcctctctccttctgtcccactcatggaacccagaggtaaggtctcagggctagtgacagaaccaggacagtacagttctgatttaactctctgataccaacatagaacggcaatttgatgtatttctctctagtatattgttgggcagaggttagggaatggtaagacagtgctgtctccctttcctgtgctgttaggccagcagagaggcagacacctttggccctttaaccccaggctgcagactggtactggcccatggcctgctaggaaccaggccgcacagcaagtgagcactgggcaagcaagcattactgcctgcacaccatctcctgtcagatcagtgacaggactatatttttataggagcatgaaccctgttgtgaactgcacatgcaagggcttctta

SEQ ID NO: 374175 - DNA, 6869 bp, Homo sapiens
ggaggctgagtatctcctgatcacttagttaattttatggggttttttctttctccctcatctgagttatagttctctgtctctacatttttgatgttgtggatggtacatatgtagctcatgtggatttagcacttcacaaagaagacatgtgtaatgagcagcaacaggagccagccaagatttcttcatttacttcactgaaagtttctcaagacctcgatgttgcagtgattgtcagctcctccaactccgcagttgctcttaacttaaatttgtatttcaggcaacacccaggacacctactgtgtgaaagaatactagaagatcttcctattcaaggacctaagggcgtagatgaagatgatcctgttaactctgcctacaacatgaaactggccaagttttccttccaaattgataggtcttggaaagcccagctatcatcattgaatgaaacaataaagaactccaaactggaggtttcctgttgtgctccatggttccaggatattttgcatttggagtcacctgaatctggtaaccacagtacaagtgtgcagagctgggccttcattccacaggacataatgcatgggcaatataatgttctacagaaagatcatgccaagaccagtgatccaggaagatcatggaaaataatgcacatcagtgaacaagaggaacccatagagcttaaatgtgtgtctgtgacaggattcactgcactgtttacttgggaagtggaaaggatgggctataccattaccctctgggatttggagacccagggcatgcagtgtttttcccttggcacaaagtgtattcctgtagacagtagtggagaccagcagctgtgctttgttttgacagagaatggactctctctgattttgtttggtttgactcaagaagagtttttaaacagactcatgatccatggaagtgccagcactgtggacactctttgtcatctcaatggctggggaaggtgctcaattcccatacatgcactagaggccgggatagaaaatcgtcagctggacacagtaaatttctttttgaagagcaaggaaaatctttttaatccatcctcaaaatcttctgtatctgatcagtttgatcacttgtcatcccatttatatttaagaaatgtggaagagctgataccagcattggatttactttgctcggcaattagagaaagttattctgaaccccaaagcaaacacttttcagaacaattgcttaatcttacactgtctttccttaacaaccaaataaaggagcttttcattcacactgaagaactagatgaacatctgcaaaaaggagtgaacattttgactagctacattaatgaacttcgaaccttcatgataaagtttccttggaagctaacagatgctatagatgaatatgatgtacatgaaaatgtccccaaagtaaaggagagcaatatatggaagaaactcagctttgaggaagttattgccagcgccattttaaacaacaaaataccagaggcacagactttcttcaggattgatagtcattctgctcaaaaacttgaggagcttattggcataggcctaaatttggtctttgacaatttaaaaaagaacaatataaaggaagcctctgaacttttgaagaatatggggtttgatgtaaaaggccaattgctcaagatctgcttctatacaactaataaaaatatacgtgactttttggtaggtaaaggtgagactacatagtatacattttctagaaagcctgggtgaaaaacttggaagaaaaccttggaagaaaaaccttaagtaattttaatgttcaactaatatctaataagtaaaagtgtgacaaccccttcatctttttttccccttcatctttcttcaatgactattttacatttgtggcaaaagaaaatttgtgttaacatacattaactcaaatgttcaaaatataattcttgaatggcatattatctcatgactttttttaataatctttaattcccagcactaccttatttgataatctcatgacattttttgcaaaagtgcttgattttttgtaaagtcactgctttaattactttttattcaaggttgaaattttaaaagaaaaaaattatttttctgaaaaagagaaaagaactatagacttcgtgcatcaagttgagaagctttatttgggacatttccaagaaaatatgcaaatccagtcatttcccaggtactggataaaggaacaagattttttcaagcacaagtctgttttggactcattcctgaaatatgattgtaaagatgaatttaacaaacaggaccatagaattgtgttaaattgggctctgtggtgggatcaactaacacaagaatccatccttctccccaggataagtccagaagaatacaaatcatattcccctgaagccctctggagatacctcacagctcgccatgattggttaaacattatcttatggattggagaatttcaaacccagcatagttatgcttcacttcagcagaacaaatggccccttctgactgttgatgttattaaccagaatacttcctgtaacaactacatgaggaatgaaattttagataagctggccaggaatggggtttttttggcatctgaactggaagactttgaatgcttcctcctaagactgagccgtattggaggtgtaatacaggataccctccctgttcaaaactacaagaccaaagaaggttgggatttccattctcaattcattctctattgtttggagcacagtctgcagcatcttctttatgtctaccttgactgttacaaacttagtcctgaaaattgtccctttttggaaaaaaaagagttacatgaagcacacccttggtttgaatttttagttcagtgtcgacaagttgccagtaacttaacagatcccaaactgatcttccaggctagccttgcaaatgctcagattttgattcccaccaatcaggccagtgtaagcagtatgctattggaaggacataccctcctggcccttgctactacaatgtattctcctgggggtgtcagtcaggttgttcagaatgaagaaaatgaaaactgtttgaagaaagtggatccccagctattgaagatggcattaactccttaccccaagctaaaaactgctctcttcccacagtgcactcctcctagtgtcctgccatctgatattacaatctaccaccttattcagtcattatcaccctttgatcctagcagattgtttggctggcagtctgctaacacactagctataggagatgcatggagtcatctcccacatttctctagccctgacctggttaataaatatgctatagtggaacgtctgaattttgcttattatttacataatgggcggccatcatttgcatttggtacttttctggtccaggaattaatcaagagcaagactcccaagcagctgatccagcaagtaggcaatgaagcctatgttatagggctctcctccttccacataccttcaataggagctgcatgtgtttgtttcttagaattgcttggccttgacagcctcaagctcagagttgatatgaaagtggccaatataattttgagctacaagtgcagaaatgaagatgctcagtacagctttatcagagagtctgtagccgaaaaactatctaaactagctgatggtgaaaagacaaccacagaagaattgcttgttctcttagaagaaggtacatggaacagcattcagcaacaggaaataaagaggttatccagtgaatctagcagccaatgggcattagtggtgcagttctgcaggctacacaatatgaaactaagcatatcttaccttagagaatgtgccaaagcaaatgattggctgcagttcattattcacagccaactccacaactaccacccagcagaggtgaaatcccttatccagtacttcagcccagtcattcaagaccacttaaggctggcttttgagaacttgccctcagtgcccacctccaaaatggacagcgatcaagtctgcaataagtgcccccaggaacttcaaggaagcaaacaagagatgaccgatttatttgaaattctgctccaatgctcagaggagccagactcctggcactggcttctggttgaagcagtgaaacaacaggcccctatcctcagtgttctggcctcatgtctccagggtgccagtgccatttcttgtctctgtgtttggatcatcacttctgtggaggacaatgttgcaactgaagcaatgggacacattcaggactcaacagaggaccatacctggaaccttgaggatctttcagtcatctggagaacattattaacaagacaaaagagcaaaactctcatcagaggtttccagcttttctttaaggattccccgttactactggtgatggagatgtatgaactgtgtatgttcttcaggaattataaagaagctgaagctaaacttctggagtttcagaagagccttgaaacgcttaacacagcagccacaaaggtccaccctgtcatccctgccatgtggctggaggatcaggtgtgtttccttttgaagcttatgctacagcagtgtaagacccagtatgagctggggaagcttttacagctctttgttgaaagagagcatctcttctctgatggtccagatgtgaaaaagctttgcatcctttgccagattttgaaggatacatccatagccattaatcatacaattattaccagctacagcattgagaatcttcagcatgaatgtagatctatttggaaagactgcagacagatggacaattcgctttggccaggagggtagcagaattagctgagttacctgtggacaacttggttattaaagagataacacaggaaatgcagaccctaaaacacattgaacagtggtcactaaaacaagcaagaattgacttctggaaaaaatgccatgagaattttaagaaaaattcaatttcaagcaaagcagcttcttcctttttctcaacccaggcccatgtggcatgtgagcacccaactggatggagcagcatggaggagcgccatctgctgctcaccttggcagggcactggcttgcccaggaggacgtggtgcccttggataagctggaggagctggagaagcagatctggctgtgccgcatcacccagcacactcttggaagaaatcaggaggaaacagagcccagattttctcgacagatctcaactagtggtgaactttcctttgatagtttagccagtgagttttccttctccaagttggctgctctgaacacatcaaaatacttagaacttaacagccttccatccaaagagacatgcgagaatagattggattggaaagagcaggagtcactaaactttttgattgggcgcctactggatgatggctgtgtgcatgaagcaagtagagtatgccggtattttcatttttataatccagatgtcgccttggtattgcactgcagagcactggcctcaggggaagctagtatggaggatctgcacccagagatccatgctctcctacaaagtgctgagctgcttgaggaagaagcacccgacattcccctaaggagagtccacagcacttcaagtctggatagtcagaagtttgtgacagtgccctccagtaatgaagtggtaactaacctggaagtgctgacaagcaaatgcctccatgggaagaactactgtcgacaggtcctctgtctgtatgatcttgccaaggagttgggctgttcctacacagatgttgctgctcaggatggtgaagccatgctccggaaaatcttggcctctcagcagcctgaccgatgcaaacgagcccaggccttcatcagcacacagggccttaagccagatactgtggctgaactcgtggcagaagaggtgacacgggagctgcttacttcatcacagggaacaggacataagcagatgttcaacccaacagaggaaagccagacatttcttcagctgaccactctgtgtcaagaccgcacattggtaggcatgaagttgttggataagatttcctccgttccccatggggaactgtcttgcaccacagagctcctgatcctggcccatcattgcttcaccctgacgtgccacatggagggcatcatccgagtcctacaggccgcccacatgctcacagataaccacctggcccccagtgaggagtatgggctggtggtacggctcctcactggcattggaaggtacaacgagatgacatacatatttgatttgctgcataaaaagcactactttgaagtgctaatgaggaagaagttggatccgagtggtaccctgaaaacagccctgctggactacatcaaacgctgccgtcctggagacagtgaaaagcacaatatgattgccctgtgcttcagcatgtgccgggagattggcgagaaccacgaggcagctgcccgcatccaactgaaattgattgagtctcagccctgggaggacagcctcaaggatgggcaccagctgaaacaactgctgctgaaggccctgactctgatgttggatgcagcagagagttatgccaaggactcctgtgtgcgacaggcccagcactgtcagcggctcaccaagttgataactctggagggccccttctggcactttctatgggaggattctcgtaacagcagcacaccaactgaaaagccccaactgctcgctcttggtgaaaattatgaactgctatctatgaatttaatttgaaagatggaagatgtgatgcaccattttgtatagctgtttaatgggtgcagggt

SEQ ID NO: 374176 - DNA, 5811 bp, Homo sapiens
ggaggctgagtatctcctgatcacttagttaattttatggggttttttctttctccctcatctgagttatagttctctgtctctacatttttgatgttgtggatggtacatatgtagctcatgtggatttagcacttcacaaagaagacatgtgtaatgagcagcaacaggagccagccaagatttcttcatttacttcactgaaagtttctcaagacctcgatgttgcagtgattgtcagctcctccaactccgcagttgctcttaacttaaatttgtatttcaggcaacacccaggacacctactgtgtgaaagaatactagaagatcttcctattcaaggacctaagggcgtagatgaagatgatcctgttaactctgcctacaacatgaaactggccaagttttccttccaaattgataggtcttggaaagcccagctatcatcattgaatgaaacaataaagaactccaaactggaggtttcctgttgtgctccatggttccaggatattttgcatttggagtcacctgaatctggtaaccacagtacaagtgtgcagagctgggccttcattccacaggacataatgcatgggcaatataatgttctacagaaagatcatgccaagaccagtgatccaggaagatcatggaaaataatgcacatcagtgaacaagaggaacccatagagcttaaatgtgtgtctgtgacaggattcactgcactgtttacttgggaagtggaaaggatgggctataccattaccctctgggatttggagacccagggcatgcagtgtttttcccttggcacaaagtgtattcctgtagacagtagtggagaccagcagctgtgctttgttttgacagagaatggactctctctgattttgtttggtttgactcaagaagagtttttaaacagactcatgatccatggaagtgccagcactgtggacactctttgtcatctcaatggctggggaaggtgctcaattcccatacatgcactagaggccgggatagaaaatcgtcagctggacacagtaaatttctttttgaagagcaaggaaaatctttttaatccatcctcaaaatcttctgtatctgatcagtttgatcacttgtcatcccatttatatttaagaaatgtggaagagctgataccagcattggatttactttgctcggcaattagagaaagttattctgaaccccaaagcaaacacttttcagaacaattgcttaatcttacactgtctttccttaacaaccaaataaaggagcttttcattcacactgaagaactagatgaacatctgcaaaaaggagtgaacattttgactagctacattaatgaacttcgaaccttcatgataaagtttccttggaagctaacagatgctatagatgaatatgatgtacatgaaaatgtccccaaagtaaaggagagcaatatatggaagaaactcagctttgaggaagttattgccagcgccattttaaacaacaaaataccagaggcacagactttcttcaggattgatagtcattctgctcaaaaacttgaggagcttattggcataggcctaaatttggtctttgacaatttaaaaaagaacaatataaaggaagcctctgaacttttgaagaatatggggtttgatgtaaaaggccaattgctcaagatctgcttctatacaactaataaaaatatacgtgactttttggttgaaattttaaaagaaaaaaattatttttctgaaaaagagaaaagaactatagacttcgtgcatcaagttgagaagctttatttgggacatttccaagaaaatatgcaaatccagtcatttcccaggtactggataaaggaacaagattttttcaagcacaagtctgttttggactcattcctgaaatatgattgtaaagatgaatttaacaaacaggaccatagaattgtgttaaattgggctctgtggtgggatcaactaacacaagaatccatccttctccccaggataagtccagaagaatacaaatcatattcccctgaagccctctggagatacctcacagctcgccatgattggttaaacattatcttatggattggagaatttcaaacccagcatagttatgcttcacttcagcagaacaaatggccccttctgactgttgatgttattaaccagaatacttcctgtaacaactacatgaggaatgaaattttagataagctggccaggaatggggtttttttggcatctgaactggaagactttgaatgcttcctcctaagactgagccgtattggaggtgtaatacaggataccctccctgttcaaaactacaagaccaaagaaggttgggatttccattctcaattcattctctattgtttggagcacagtctgcagcatcttctttatgtctaccttgactgttacaaacttagtcctgaaaattgtccctttttggaaaaaaaagagttacatgaagcacacccttggtttgaatttttagttcagtgtcgacaagttgccagtaacttaacagatcccaaactgatcttccaggctagccttgcaaatgctcagattttgattcccaccaatcaggccagtgtaagcagtatgctattggaaggacataccctcctggcccttgctactacaatgtattctcctgggggtgtcagtcaggttgttcagaatgaagaaaatgaaaactgtttgaagaaagtggatccccagctattgaagatggcattaactccttaccccaagctaaaaactgctctcttcccacagtgcactcctcctagtgtcctgccatctgatattacaatctaccaccttattcagtcattatcaccctttgatcctagcagattgtttggctggcagtctgctaacacactagctataggagatgcatggagtcatctcccacatttctctagccctgacctggttaataaatatgctatagtggaacgtctgaattttgcttattatttacataatgggcggccatcatttgcatttggtacttttctggtccaggaattaatcaagagcaagactcccaagcagctgatccagcaagtaggcaatgaagcctatgttatagggctctcctccttccacataccttcaataggagctgcatgtgtttgtttcttagaattgcttggccttgacagcctcaagctcagagttgatatgaaagtggccaatataattttgagctacaagtgcagaaatgaagatgctcagtacagctttatcagagagtctgtagccgaaaaactatctaaactagctgatggtgaaaagacaaccacagaagaattgcttgttctcttagaagaaggtacatggaacagcattcagcaacaggaaataaagaggttatccagtgaatctagcagccaatgggcattagtggtgcagttctgcaggctacacaatatgaaactaagcatatcttaccttagagaatgtgccaaagcaaatgattggctgcagttcattattcacagccaactccacaactaccacccagcagaggtgaaatcccttatccagtacttcagcccagtcattcaagaccacttaaggctggcttttgagaacttgccctcagtgcccacctccaaaatggacagcgatcaagtctgcaataagtgcccccaggaacttcaaggaagcaaacaagagatgaccgatttatttgaaattctgctccaatgctcagaggagccagactcctggcactggcttctggttgaagcagtgaaacaacaggcccctatcctcagtgttctggcctcatgtctccagggtgccagtgccatttcttgtctctgtgtttggatcatcacttctgtggaggacaatgttgcaactgaagcaatgggacacattcaggactcaacagaggaccatacctggaaccttgaggatctttcagtcatctggagaacattattaacaagacaaaagagcaaaactctcatcagaggtttccagcttttctttaaggattccccgttactactggtgatggagatgtatgaactgtgtatgttcttcaggaattataaagaagctgaagctaaacttctggagtttcagaagagccttgaaacgcttaacacagcagccacaaaggtccaccctgtcatccctgccatgtggctggaggatcaggtgtgtttccttttgaagcttatgctacagcagtgtaagacccagtatgagctggggaagcttttacagctctttgttgaaagagagcatctcttctctgatggtccagatgtgaaaaagctttgcatcctttgccagattttgaaggatacatccatagccattaatcatacaattattaccagctacagcattgagaatcttcagcatgaatgtagatctatttggaaagactgcagacagatggacaattcgctttggccaggagggtagcagaattagctgagttacctgtggacaacttggttattaaagagataacacaggaaatgcagaccctaaaacacattgaacagtggtcactaaaacaagcaagaattgacttctggaaaaaatgccatgagaattttaagaaaaattcaatttcaagcaaagcagcttcttcctttttctcaacccaggcccatgtggcatgtgagcacccaactggatggagcagcatggaggagcgccatctgctgctcaccttggcagggcactggcttgcccaggaggacgtggtgcccttggataagctggaggagctggagaagcagatctggctgtgccgcatcacccagcacactcttggaagaaatcaggaggaaacagagcccagattttctcgacagatctcaactagtggtgaactttcctttgatagtttagccagtgagttttccttctccaagttggctgctctgaacacatcaaaatacttagaacttaacagccttccatccaaagagacatgcgagaatagattggattggaaagagcaggagtcactaaactttttgattgggcgcctactggatgatggctgtgtgcatgaagcaagtagagtatgccggtattttcatttttataatccagatgtcgccttggtattgcactgcagagcactggcctcaggggaagctagtatggaggatctgcacccagagatccatgctctcctacaaagtgctgagctgcttgaggaagaagcacccgacattcccctaaggagagtccacagcacttcaagtctggatagtcagaagtttgtgacagtgccctccagtaatgaagtggtaactaacctggaagtgctgacaagcaaatgcctccatgggaagaactactgtcgacaggtcctctgtctgtatgatcttgccaaggagttgggctgttcctacacagatgttgctgctcaggatggtgaagccatgctccggaaaatcttggcctctcagcagcctgaccgatgcaaacgagcccaggccttcatcagcacacagggccttaagccagatactgtggctgaactcgtggcagaagaggtgacacgggagctgcttacttcatcacagggaacaggtgccctaccccccggggattcccaacctctctgacagcattctctagttcccagtgttaaggatttggatgttgtgcttatatacatcctgtatgtggttctctcaagtttctggattgcagtaatgtattttgtttaaataaaacaaaatacatgctttattttttacaaaatacatgtacaaaatac

SEQ ID NO: 374177 - DNA, 5568 bp, Homo sapiens
ggaggctgagtatctcctgatcacttagttaattttatggggttttttctttctccctcatctgagttatagttctctgtctctacatttttgatgttgtggatggtacatatgtagctcatgtggatttagcacttcacaaagaagacatgtgtaatgagcagcaacaggagccagccaagatttcttcatttacttcactgaaagtttctcaagacctcgatgttgcagtgattgtcagctcctccaactccgcagttgctcttaacttaaatttgtatttcaggcaacacccaggacacctactgtgtgaaagaatactagaagatcttcctattcaaggacctaagggcgtagatgaagatgatcctgttaactctgcctacaacatgaaactggccaagttttccttccaaattgataggtcttggaaagcccagctatcatcattgaatgaaacaataaagaactccaaactggaggtttcctgttgtgctccatggttccaggatattttgcatttggagtcacctgaatctggtaaccacagtacaagtgtgcagagctgggccttcattccacaggacataatgcatgggcaatataatgttctacagaaagatcatgccaagaccagtgatccaggaagatcatggaaaataatgcacatcagtgaacaagaggaacccatagagcttaaatgtgtgtctgtgacaggattcactgcactgtttacttgggaagtggaaaggatgggctataccattaccctctgggatttggagacccagggcatgcagtgtttttcccttggcacaaagtgtattcctgtagacagtagtggagaccagcagctgtgctttgttttgacagagaatggactctctctgattttgtttggtttgactcaagaagagtttttaaacagactcatgatccatggaagtgccagcactgtggacactctttgtcatctcaatggctggggaaggtgctcaattcccatacatgcactagaggccgggatagaaaatcgtcagctggacacagtaaatttctttttgaagagcaaggaaaatctttttaatccatcctcaaaatcttctgtatctgatcagtttgatcacttgtcatcccatttatatttaagaaatgtggaagagctgataccagcattggatttactttgctcggcaattagagaaagttattctgaaccccaaagcaaacacttttcagaacaattgcttaatcttacactgtctttccttaacaaccaaataaaggagcttttcattcacactgaagaactagatgaacatctgcaaaaaggagtgaacattttgactagctacattaatgaacttcgaaccttcatgataaagtttccttggaagctaacagatgctatagatgaatatgatgtacatgaaaatgtccccaaagtaaaggagagcaatatatggaagaaactcagctttgaggaagttattgccagcgccattttaaacaacaaaataccagaggcacagactttcttcaggattgatagtcattctgctcaaaaacttgaggagcttattggcataggcctaaatttggtctttgacaatttaaaaaagaacaatataaaggaagcctctgaacttttgaagaatatggggtttgatgtaaaaggccaattgctcaagatctgcttctatacaactaataaaaatatacgtgactttttggttgaaattttaaaagaaaaaaattatttttctgaaaaagagaaaagaactatagacttcgtgcatcaagttgagaagctttatttgggacatttccaagaaaatatgcaaatccagtcatttcccaggtactggataaaggaacaagattttttcaagcacaagtctgttttggactcattcctgaaatatgattgtaaagatgaatttaacaaacaggaccatagaattgtgttaaattgggctctgtggtgggatcaactaacacaagaatccatccttctccccaggataagtccagaagaatacaaatcatattcccctgaagccctctggagatacctcacagctcgccatgattggttaaacattatcttatggattggagaatttcaaacccagcatagttatgcttcacttcagcagaacaaatggccccttctgactgttgatgttattaaccagaatacttcctgtaacaactacatgaggaatgaaattttagataagctggccaggaatggggtttttttggcatctgaactggaagactttgaatgcttcctcctaagactgagccgtattggaggtgtaatacaggataccctccctgttcaaaactacaagaccaaagaaggttgggatttccattctcaattcattctctattgtttggagcacagtctgcagcatcttctttatgtctaccttgactgttacaaacttagtcctgaaaattgtccctttttggaaaaaaaagagttacatgaagcacacccttggtttgaatttttagttcagtgtcgacaagttgccagtaacttaacagatcccaaactgatcttccaggctagccttgcaaatgctcagattttgattcccaccaatcaggccagtgtaagcagtatgctattggaaggacataccctcctggcccttgctactacaatgtattctcctgggggtgtcagtcaggttgttcagaatgaagaaaatgaaaactgtttgaagaaagtggatccccagctattgaagatggcattaactccttaccccaagctaaaaactgctctcttcccacagtgcactcctcctagtgtcctgccatctgatattacaatctaccaccttattcagtcattatcaccctttgatcctagcagattgtttggctggcagtctgctaacacactagctataggagatgcatggagtcatctcccacatttctctagccctgacctggttaataaatatgctatagtggaacgtctgaattttgcttattatttacataatgggcggccatcatttgcatttggtacttttctggtccaggaattaatcaagagcaagactcccaagcagctgatccagcaagtaggcaatgaagcctatgttatagggctctcctccttccacataccttcaataggagctgcatgtgtttgtttcttagaattgcttggccttgacagcctcaagctcagagttgatatgaaagtggccaatataattttgagctacaagtgcagaaatgaagatgctcagtacagctttatcagagagtctgtagccgaaaaactatctaaactagctgatggtgaaaagacaaccacagaagaattgcttgttctcttagaagaaggtacatggaacagcattcagcaacaggaaataaagaggttatccagtgaatctagcagccaatgggcattagtggtgcagttctgcaggctacacaatatgaaactaagcatatcttaccttagagaatgtgccaaagcaaatgattggctgcagttcattattcacagccaactccacaactaccacccagcagaggtgaaatcccttatccagtacttcagcccagtcattcaagaccacttaaggctggcttttgagaacttgccctcagtgcccacctccaaaatggacagcgatcaagtctgcaataagtgcccccaggaacttcaaggaagcaaacaagagatgaccgatttatttgaaattctgctccaatgctcagaggagccagactcctggcactggcttctggttgaagcagtgaaacaacaggcccctatcctcagtgttctggcctcatgtctccagggtgccagtgccatttcttgtctctgtgtttggatcatcacttctgtggaggacaatgttgcaactgaagcaatgggacacattcaggactcaacagaggaccatacctggaaccttgaggatctttcagtcatctggagaacattattaacaagacaaaagagcaaaactctcatcagaggtttccagcttttctttaaggattccccgttactactggtgatggagatgtatgaactgtgtatgttcttcaggaattataaagaagctgaagctaaacttctggagtttcagaagagccttgaaacgcttaacacagcagccacaaaggtccaccctgtcatccctgccatgtggctggaggatcaggtgtgtttccttttgaagcttatgctacagcagtgtaagacccagtatgagctggggaagcttttacagctctttgttgaaagagagcatctcttctctgatggtccagatgtgaaaaagctttgcatcctttgccagattttgaaggatacatccatagccattaatcatacaattattaccagctacagcattgagaatcttcagcatgaatgtagatctatttggaaagactgcagacagatggacaattcgctttggccaggagggtagcagaattagctgagttacctgtggacaacttggttattaaagagataacacaggaaatgcagaccctaaaacacattgaacagtggtcactaaaacaagcaagaattgacttctggaaaaaatgccatgagaattttaagaaaaattcaatttcaagcaaagcagcttcttcctttttctcaacccaggcccatgtggcatgtgagcacccaactggatggagcagcatggaggagcgccatctgctgctcaccttggcagggcactggcttgcccaggaggacgtggtgcccttggataagctggaggagctggagaagcagatctggctgtgccgcatcacccagcacactcttggaagaaatcaggaggaaacagagcccagattttctcgacagatctcaactagtggtgaactttcctttgatagtttagccagtgagttttccttctccaagttggctgctctgaacacatcaaaatacttagaacttaacagccttccatccaaagagacatgcgagaatagattggattggaaagagcaggagtcactaaactttttgattgggcgcctactggatgatggctgtgtgcatgaagcaagtagagtatgccggtattttcatttttataatccagatgtcgccttggtattgcactgcagagcactggcctcaggggaagctagtatggaggatctgcacccagagatccatgctctcctacaaagtgctgagctgcttgaggaagaagcacccgacattcccctaaggagagtccacagcagtaagtgaaggagatcagatggcccagagtcttaaatggcactgttagcactgtctccaagaaggaagggacccttgtggcagaatagttctaccaagttaaggggacaacaacttttttccaggtaatctgtagactagccaattaactaggcaatgaaatagaaagatctatgtcttttaaactagctatgtttcaaagttaaagggaatctatctgatttgtagctagttcactgaaatttattctacatattctatacatctgtaaatttaatcatttccag

SEQ ID NO: 374178 - DNA, 4104 bp, Homo sapiens
ggaggctgagtatctcctgatcacttagttaattttatggggttttttctttctccctcatctgagttatagttctctgtctctacatttttgatgttgtggatggtacatatgtagctcatgtggatttagcacttcacaaagaagacatgtgtaatgagcagcaacaggagccagccaagatttcttcatttacttcactgaaagtttctcaagacctcgatgttgcagtgattgtcagctcctccaactccgcagttgctcttaacttaaatttgtatttcaggcaacacccaggacacctactgtgtgaaagaatactagaagatcttcctattcaaggacctaagggcgtagatgaagatgatcctgttaactctgcctacaacatgaaactggccaagttttccttccaaattgataggtcttggaaagcccagctatcatcattgaatgaaacaataaagaactccaaactggaggtttcctgttgtgctccatggttccaggatattttgcatttggagtcacctgaatctggtaaccacagtacaagtgtgcagagctgggccttcattccacaggacataatgcatgggcaatataatgttctacagaaagatcatgccaagaccagtgatccaggaagatcatggaaaataatgcacatcagtgaacaagaggaacccatagagcttaaatgtgtgtctgtgacaggattcactgcactgtttacttgggaagtggaaaggatgggctataccattaccctctgggatttggagacccagggcatgcagtgtttttcccttggcacaaagtgtattcctgtagacagtagtggagaccagcagctgtgctttgttttgacagagaatggactctctctgattttgtttggtttgactcaagaagagtttttaaacagactcatgatccatggaagtgccagcactgtggacactctttgtcatctcaatggctggggaaggtgctcaattcccatacatgcactagaggccgggatagaaaatcgtcagctggacacagtaaatttctttttgaagagcaaggaaaatctttttaatccatcctcaaaatcttctgtatctgatcagtttgatcacttgtcatcccatttatatttaagaaatgtggaagagctgataccagcattggatttactttgctcggcaattagagaaagttattctgaaccccaaagcaaacacttttcagaacaattgcttaatcttacactgtctttccttaacaaccaaataaaggagcttttcattcacactgaagaactagatgaacatctgcaaaaaggagtgaacattttgactagctacattaatgaacttcgaaccttcatgataaagtttccttggaagctaacagatgctatagatgaatatgatgtacatgaaaatgtccccaaagtaaaggagagcaatatatggaagaaactcagctttgaggaagttattgccagcgccattttaaacaacaaaataccagaggcacagactttcttcaggattgatagtcattctgctcaaaaacttgaggagcttattggcataggcctaaatttggtctttgacaatttaaaaaagaacaatataaaggaagcctctgaacttttgaagaatatggggtttgatgtaaaaggccaattgctcaagatctgcttctatacaactaataaaaatatacgtgactttttggtaggtaaaggtgagactacatagtatacattttctagaaagcctgggtgaaaaacttggaagaaaaccttggaagaaaaaccttaagtaattttaatgttcaactaatatctaataagtaaaagtgtgacaaccccttcatctttttttccccttcatctttcttcaatgactattttacatttgtggcaaaagaaaatttgtgttaacatacattaactcaaatgttcaaaatataattcttgaatggcatattatctcatgactttttttaataatctttaattcccagcactaccttatttgataatctcatgacattttttgcaaaagtgcttgattttttgtaaagtcactgctttaattactttttattcaaggttgaaattttaaaagaaaaaaattatttttctgaaaaagagaaaagaactatagacttcgtgcatcaagttgagaagctttatttgggacatttccaagaaaatatgcaaatccagtcatttcccaggtactggataaaggaacaagattttttcaagcacaagtctgttttggactcattcctgaaatatgattgtaaagatgaatttaacaaacaggaccatagaattgtgttaaattgggctctgtggtgggatcaactaacacaagaatccatccttctccccaggataagtccagaagaatacaaatcatattcccctgaagccctctggagatacctcacagctcgccatgattggttaaacattatcttatggattggagaatttcaaacccagcatagttatgcttcacttcagcagaacaaatggccccttctgactgttgatgttattaaccagaatacttcctgtaacaactacatgaggaatgaaattttagataagctggccaggaatggggtttttttggcatctgaactggaagactttgaatgcttcctcctaagactgagccgtattggaggtgtaatacaggataccctccctgttcaaaactacaagaccaaagaaggttgggatttccattctcaattcattctctattgtttggagcacagtctgcagcatcttctttatgtctaccttgactgttacaaacttagtcctgaaaattgtccctttttggaaaaaaaagagttacatgaagcacacccttggtttgaatttttagttcagtgtcgacaagttgccagtaacttaacagatcccaaactgatcttccaggctagccttgcaaatgctcagattttgattcccaccaatcaggccagtgtaagcagtatgctattggaaggacataccctcctggcccttgctactacaatgtattctcctgggggtgtcagtcaggttgttcagaatgaagaaaatgaaaactgtttgaagaaagtggatccccagctattgaagatggcattaactccttaccccaagctaaaaactgctctcttcccacagtgcactcctcctagtgtcctgccatctgatattacaatctaccaccttattcagtcattatcaccctttgatcctagcagattgtttggctggcagtctgctaacacactagctataggaggaatcaggtcacaatgtgaaaagtccttggaattccatgagaaaacacaactttatttcagaaataagctttgaactttgaaaacaagagcaggtacactgttttccagaactagtttctggaaccagatcacagtgttgtcttttttaaaaaataggtagtaagtggttaagagacaattgaatagtacgtgacaggagtgactatttctttctaactggagtcagccctccatatccttgggatccacatccaaggattcaaccaacctcagatgggaaatattcaaaagaacaaacaaacaatttaaaaaaaagaaaaacaatagaacaattaaaaataataccaatttaaaaatacagtataacaactatctacatggcatttacatttattgggtattataagtgatctagagtaatctaaagtgtatggggaaatgtgcataggctatatataaatactatgctattttacagggacttgagcatccttctgtggattttggtatccaagggtttcaggaaccaatcccccatggataccaagagatgactagactcatatcaaaatatcttctgacttcaaatttatctaaaaaaagacatttttgtttgatattttcttgggtttagaggaactttaaactgagctattctgctggtcttattaatagaaggatggtgccatctttctaagatattcatgctctatgaatacaacatcagaaagtaagtgataacaaatggaggttataggagggtaattagtgtagagggaaaaatgt

SEQ ID NO: 374179 - DNA, 2924 bp, Homo sapiens
ggaggctgagtatctcctgatcacttagttaattttatggggttttttctttctccctcatctgagttatagttctctgtctctacatttttgatgttgtggatggtacatatgtagctcatgtggatttagcacttcacaaagaagacatgtgtaatgagcagcaacaggagccagccaagatttcttcatttacttcactgaaagtttctcaagacctcgatgttgcagtgattgtcagctcctccaactccgcagttgctcttaacttaaatttgtatttcaggcaacacccaggacacctactgtgtgaaagaatactagaagatcttcctattcaaggacctaagggcgtagatgaagatgatcctgttaactctgcctacaacatgaaactggccaagttttccttccaaattgataggtcttggaaagcccagctatcatcattgaatgaaacaataaagaactccaaactggaggtttcctgttgtgctccatggttccaggatattttgcatttggagtcacctgaatctggtaaccacagtacaagtgtgcagagctgggccttcattccacaggacataatgcatgggcaatataatgttctacagaaagatcatgccaagaccagtgatccaggaagatcatggaaaataatgcacatcagtgaacaagaggaacccatagagcttaaatgtgtgtctgtgacaggattcactgcactgtttacttgggaagtggaaaggatgggctataccattaccctctgggatttggagacccagggcatgcagtgtttttcccttggcacaaagtgtattcctgtagacagtagtggagaccagcagctgtgctttgttttgacagagaatggactctctctgattttgtttggtttgactcaagaagagtttttaaacagactcatgatccatggaagtgccagcactgtggacactctttgtcatctcaatggctggggaaggtgctcaattcccatacatgcactagaggccgggatagaaaatcgtcagctggacacagtaaatttctttttgaagagcaaggaaaatctttttaatccatcctcaaaatcttctgtatctgatcagtttgatcacttgtcatcccatttatatttaagaaatgtggaagagctgataccagcattggatttactttgctcggcaattagagaaagttattctgaaccccaaagcaaacacttttcagaacaattgcttaatcttacactgtctttccttaacaaccaaataaaggagcttttcattcacactgaagaactagatgaacatctgcaaaaaggagtgaacattttgactagctacattaatgaacttcgaaccttcatgataaagtttccttggaagctaacagatgctatagatgaatatgatgtacatgaaaatgtccccaaagtaaaggagagcaatatatggaagaaactcagctttgaggaagttattgccagcgccattttaaacaacaaaataccagaggcacagactttcttcaggattgatagtcattctgctcaaaaacttgaggagcttattggcataggcctaaatttggtctttgacaatttaaaaaagaacaatataaaggaagcctctgaacttttgaagaatatggggtttgatgtaaaaggccaattgctcaagatctgcttctatacaactaataaaaatatacgtgactttttggtaggtaaaggtgagactacatagtatacattttctagaaagcctgggtgaaaaacttggaagaaaaccttggaagaaaaaccttaagtaattttaatgttcaactaatatctaataagtaaaagtgtgacaaccccttcatctttttttccccttcatctttcttcaatgactattttacatttgtggcaaaagaaaatttgtgttaacatacattaactcaaatgttcaaaatataattcttgaatggcatattatctcatgactttttttaataatctttaattcccagcactaccttatttgataatctcatgacattttttgcaaaagtgcttgattttttgtaaagtcactgctttaattactttttattcaaggttgaaattttaaaagaaaaaaattatttttctgaaaaagagaaaagaactatagacttcgtgcatcaagttgagaagctttatttgggacatttccaagaaaatatgcaaatccagtcatttcccaggtactggataaaggaacaagattttttcaagcacaagtctgttttggactcattcctgaaatatgattgtaaagatgaatttaacaaacaggaccatagaattgtgttaaattgggctctgtggtgggatcaactaacacaagaatccatccttctccccaggataagtccagaagaatacaaatcatattcccctgaagccctctggagatacctcacagctcgccatgattggttaaacattatcttatggattggagaatttcaaacccagcatagttatgcttcacttcagcagaacaaatggccccttctgactgttgatgttattaaccagaatacttcctgtaacaactacatgaggaatgaaattttagataagctggccaggtattataactgttgaactaatacccaatgggaagaatacaagggaagagcaagaaaaaataatggaatggggtttttttggcatctgaactggaagactttgaatgcttcctcctaagactgagccgtattggaggtgtaatacaggataccctccctgttcaaaactacaagaccaaagaaggttgggatttccattctcaattcattctctattgtttggagcacagtctgcagcatcttctttatgtctaccttgactgttacaagtgagtactgagaatgcatttgtc

SEQ ID NO: 374180 - DNA, 524 bp, Homo sapiens
ccggaattccggggtcgactactactactaaattcgcggccgcgtcgactgaagacccagggcatgcagtgtttttcccttggcacaaagtgtattccttgtcgacaggtcctctgtctgtatgatcttgccaaggagttgggctgttcctacacagatgttgctgctcaggatggtgaagccatgctccggaaaatcttggcctctcagcagcctgaccgatgcaaacgagcccaggccttcatcagcacacagggccttaagccagatactgtggctgaactcgtggcagaagaggtgacacgggagctgcttacttcatcacagggaacaggtgccctaccccccggggattcccaacctctctgacagcattctctagttcccagtgttaaggatttggatgttgtgcttatatacatcctgtatgtggttctctcaagtttctggattgcagtaatgtattttgtttaaataaaacaaaatacatgctttattttttacaaaatacatgtacaaaatac

SEQ ID NO: 374181 - DNA, 434 bp, Homo sapiens
ccaaaattaaaaaaaaaaaaatttatatcactgtttttaggtactggataaaggaacaagattttttcaagcacaagtctgttttggactcattcctgaaatatgattgtaaagatgaatttaacaaacaggaccatagaattgtgttaaattgggctctgtggtgggatcaactaacacaagaatccatccttctccccaggataagtccagaaggcaagtgtgagagagcctgaaatatgaacatactgaatgaggattaaattgggtattgatatttgaatattttgatgtgtctcaattttagaattcctttcgggaaataatattcaggttctttaaaatgcaagtcgttgcattaagatctctttcttatctcagagtttctgggagggatttataatgtgctaataaaagaaaaaaatagttaattg

SEQ ID NO: 374182 - DNA, 119 bp, Homo sapiens
cattattcacagccaactccacaactaccacccagcagaggtaagccactaattgttagcagtcactcaaaaggaaataggaacacttcttagaagatagcattctttctgttgtgtag

SEQ ID NO: 374183 - DNA, 507 bp, Homo sapiens
aatcctgtcatttcacaataacacatcattactgttcatcaacaaatgtgtcatcctacatattatatttcctgaaagagatgctgcaattagagtactcaactgtttcacacttcccttgcctgcacaggcagtggacatgattattgacacgcagctctgcagaggaattctttttgttttgagtagtttaggctggatctgtatccttggtggtagaagtgttgattgatacgtagaggagaagaacacctataaagatgagcctttttaggctttagttttgggagctgggatataggaagtgtggttagtttttcagtaaaacttttcatggaaaaagatcctcataaacttaaaatactaaattgtatattgctttatattttagttgaatattttccagtatatacatttttaatagtattaaccatacatatctgtgttcttttaaaattgtatattctctgcattacctgtttattcaaaatgtatttcttgaatatc

SEQ ID NO: 374184 - DNA, 717 bp, Homo sapiens
aaggacaagaaaaggaaagggttatattaaaatacagagctacttacttgtaaaaaggaaaatcctcagacatattgtttgaaatttaaaaataccaagtttgaattttgactttctttagaattctttataacagctcatggtttatatttacacacacacacacaaattggcacattggtattttccatagaactagatgaacatctgcaaaaaggagtgaacattttgactagctacattaatgaacttcgaaccttcatgataaagtttccttggaagctaacagatgctatagatgaatatgatgtacatgaaaatgtccccaaagtaaaggagagcaatatatggaagaaactcagctttgaggtaagtacgaataatcatcacttcttttatttgccagattcagaaggtctgagaaaacaatagaaagaaacagaattcagactctatatacttgtgattcagaatgtttggcaaaggttttaggttttatcggtttggggatttctgattatgacttcaaatttatgtctacaagctccatttatttaattcgctataagggtaggctccctcttaatgctagatctgcccacttgggttcagtaacaaacacccaactctaaacccatgtgaagtggtactccttagcaatactccctcattggctcaagcctggtgctttggacacatgcattctgcctgactgga

SEQ ID NO: 374185 - DNA, 847 bp, Homo sapiens
ggggcaaaaggtaagggagaggaggccacaaatcacatggctggcactccctctgtcactgatttaattccatttgcttttcctggtgagacataattttcatgtgctgatgtgattttgattcctttctttttcaggatccagcaagtaggcaatgaagcctatgttatagggctctcctccttccacataccttcaataggagctgcatgtgtttgtttcttagaattgcttggccttgacagcctcaagctcagagttgatatgaaagtggccaatataattttgagctacaagtgcagaaatgaagatgctcagtacagctttatcagagagtctgtaggtacagcaccttttatctggcctgctttgtttagagaaggtgtgacgaggtctaaggcattgaattgtgagtgtttggggagaaaatggttatcttcttggttttatccttttcctgcagagtgtgtgttctttgtctcactttcttgggcactttaattgggttctgaaatggccctgagccacactattcaaacagaaatgctcaggttttgactttttctcttcaccatattttgttgtttatatttcttacagccgaaaaactatctaaactagctgatggtgaaaagacaaccacagaagaattgcttgttctcttagaagaaggtacatggaacagcattcagcaacaggaaataaagaggtttgtgagttgcagtctcagcctcttttctaacaagcttattgtgccaacctgtgtttgcctagtttttctttgaacaactctggtgttttcactaaatccccctagaccttatcttcttctttatctagcatgtag

SEQ ID NO: 374186 - DNA, 279 bp, Homo sapiens
ggtgcctaagcctgggcagagtgggcctctcttagataaaaccagcacctgtcttcacacctctctgtacaggacataagcagatgttcaacccaacagaggaaagccagacatttcttcagctgaccactctgtgtcaagaccgcacattggtaggcatgaagttgttggataagatttcctccgttccccatggggaactgtcttgcagtaagttattgacctttttcttacatattttggccctaaacaggtctcaaaaggtctcccagtctctcc

SEQ ID NO: 374187 - DNA, 7066 bp, Homo sapiens
ggaggctgagtatctcctgatcacttagttaattttatggggttttttctttctccctcatctgagttatagttctctgtctctacatttttgatgttgtggatggtacatatgtagctcatgtggatttagcacttcacaaagaagacatgtgtaatgagcagcaacaggagccagccaagatttcttcatttacttcactgaaagtttctcaagacctcgatgttgcagtgattgtcagctcctccaactccgcagttgctcttaacttaaatttgtatttcaggcaacacccaggacacctactgtgtgaaagaatactagaagatcttcctattcaaggacctaagggcgtagatgaagatgatcctgttaactctgcctacaacatgaaactggccaagttttccttccaaattgataggtcttggaaagcccagctatcatcattgaatgaaacaataaagaactccaaactggaggtttcctgttgtgctccatggttccaggatattttgcatttggagtcacctgaatctggtaaccacagtacaagtgtgcagagctgggccttcattccacaggacataatgcatgggcaatataatgttctacagaaagatcatgccaagaccagtgatccaggaagatcatggaaaataatgcacatcagtgaacaagaggaacccatagagcttaaatgtgtgtctgtgacaggattcactgcactgtttacttgggaagtggaaaggatgggctataccattaccctctgggatttggagacccagggcatgcagtgtttttcccttggcacaaagtgtattcctgtagacagtagtggagaccagcagctgtgctttgttttgacagagaatggactctctctgattttgtttggtttgactcaagaagagtttttaaacagactcatgatccatggaagtgccagcactgtggacactctttgtcatctcaatggctggggaaggtgctcaattcccatacatgcactagaggccgggatagaaaatcgtcagctggacacagtaaatttctttttgaagagcaaggaaaatctttttaatccatcctcaaaatcttctgtatctgatcagtttgatcacttgtcatcccatttatatttaagaaatgtggaagagctgataccagcattggatttactttgctcggcaattagagaaagttattctgaaccccaaagcaaacacttttcagaacaattgcttaatcttacactgtctttccttaacaaccaaataaaggagcttttcattcacactgaagaactagatgaacatctgcaaaaaggagtgaacattttgactagctacattaatgaacttcgaaccttcatgataaagtttccttggaagctaacagatgctatagatgaatatgatgtacatgaaaatgtccccaaagtaaaggagagcaatatatggaagaaactcagctttgaggaagttattgccagcgccattttaaacaacaaaataccagaggcacagactttcttcaggattgatagtcattctgctcaaaaacttgaggagcttattggcataggcctaaatttggtctttgacaatttaaaaaagaacaatataaaggaagcctctgaacttttgaagaatatggggtttgatgtaaaaggccaattgctcaagatctgcttctatacaactaataaaaatatacgtgactttttggttgaaattttaaaagaaaaaaattatttttctgaaaaagagaaaagaactatagacttcgtgcatcaagttgagaagctttatttgggacatttccaagaaaatatgcaaatccagtcatttcccaggtactggataaaggaacaagattttttcaagcacaagtctgttttggactcattcctgaaatatgattgtaaagatgaatttaacaaacaggaccatagaattgtgttaaattgggctctgtggtgggatcaactaacacaagaatccatccttctccccaggataagtccagaagaatacaaatcatattcccctgaagccctctggagatacctcacagctcgccatgattggttaaacattatcttatggattggagaatttcaaacccagcatagttatgcttcacttcagcagaacaaatggccccttctgactgttgatgttattaaccagaatacttcctgtaacaactacatgaggaatgaaattttagataagctggccaggaatggggtttttttggcatctgaactggaagactttgaatgcttcctcctaagactgagccgtattggaggtgtaatacaggataccctccctgttcaaaactacaagaccaaagaaggttgggatttccattctcaattcattctctattgtttggagcacagtctgcagcatcttctttatgtctaccttgactgttacaaatcccaaactgatcttccaggctagccttgcaaatgctcagattttgattcccaccaatcaggccagtgtaagcagtatgctattggaaggacataccctcctggcccttgctactacaatgtattctcctgggggtgtcagtcaggttgttcagaatgaagaaaatgaaaactgtttgaagaaagtggatccccagctattgaagatggcattaactccttaccccaagctaaaaactgctctcttcccacagtgcactcctcctagtgtcctgccatctgatattacaatctaccaccttattcagtcattatcaccctttgatcctagcagattgtttggctggcagtctgctaacacactagctataggagatgcatggagtcatctcccacatttctctagccctgacctggttaataaatatgctatagtggaacgtctgaattttgcttattatttacataatgggcggccatcatttgcatttggtacttttctggtccaggaattaatcaagagcaagactcccaagcagctgatccagcaagtaggcaatgaagcctatgttatagggctctcctccttccacataccttcaataggagctgcatgtgtttgtttcttagaattgcttggccttgacagcctcaagctcagagttgatatgaaagtggccaatataattttgagctacaagtgcagaaatgaagatgctcagtacagctttatcagagagtctgtagccgaaaaactatctaaactagctgatggtgaaaagacaaccacagaagaattgcttgttctcttagaagaaggtacatggaacagcattcagcaacaggaaataaagaggttatccagtgaatctagcagccaatgggcattagtggtgcagttctgcaggctacacaatatgaaactaagcatatcttaccttagagaatgtgccaaagcaaatgattggctgcagttcattattcacagccaactccacaactaccacccagcagaggtgaaatcccttatccagtacttcagcccagtcattcaagaccacttaaggctggcttttgagaacttgccctcagtgcccacctccaaaatggacagcgatcaagtctgcaataagtgcccccaggaacttcaaggaagcaaacaagagatgaccgatttatttgaaattctgctccaatgctcagaggagccagactcctggcactggcttctggttgaagcagtgaaacaacaggcccctatcctcagtgttctggcctcatgtctccagggtgccagtgccatttcttgtctctgtgtttggatcatcacttctgtggaggacaatgttgcaactgaagcaatgggacacattcaggactcaacagaggaccatacctggaaccttgaggatctttcagtcatctggagaacattattaacaagacaaaagagcaaaactctcatcagaggtttccagcttttctttaaggattccccgttactactggtgatggagatgtatgaactgtgtatgttcttcaggaattataaagaagctgaagctaaacttctggagtttcagaagagccttgaaacgcttaacacagcagccacaaaggtccaccctgtcatccctgccatgtggctggaggatcaggtgtgtttccttttgaagcttatgctacagcagtgtaagacccagtatgagctggggaagcttttacagctctttgttgaaagagagcatctcttctctgatggtccagatgtgaaaaagctttgcatcctttgccagattttgaaggatacatccatagccattaatcatacaattattaccagctacagcattgagaatcttcagcatgaatgtagatctatttggaaagactgcagacagatggacaattcgctttggccaggagggtagcagaattagctgagttacctgtggacaacttggttattaaagagataacacaggaaatgcagaccctaaaacacattgaacagtggtcactaaaacaagcaagaattgacttctggaaaaaatgccatgagaattttaagaaaaattcaatttcaagcaaagcagcttcttcctttttctcaacccaggcccatgtggcatgtgagcacccaactggatggagcagcatggaggagcgccatctgctgctcaccttggcagggcactggcttgcccaggaggacgtggtgcccttggataagctggaggagctggagaagcagatctggctgtgccgcatcacccagcacactcttggaagaaatcaggaggaaacagagcccagattttctcgacagatctcaactagtggtgaactttcctttgatagtttagccagtgagttttccttctccaagttggctgctctgaacacatcaaaatacttagaacttaacagccttccatccaaagagacatgcgagaatagattggattggaaagagcaggagtcactaaactttttgattgggcgcctactggatgatggctgtgtgcatgaagcaagtagagtatgccggtattttcatttttataatccagatgtcgccttggtattgcactgcagagcactggcctcaggggaagctagtatggaggatctgcacccagagatccatgctctcctacaaagtgctgagctgcttgaggaagaagcacccgacattcccctaaggagagtccacagcacttcaagtctggatagtcagaagtttgtgacagtgccctccagtaatgaagtggtaactaacctggaagtgctgacaagcaaatgcctccatgggaagaactactgtcgacaggtcctctgtctgtatgatcttgccaaggagttgggctgttcctacacagatgttgctgctcaggatggtgaagccatgctccggaaaatcttggcctctcagcagcctgaccgatgcaaacgagcccaggccttcatcagcacacagggccttaagccagatactgtggctgaactcgtggcagaagaggtgacacgggagctgcttacttcatcacagggaacaggacataagcagatgttcaacccaacagaggaaagccagacatttcttcagctgaccactctgtgtcaagaccgcacattggtaggcatgaagttgttggataagatttcctccgttccccatggggaactgtcttgcaccacagagctcctgatcctggcccatcattgcttcaccctgacgtgccacatggagggcatcatccgagtcctacaggccgcccacatgctcacagataaccacctggcccccagtgaggagtatgggctggtggtacggctcctcactggcattggaaggtacaacgagatgacatacatatttgatttgctgcataaaaagcactactttgaagtgctaatgaggaagaagttggatccgagtggtaccctgaaaacagccctgctggactacatcaaacgctgccgtcctggagacagtgaaaagcacaatatgattgccctgtgcttcagcatgtgccgggagattggcgagaaccacgaggcagctgcccgcatccaactgaaattgattgagtctcagccctgggaggacagcctcaaggatgggcaccagctgaaacaactgctgctgaaggccctgactctgatgttggatgcagcagagagttatgccaaggactcctgtgtgcgacaggcccagcactgtcagcggctcaccaagttgataactctgcagattcactttctgaacactggccagaacacaatgctcatcaacttgggccgccacaagctgatggactgtattctggccctacctcggttctaccaggcttctattgtggctgaggcctacgattttgttccagattgggctgaaattttataccagcaagtgattcttaaaggagactttaattacttggaagaatttaagcagcaaaggttattaaagtccagtatatttgaagagatttccaaaaaatataaacaacatcagcctactgacatggtcatggaaaacctgaagaaattactcacatattgtgaagatgtttacctgtattacaagttggcatacgaacacaagttttatgaaattgtaaatgtgcttctgaaggaccctcagacaggttgctgtctaaaggacatgctagcaggttagatgatttcataggtgtctgttttcttgtactgttagcagattctgacagatgtgatgagaagaagaatgcattggagatctttgctaaagttgaacaatcccggtactgtaccatatcagtcctttgtgggtagtaggtagcaagtaagaaacttttcaggaggaaattcctatttaaaatagattgattttagatgattgttcatccacaccattttatatagatactagtattaagatcaaaagcttcctcttcctcaggacagcttctactttagatgatccaataatgattaaagaatacctgtacctgcagattccagtttcaaagaaatttaattattatttacacagttaaggaacaggtgatacattttcatttgttagaaactgatctttctgtaataaaatagattttcaattca

SEQ ID NO: 374188 - DNA, 7446 bp, Homo sapiens
ggaggctgagtatctcctgatcacttagttaattttatggggttttttctttctccctcatctgagttatagttctctgtctctacatttttgatgttgtggatggtacatatgtagctcatgtggatttagcacttcacaaagaagacatgtgtaatgagcagcaacaggagccagccaagatttcttcatttacttcactgaaagtttctcaagacctcgatgttgcagtgattgtcagctcctccaactccgcagttgctcttaacttaaatttgtatttcaggcaacacccaggacacctactgtgtgaaagaatactagaagatcttcctattcaaggacctaagggcgtagatgaagatgatcctgttaactctgcctacaacatgaaactggccaagttttccttccaaattgataggtcttggaaagcccagctatcatcattgaatgaaacaataaagaactccaaactggaggtttcctgttgtgctccatggttccaggatattttgcatttggagtcacctgaatctggtaaccacagtacaagtgtgcagagctgggccttcattccacaggacataatgcatgggcaatataatgttctacagaaagatcatgccaagaccagtgatccaggaagatcatggaaaataatgcacatcagtgaacaagaggaacccatagagcttaaatgtgtgtctgtgacaggattcactgcactgtttacttgggaagtggaaaggatgggctataccattaccctctgggatttggagacccagggcatgcagtgtttttcccttggcacaaagtgtattcctgtagacagtagtggagaccagcagctgtgctttgttttgacagagaatggactctctctgattttgtttggtttgactcaagaagagtttttaaacagactcatgatccatggaagtgccagcactgtggacactctttgtcatctcaatggctggggaaggtgctcaattcccatacatgcactagaggccgggatagaaaatcgtcagctggacacagtaaatttctttttgaagagcaaggaaaatctttttaatccatcctcaaaatcttctgtatctgatcagtttgatcacttgtcatcccatttatatttaagaaatgtggaagagctgataccagcattggatttactttgctcggcaattagagaaagttattctgaaccccaaagcaaacacttttcagaacaattgcttaatcttacactgtctttccttaacaaccaaataaaggagcttttcattcacactgaagaactagatgaacatctgcaaaaaggagtgaacattttgactagctacattaatgaacttcgaaccttcatgataaagtttccttggaagctaacagatgctatagatgaatatgatgtacatgaaaatgtccccaaagtaaaggagagcaatatatggaagaaactcagctttgaggaagttattgccagcgccattttaaacaacaaaataccagaggcacagactttcttcaggattgatagtcattctgctcaaaaacttgaggagcttattggcataggcctaaatttggtctttgacaatttaaaaaagaacaatataaaggaagcctctgaacttttgaagaatatggggtttgatgtaaaaggccaattgctcaagatctgcttctatacaactaataaaaatatacgtgactttttggtaggtaaaggtgagactacatagtatacattttctagaaagcctgggtgaaaaacttggaagaaaaccttggaagaaaaaccttaagtaattttaatgttcaactaatatctaataagtaaaagtgtgacaaccccttcatctttttttccccttcatctttcttcaatgactattttacatttgtggcaaaagaaaatttgtgttaacatacattaactcaaatgttcaaaatataattcttgaatggcatattatctcatgactttttttaataatctttaattcccagcactaccttatttgataatctcatgacattttttgcaaaagtgcttgattttttgtaaagtcactgctttaattactttttattcaaggttgaaattttaaaagaaaaaaattatttttctgaaaaagagaaaagaactatagacttcgtgcatcaagttgagaagctttatttgggacatttccaagaaaatatgcaaatccagtcatttcccaggtactggataaaggaacaagattttttcaagcacaagtctgttttggactcattcctgaaatatgattgtaaagatgaatttaacaaacaggaccatagaattgtgttaaattgggctctgtggtgggatcaactaacacaagaatccatccttctccccaggataagtccagaagaatacaaatcatattcccctgaagccctctggagatacctcacagctcgccatgattggttaaacattatcttatggattggagaatttcaaacccagcatagttatgcttcacttcagcagaacaaatggccccttctgactgttgatgttattaaccagaatacttcctgtaacaactacatgaggaatgaaattttagataagctggccaggaatggggtttttttggcatctgaactggaagactttgaatgcttcctcctaagactgagccgtattggaggtgtaatacaggataccctccctgttcaaaactacaagaccaaagaaggttgggatttccattctcaattcattctctattgtttggagcacagtctgcagcatcttctttatgtctaccttgactgttacaaatcccaaactgatcttccaggctagccttgcaaatgctcagattttgattcccaccaatcaggccagtgtaagcagtatgctattggaaggacataccctcctggcccttgctactacaatgtattctcctgggggtgtcagtcaggttgttcagaatgaagaaaatgaaaactgtttgaagaaagtggatccccagctattgaagatggcattaactccttaccccaagctaaaaactgctctcttcccacagtgcactcctcctagtgtcctgccatctgatattacaatctaccaccttattcagtcattatcaccctttgatcctagcagattgtttggctggcagtctgctaacacactagctataggagatgcatggagtcatctcccacatttctctagccctgacctggttaataaatatgctatagtggaacgtctgaattttgcttattatttacataatgggcggccatcatttgcatttggtacttttctggtccaggaattaatcaagagcaagactcccaagcagctgatccagcaagtaggcaatgaagcctatgttatagggctctcctccttccacataccttcaataggagctgcatgtgtttgtttcttagaattgcttggccttgacagcctcaagctcagagttgatatgaaagtggccaatataattttgagctacaagtgcagaaatgaagatgctcagtacagctttatcagagagtctgtagccgaaaaactatctaaactagctgatggtgaaaagacaaccacagaagaattgcttgttctcttagaagaaggtacatggaacagcattcagcaacaggaaataaagaggttatccagtgaatctagcagccaatgggcattagtggtgcagttctgcaggctacacaatatgaaactaagcatatcttaccttagagaatgtgccaaagcaaatgattggctgcagttcattattcacagccaactccacaactaccacccagcagaggtgaaatcccttatccagtacttcagcccagtcattcaagaccacttaaggctggcttttgagaacttgccctcagtgcccacctccaaaatggacagcgatcaagtctgcaataagtgcccccaggaacttcaaggaagcaaacaagagatgaccgatttatttgaaattctgctccaatgctcagaggagccagactcctggcactggcttctggttgaagcagtgaaacaacaggcccctatcctcagtgttctggcctcatgtctccagggtgccagtgccatttcttgtctctgtgtttggatcatcacttctgtggaggacaatgttgcaactgaagcaatgggacacattcaggactcaacagaggaccatacctggaaccttgaggatctttcagtcatctggagaacattattaacaagacaaaagagcaaaactctcatcagaggtttccagcttttctttaaggattccccgttactactggtgatggagatgtatgaactgtgtatgttcttcaggaattataaagaagctgaagctaaacttctggagtttcagaagagccttgaaacgcttaacacagcagccacaaaggtccaccctgtcatccctgccatgtggctggaggatcaggtgtgtttccttttgaagcttatgctacagcagtgtaagacccagtatgagctggggaagcttttacagctctttgttgaaagagagcatctcttctctgatggtccagatgtgaaaaagctttgcatcctttgccagattttgaaggatacatccatagccattaatcatacaattattaccagctacagcattgagaatcttcagcatgaatgtagatctatttggaaagactgcagacagatggacaattcgctttggccaggagggtagcagaattagctgagttacctgtggacaacttggttattaaagagataacacaggaaatgcagaccctaaaacacattgaacagtggtcactaaaacaagcaagaattgacttctggaaaaaatgccatgagaattttaagaaaaattcaatttcaagcaaagcagcttcttcctttttctcaacccaggcccatgtggcatgtgagcacccaactggatggagcagcatggaggagcgccatctgctgctcaccttggcagggcactggcttgcccaggaggacgtggtgcccttggataagctggaggagctggagaagcagatctggctgtgccgcatcacccagcacactcttggaagaaatcaggaggaaacagagcccagattttctcgacagatctcaactagtggtgaactttcctttgatagtttagccagtgagttttccttctccaagttggctgctctgaacacatcaaaatacttagaacttaacagccttccatccaaagagacatgcgagaatagattggattggaaagagcaggagtcactaaactttttgattgggcgcctactggatgatggctgtgtgcatgaagcaagtagagtatgccggtattttcatttttataatccagatgtcgccttggtattgcactgcagagcactggcctcaggggaagctagtatggaggatctgcacccagagatccatgctctcctacaaagtgctgagctgcttgaggaagaagcacccgacattcccctaaggagagtccacagcacttcaagtctggatagtcagaagtttgtgacagtgccctccagtaatgaagtggtaactaacctggaagtgctgacaagcaaatgcctccatgggaagaactactgtcgacaggtcctctgtctgtatgatcttgccaaggagttgggctgttcctacacagatgttgctgctcaggatggtgaagccatgctccggaaaatcttggcctctcagcagcctgaccgatgcaaacgagcccaggccttcatcagcacacagggccttaagccagatactgtggctgaactcgtggcagaagaggtgacacgggagctgcttacttcatcacagggaacaggacataagcagatgttcaacccaacagaggaaagccagacatttcttcagctgaccactctgtgtcaagaccgcacattggtaggcatgaagttgttggataagatttcctccgttccccatggggaactgtcttgcaccacagagctcctgatcctggcccatcattgcttcaccctgacgtgccacatggagggcatcatccgagtcctacaggccgcccacatgctcacagataaccacctggcccccagtgaggagtatgggctggtggtacggctcctcactggcattggaaggtacaacgagatgacatacatatttgatttgctgcataaaaagcactactttgaagtgctaatgaggaagaagttggatccgagtggtaccctgaaaacagccctgctggactacatcaaacgctgccgtcctggagacagtgaaaagcacaatatgattgccctgtgcttcagcatgtgccgggagattggcgagaaccacgaggcagctgcccgcatccaactgaaattgattgagtctcagccctgggaggacagcctcaaggatgggcaccagctgaaacaactgctgctgaaggccctgactctgatgttggatgcagcagagagttatgccaaggactcctgtgtgcgacaggcccagcactgtcagcggctcaccaagttgataactctgcagattcactttctgaacactggccagaacacaatgctcatcaacttgggccgccacaagctgatggactgtattctggccctacctcggttctaccaggcttctattgtggctgaggcctacgattttgttccagattgggctgaaattttataccagcaagtgattcttaaaggagactttaattacttggaagaatttaagcagcaaaggttattaaagtccagtatatttgaagagatttccaaaaaatataaacaacatcagcctactgacatggtcatggaaaacctgaagaaattactcacatattgtgaagatgtttacctgtattacaagttggcatacgaacacaagttttatgaaattgtaaatgtgcttctgaaggaccctcagacaggttgctgtctaaaggacatgctagcaggttagatgatttcataggtgtctgttttcttgtactgttagcagattctgacagatgtgatgagaagaagaatgcattggagatctttgctaaagttgaacaatcccggtactgtaccatatcagtcctttgtgggtagtaggtagcaagtaagaaacttttcaggaggaaattcctatttaaaatagattgattttagatgattgttcatccacaccattttatatagatactagtattaagatcaaaagcttcctcttcctcaggacagcttctactttagatgatccaataatgattaaagaatacctgtacctgcagattccagtttcaaagaaatttaattattatttacacagttaaggaacaggtgatacattttcatttgttagaaactgatctttctgtaataaaatagattttcaattca

SEQ ID NO: 374189 - DNA, 8498 bp, Homo sapiens
  misc_feature (6358)..(6358): n is a, c, g, or t
  misc_feature (6363)..(6364): n is a, c, g, or t
  misc_feature (6426)..(6426): n is a, c, g, or t
  misc_feature (6428)..(6428): n is a, c, g, or t
  misc_feature (6497)..(6498): n is a, c, g, or t
  misc_feature (6504)..(6504): n is a, c, g, or t
  misc_feature (6611)..(6611): n is a, c, g, or t
  misc_feature (6623)..(6623): n is a, c, g, or t
  misc_feature (6652)..(6652): n is a, c, g, or t
  misc_feature (6691)..(6691): n is a, c, g, or t
  misc_feature (6711)..(6711): n is a, c, g, or t
  misc_feature (6755)..(6755): n is a, c, g, or t
ggaggctgagtatctcctgatcacttagttaattttatggggttttttctttctccctcatctgagttatagttctctgtctctacatttttgatgttgtggatggtacatatgtagctcatgtggatttagcacttcacaaagaagacatgtgtaatgagcagcaacaggagccagccaagatttcttcatttacttcactgaaagtttctcaagacctcgatgttgcagtgattgtcagctcctccaactccgcagttgctcttaacttaaatttgtatttcaggcaacacccaggacacctactgtgtgaaagaatactagaagatcttcctattcaaggacctaagggcgtagatgaagatgatcctgttaactctgcctacaacatgaaactggccaagttttccttccaaattgataggtcttggaaagcccagctatcatcattgaatgaaacaataaagaactccaaactggaggtttcctgttgtgctccatggttccaggatattttgcatttggagtcacctgaatctggtaaccacagtacaagtgtgcagagctgggccttcattccacaggacataatgcatgggcaatataatgttctacagaaagatcatgccaagaccagtgatccaggaagatcatggaaaataatgcacatcagtgaacaagaggaacccatagagcttaaatgtgtgtctgtgacaggattcactgcactgtttacttgggaagtggaaaggatgggctataccattaccctctgggatttggagacccagggcatgcagtgtttttcccttggcacaaagtgtattcctgtagacagtagtggagaccagcagctgtgctttgttttgacagagaatggactctctctgattttgtttggtttgactcaagaagagtttttaaacagactcatgatccatggaagtgccagcactgtggacactctttgtcatctcaatggctggggaaggtgctcaattcccatacatgcactagaggccgggatagaaaatcgtcagctggacacagtaaatttctttttgaagagcaaggaaaatctttttaatccatcctcaaaatcttctgtatctgatcagtttgatcacttgtcatcccatttatatttaagaaatgtggaagagctgataccagcattggatttactttgctcggcaattagagaaagttattctgaaccccaaagcaaacacttttcagaacaattgcttaatcttacactgtctttccttaacaaccaaataaaggagcttttcattcacactgaagaactagatgaacatctgcaaaaaggagtgaacattttgactagctacattaatgaacttcgaaccttcatgataaagtttccttggaagctaacagatgctatagatgaatatgatgtacatgaaaatgtccccaaagtaaaggagagcaatatatggaagaaactcagctttgaggaagttattgccagcgccattttaaacaacaaaataccagaggcacagactttcttcaggattgatagtcattctgctcaaaaacttgaggagcttattggcataggcctaaatttggtctttgacaatttaaaaaagaacaatataaaggaagcctctgaacttttgaagaatatggggtttgatgtaaaaggccaattgctcaagatctgcttctatacaactaataaaaatatacgtgactttttggttgaaattttaaaagaaaaaaattatttttctgaaaaagagaaaagaactatagacttcgtgcatcaagttgagaagctttatttgggacatttccaagaaaatatgcaaatccagtcatttcccaggtactggataaaggaacaagattttttcaagcacaagtctgttttggactcattcctgaaatatgattgtaaagatgaatttaacaaacaggaccatagaattgtgttaaattgggctctgtggtgggatcaactaacacaagaatccatccttctccccaggataagtccagaagaatacaaatcatattcccctgaagccctctggagatacctcacagctcgccatgattggttaaacattatcttatggattggagaatttcaaacccagcatagttatgcttcacttcagcagaacaaatggccccttctgactgttgatgttattaaccagaatacttcctgtaacaactacatgaggaatgaaattttagataagctggccaggaatggggtttttttggcatctgaactggaagactttgaatgcttcctcctaagactgagccgtattggaggtgtaatacaggataccctccctgttcaaaactacaagaccaaagaaggttgggatttccattctcaattcattctctattgtttggagcacagtctgcagcatcttctttatgtctaccttgactgttacaaacttagtcctgaaaattgtccctttttggaaaaaaaagagttacatgaagcacacccttggtttgaatttttagttcagtgtcgacaagttgccagtaacttaacagatcccaaactgatcttccaggctagccttgcaaatgctcagattttgattcccaccaatcaggccagtgtaagcagtatgctattggaaggacataccctcctggcccttgctactacaatgtattctcctgggggtgtcagtcaggttgttcagaatgaagaaaatgaaaactgtttgaagaaagtggatccccagctattgaagatggcattaactccttaccccaagctaaaaactgctctcttcccacagtgcactcctcctagtgtcctgccatctgatattacaatctaccaccttattcagtcattatcaccctttgatcctagcagattgtttggctggcagtctgctaacacactagctataggagatgcatggagtcatctcccacatttctctagccctgacctggttaataaatatgctatagtggaacgtctgaattttgcttattatttacataatgggcggccatcatttgcatttggtacttttctggtccaggaattaatcaagagcaagactcccaagcagctgatccagcaagtaggcaatgaagcctatgttatagggctctcctccttccacataccttcaataggagctgcatgtgtttgtttcttagaattgcttggccttgacagcctcaagctcagagttgatatgaaagtggccaatataattttgagctacaagtgcagaaatgaagatgctcagtacagctttatcagagagtctgtagccgaaaaactatctaaactagctgatggtgaaaagacaaccacagaagaattgcttgttctcttagaagaaggtacatggaacagcattcagcaacaggaaataaagaggttatccagtgaatctagcagccaatgggcattagtggtgcagttctgcaggctacacaatatgaaactaagcatatcttaccttagagaatgtgccaaagcaaatgattggctgcagttcattattcacagccaactccacaactaccacccagcagaggtgaaatcccttatccagtacttcagcccagtcattcaagaccacttaaggctggcttttgagaacttgccctcagtgcccacctccaaaatggacagcgatcaagtctgcaataagtgcccccaggaacttcaaggaagcaaacaagagatgaccgatttatttgaaattctgctccaatgctcagaggagccagactcctggcactggcttctggttgaagcagtgaaacaacaggcccctatcctcagtgttctggcctcatgtctccagggtgccagtgccatttcttgtctctgtgtttggatcatcacttctgtggaggacaatgttgcaactgaagcaatgggacacattcaggactcaacagaggaccatacctggaaccttgaggatctttcagtcatctggagaacattattaacaagacaaaagagcaaaactctcatcagaggtttccagcttttctttaaggattccccgttactactggtgatggagatgtatgaactgtgtatgttcttcaggaattataaagaagctgaagctaaacttctggagtttcagaagagccttgaaacgcttaacacagcagccacaaaggtccaccctgtcatccctgccatgtggctggaggatcaggtgtgtttccttttgaagcttatgctacagcagtgtaagacccagtatgagctggggaagcttttacagctctttgttgaaagagagcatctcttctctgatggtccagatgtgaaaaagctttgcatcctttgccagattttgaaggatacatccatagccattaatcatacaattattaccagctacagcattgagaatcttcagcatgaatgtagatctatttggaaagactgcagacagatggacaattcgctttggccaggagggtagcagaattagctgagttacctgtggacaacttggttattaaagagataacacaggaaatgcagaccctaaaacacattgaacagtggtcactaaaacaagcaagaattgacttctggaaaaaatgccatgagaattttaagaaaaattcaatttcaagcaaagcagcttcttcctttttctcaacccaggcccatgtggcatgtgagcacccaactggatggagcagcatggaggagcgccatctgctgctcaccttggcagggcactggcttgcccaggaggacgtggtgcccttggataagctggaggagctggagaagcagatctggctgtgccgcatcacccagcacactcttggaagaaatcaggaggaaacagagcccagattttctcgacagatctcaactagtggtgaactttcctttgatagtttagccagtgagttttccttctccaagttggctgctctgaacacatcaaaatacttagaacttaacagccttccatccaaagagacatgcgagaatagattggattggaaagagcaggagtcactaaactttttgattgggcgcctactggatgatggctgtgtgcatgaagcaagtagagtatgccggtattttcatttttataatccagatgtcgccttggtattgcactgcagagcactggcctcaggggaagctagtatggaggatctgcacccagagatccatgctctcctacaaagtgctgagctgcttgaggaagaagcacccgacattcccctaaggagagtccacagcacttcaagtctggatagtcagaagtttgtgacagtgccctccagtaatgaagtggtaactaacctggaagtgctgacaagcaaatgcctccatgggaagaactactgtcgacaggtcctctgtctgtatgatcttgccaaggagttgggctgttcctacacagatgttgctgctcaggatggtgaagccatgctccggaaaatcttggcctctcagcagcctgaccgatgcaaacgagcccaggccttcatcagcacacagggccttaagccagatactgtggctgaactcgtggcagaagaggtgacacgggagctgcttacttcatcacagggaacaggacataagcagatgttcaacccaacagaggaaagccagacatttcttcagctgaccactctgtgtcaagaccgcacattggtaggcatgaagttgttggataagatttcctccgttccccatggggaactgtcttgcaccacagagctcctgatcctggcccatcattgcttcaccctgacgtgccacatggagggcatcatccgagtcctacaggccgcccacatgctcacagataaccacctggcccccagtgaggagtatgggctggtggtacggctcctcactggcattggaaggtacaacgagatgacatacatatttgatttgctgcataaaaagcactactttgaagtgctaatgaggaagaagttggatccgagtggtaccctgaaaacagccctgctggactacatcaaacgctgccgtcctggagacagtgaaaagcacaatatgattgccctgtgcttcagcatgtgccgggagattggcgagaaccacgaggcagctgcccgcatccaactgaaattgattgagtctcagccctggggtgagtgaggtcacagccacactaccagaacagtgctgctagctaggtaaaattccttttttttttttttttttgagacagagtctcgctctgtccccaggctggagtgcagtggcacgatctcagctccctgcaacctccgcctcccaggttcaagtgattctcccgcctcagcctcccaagtagcngggannacaagcacctgccaccacacccggctaattttttgtatttttaatagagatggggtttgacnangttggccaggctggtcttgaactcctgacctggtgaactgcccacgttggcctcccaaagtgctgggannacaggngtgagccaccatgcccggccctcgataaaattcttacagcaaaggacaagagcccatgagatgggctattagaatcttgaggtaggtggcccggcacagtggctcangcctgtaatccnagcactttgggaggccaaggtaggtggantgcctgagctcaggagttcaacaccagcctgggcaacanggtgcaatcctgtctctacnaaaatacaaaaaaaaaatagccaggtgtggcggcatgcacctgnaatcccaactacttgggaggctgaagcaggtggatcacttgaacccgggaggcggaggttgcagtgagccaagatcgcgcccattgcactccagcgtaggtgacagagtgtgactccatctcaaaaaaagaatgttgaggtgggtatgtcgctcagcaggacccccacttgggcagacagatggaatggagactttgaaggcatgtgcaatttaggattgtactcttggatctatagcctatatatccagggtatcatccaccaggaaccaacatgcacgttgataccatgtaagccttccttgatgttttggagaaatgaggcattagaaggggcactgaatcctactgcggagtgaagttacaataagcgtatgcatttctggcccaataacctttatctgagtgaggtgttcctgcctgcctgtgaacatggctgggatgtttctattctagccacgatcacaatgagtgggatgagaacagtgagctttgggagtcagactcggcaaatcttctttatttcccctacagaggacagcctcaaggatgggcaccagctgaaacaactgctgctgaaggccctgactctgatgttggatgcagcagagagttatgccaaggtaacccaaaggcttttttcagactggccttgggacttgctgtctgcagtaaaattattttcttttgtccttgggctctttccaggtgaagcgggagggcatcataggccaaccaggaacagaaggggtgaataccgttgtgagggttcacacaggaggtgacaactaggtctttctctactgtgcctctccacccttgttcctcaggactcctgtgtgcgacaggcccagcactgtcagcggctcaccaagttgataactctgcagattcactttctgaacactggccagaacacaatgctcatcaacttgggccgccacaagctgatggactgtattctggccctacctcggttctaccaggcttctattgtggctgaggcctacgattttgttccagattgggctgaaattttataccagcaagtgattcttaaaggagactttaattacttggaagaatttaagcagcaaaggttattaaagtccagtatatttgaagagatttccaaaaaatataaacaacatcagcctactgacatggtcatggaaaacctgaagaaattactcacatattgtgaagatgtttacctgtattacaagttggcatacgaacacaagttttatgaaattgtaaatgtgcttctgaaggaccctcagacaggttgctgtctaaaggacatgctagcaggttagatgatttcataggtgtctgttttcttgtactgttagcagattctgacagatgtgatgagaagaagaatgcattggagatctttgctaaagttgaacaatcccggtactgtaccatatcagtcctttgtgggtagtaggtagcaagtaagaaacttttcaggaggaaattcctatttaaaatagattgattttagatgattgttcatccacaccattttatatagatactagtattaagatcaaaagcttcctcttcctcaggacagcttctactttagatgatccaataatgattaaagaatacctgtacctgcagattccagtttcaaagaaatttaattattatttacacagttaaggaacaggtgatacattttcatttgttagaaactgatctttctgtaataaaatagattttcaattca

SEQ ID NO: 374190 - DNA, 7551 bp, Homo sapiens
  misc_feature (7511)..(7511): n is a, c, g, or t
ggaggctgagtatctcctgatcacttagttaattttatggggttttttctttctccctcatctgagttatagttctctgtctctacatttttgatgttgtggatggtacatatgtagctcatgtggatttagcacttcacaaagaagacatgtgtaatgagcagcaacaggagccagccaagatttcttcatttacttcactgaaagtttctcaagacctcgatgttgcagtgattgtcagctcctccaactccgcagttgctcttaacttaaatttgtatttcaggcaacacccaggacacctactgtgtgaaagaatactagaagatcttcctattcaaggacctaagggcgtagatgaagatgatcctgttaactctgcctacaacatgaaactggccaagttttccttccaaattgataggtcttggaaagcccagctatcatcattgaatgaaacaataaagaactccaaactggaggtttcctgttgtgctccatggttccaggatattttgcatttggagtcacctgaatctggtaaccacagtacaagtgtgcagagctgggccttcattccacaggacataatgcatgggcaatataatgttctacagaaagatcatgccaagaccagtgatccaggaagatcatggaaaataatgcacatcagtgaacaagaggaacccatagagcttaaatgtgtgtctgtgacaggattcactgcactgtttacttgggaagtggaaaggatgggctataccattaccctctgggatttggagacccagggcatgcagtgtttttcccttggcacaaagtgtattcctgtagacagtagtggagaccagcagctgtgctttgttttgacagagaatggactctctctgattttgtttggtttgactcaagaagagtttttaaacagactcatgatccatggaagtgccagcactgtggacactctttgtcatctcaatggctggggaaggtgctcaattcccatacatgcactagaggccgggatagaaaatcgtcagctggacacagtaaatttctttttgaagagcaaggaaaatctttttaatccatcctcaaaatcttctgtatctgatcagtttgatcacttgtcatcccatttatatttaagaaatgtggaagagctgataccagcattggatttactttgctcggcaattagagaaagttattctgaaccccaaagcaaacacttttcagaacaattgcttaatcttacactgtctttccttaacaaccaaataaaggagcttttcattcacactgaagaactagatgaacatctgcaaaaaggagtgaacattttgactagctacattaatgaacttcgaaccttcatgataaagtttccttggaagctaacagatgctatagatgaatatgatgtacatgaaaatgtccccaaagtaaaggagagcaatatatggaagaaactcagctttgaggaagttattgccagcgccattttaaacaacaaaataccagaggcacagactttcttcaggattgatagtcattctgctcaaaaacttgaggagcttattggcataggcctaaatttggtctttgacaatttaaaaaagaacaatataaaggaagcctctgaacttttgaagaatatggggtttgatgtaaaaggccaattgctcaagatctgcttctatacaactaataaaaatatacgtgactttttggtaggtaaaggtgagactacatagtatacattttctagaaagcctgggtgaaaaacttggaagaaaaccttggaagaaaaaccttaagtaattttaatgttcaactaatatctaataagtaaaagtgtgacaaccccttcatctttttttccccttcatctttcttcaatgactattttacatttgtggcaaaagaaaatttgtgttaacatacattaactcaaatgttcaaaatataattcttgaatggcatattatctcatgactttttttaataatctttaattcccagcactaccttatttgataatctcatgacattttttgcaaaagtgcttgattttttgtaaagtcactgctttaattactttttattcaaggttgaaattttaaaagaaaaaaattatttttctgaaaaagagaaaagaactatagacttcgtgcatcaagttgagaagctttatttgggacatttccaagaaaatatgcaaatccagtcatttcccaggtactggataaaggaacaagattttttcaagcacaagtctgttttggactcattcctgaaatatgattgtaaagatgaatttaacaaacaggaccatagaattgtgttaaattgggctctgtggtgggatcaactaacacaagaatccatccttctccccaggataagtccagaagaatacaaatcatattcccctgaagccctctggagatacctcacagctcgccatgattggttaaacattatcttatggattggagaatttcaaacccagcatagttatgcttcacttcagcagaacaaatggccccttctgactgttgatgttattaaccagaatacttcctgtaacaactacatgaggaatgaaattttagataagctggccaggaatggggtttttttggcatctgaactggaagactttgaatgcttcctcctaagactgagccgtattggaggtgtaatacaggataccctccctgttcaaaactacaagaccaaagaaggttgggatttccattctcaattcattctctattgtttggagcacagtctgcagcatcttctttatgtctaccttgactgttacaaacttagtcctgaaaattgtccctttttggaaaaaaaagagttacatgaagcacacccttggtttgaatttttagttcagtgtcgacaagttgccagtaacttaacagatcccaaactgatcttccaggctagccttgcaaatgctcagattttgattcccaccaatcaggccagtgtaagcagtatgctattggaaggacataccctcctggcccttgctactacaatgtattctcctgggggtgtcagtcaggttgttcagaatgaagaaaatgaaaactgtttgaagaaagtggatccccagctattgaagatggcattaactccttaccccaagctaaaaactgctctcttcccacagtgcactcctcctagtgtcctgccatctgatattacaatctaccaccttattcagtcattatcaccctttgatcctagcagattgtttggctggcagtctgctaacacactagctataggagatgcatggagtcatctcccacatttctctagccctgacctggttaataaatatgctatagtggaacgtctgaattttgcttattatttacataatgggcggccatcatttgcatttggtacttttctggtccaggaattaatcaagagcaagactcccaagcagctgatccagcaagtaggcaatgaagcctatgttatagggctctcctccttccacataccttcaataggagctgcatgtgtttgtttcttagaattgcttggccttgacagcctcaagctcagagttgatatgaaagtggccaatataattttgagctacaagtgcagaaatgaagatgctcagtacagctttatcagagagtctgtagccgaaaaactatctaaactagctgatggtgaaaagacaaccacagaagaattgcttgttctcttagaagaaggtacatggaacagcattcagcaacaggaaataaagaggttatccagtgaatctagcagccaatgggcattagtggtgcagttctgcaggctacacaatatgaaactaagcatatcttaccttagagaatgtgccaaagcaaatgattggctgcagttcattattcacagccaactccacaactaccacccagcagaggtgaaatcccttatccagtacttcagcccagtcattcaagaccacttaaggctggcttttgagaacttgccctcagtgcccacctccaaaatggacagcgatcaagtctgcaataagtgcccccaggaacttcaaggaagcaaacaagagatgaccgatttatttgaaattctgctccaatgctcagaggagccagactcctggcactggcttctggttgaagcagtgaaacaacaggcccctatcctcagtgttctggcctcatgtctccagggtgccagtgccatttcttgtctctgtgtttggatcatcacttctgtggaggacaatgttgcaactgaagcaatgggacacattcaggactcaacagaggaccatacctggaaccttgaggatctttcagtcatctggagaacattattaacaagacaaaagagcaaaactctcatcagaggtttccagcttttctttaaggattccccgttactactggtgatggagatgtatgaactgtgtatgttcttcaggaattataaagaagctgaagctaaacttctggagtttcagaagagccttgaaacgcttaacacagcagccacaaaggtccaccctgtcatccctgccatgtggctggaggatcaggtgtgtttccttttgaagcttatgctacagcagtgtaagacccagtatgagctggggaagcttttacagctctttgttgaaagagagcatctcttctctgatggtccagatgtgaaaaagctttgcatcctttgccagattttgaaggatacatccatagccattaatcatacaattattaccagctacagcattgagaatcttcagcatgaatgtagatctatttggaaagactgcagacagatggacaattcgctttggccaggagggtagcagaattagctgagttacctgtggacaacttggttattaaagagataacacaggaaatgcagaccctaaaacacattgaacagtggtcactaaaacaagcaagaattgacttctggaaaaaatgccatgagaattttaagaaaaattcaatttcaagcaaagcagcttcttcctttttctcaacccaggcccatgtggcatgtgagcacccaactggatggagcagcatggaggagcgccatctgctgctcaccttggcagggcactggcttgcccaggaggacgtggtgcccttggataagctggaggagctggagaagcagatctggctgtgccgcatcacccagcacactcttggaagaaatcaggaggaaacagagcccagattttctcgacagatctcaactagtggtgaactttcctttgatagtttagccagtgagttttccttctccaagttggctgctctgaacacatcaaaatacttagaacttaacagccttccatccaaagagacatgcgagaatagattggattggaaagagcaggagtcactaaactttttgattgggcgcctactggatgatggctgtgtgcatgaagcaagtagagtatgccggtattttcatttttataatccagatgtcgccttggtattgcactgcagagcactggcctcaggggaagctagtatggaggatctgcacccagagatccatgctctcctacaaagtgctgagctgcttgaggaagaagcacccgacattcccctaaggagagtccacagcacttcaagtctggatagtcagaagtttgtgacagtgccctccagtaatgaagtggtaactaacctggaagtgctgacaagcaaatgcctccatgggaagaactactgtcgacaggtcctctgtctgtatgatcttgccaaggagttgggctgttcctacacagatgttgctgctcaggatggtgaagccatgctccggaaaatcttggcctctcagcagcctgaccgatgcaaacgagcccaggccttcatcagcacacagggccttaagccagatactgtggctgaactcgtggcagaagaggtgacacgggagctgcttacttcatcacagggaacaggacataagcagatgttcaacccaacagaggaaagccagacatttcttcagctgaccactctgtgtcaagaccgcacattggtaggcatgaagttgttggataagatttcctccgttccccatggggaactgtcttgcaccacagagctcctgatcctggcccatcattgcttcaccctgacgtgccacatggagggcatcatccgagtcctacaggccgcccacatgctcacagataaccacctggcccccagtgaggagtatgggctggtggtacggctcctcactggcattggaaggtacaacgagatgacatacatatttgatttgctgcataaaaagcactactttgaagtgctaatgaggaagaagttggatccgagtggtaccctgaaaacagccctgctggactacatcaaacgctgccgtcctggagacagtgaaaagcacaatatgattgccctgtgcttcagcatgtgccgggagattggcgagaaccacgaggcagctgcccgcatccaactgaaattgattgagtctcagccctgggaggacagcctcaaggatgggcaccagctgaaacaactgctgctgaaggccctgactctgatgttggatgcagcagagagttatgccaaggactcctgtgtgcgacaggcccagcactgtcagcggctcaccaagttgataactctgcagattcactttctgaacactggccagaacacaatgctcatcaacttgggccgccacaagctgatggactgtattctggccctacctcggttctaccaggcttctattgtggctgaggcctacgattttgttccagattgggctgaaattttataccagcaagtgattcttaaaggagactttaattacttggaagaatttaagcagcaaaggttattaaagtccagtatatttgaagagatttccaaaaaatataaacaacatcagcctactgacatggtcatggaaaacctgaagaaattactcacatattgtgaagatgtttacctgtattacaagttggcatacgaacacaagttttatgaaattgtaaatgtgcttctgaaggaccctcagacaggttgctgtctaaaggacatgctagcaggttagatgatttcataggtgtctgttttcttgtactgttagcagattctgacagatgtgatgagaagaagaatgcattggagatctttgctaaagttgaacaatcccggtactgtaccatatcagtcctttgtgggtagtaggtagcaagtaagaaacttttcaggaggaaattcctatttaaaatagattgattttagatgattgttcatccacaccattttatatagatactagtattaagatcaaaagcttcctcttcctcaggacagcttctactttagatgatccaataatgattaaagaatacctgtacctgcagattccagtttcaaagaaatttaattattatttacacagttaaggaacaggtgatacattttccttanctgtgtaaagtagtagtagccgcgaatttatgtagtagta

SEQ ID NO: 374191 - DNA, 7959 bp, Homo sapiens
ggaggctgagtatctcctgatcacttagttaattttatggggttttttctttctccctcatctgagttatagttctctgtctctacatttttgatgttgtggatggtacatatgtagctcatgtggatttagcacttcacaaagaagacatgtgtaatgagcagcaacaggagccagccaagatttcttcatttacttcactgaaagtttctcaagacctcgatgttgcagtgattgtcagctcctccaactccgcagttgctcttaacttaaatttgtatttcaggcaacacccaggacacctactgtgtgaaagaatactagaagatcttcctattcaaggacctaagggcgtagatgaagatgatcctgttaactctgcctacaacatgaaactggccaagttttccttccaaattgataggtcttggaaagcccagctatcatcattgaatgaaacaataaagaactccaaactggaggtttcctgttgtgctccatggttccaggatattttgcatttggagtcacctgaatctggtaaccacagtacaagtgtgcagagctgggccttcattccacaggacataatgcatgggcaatataatgttctacagaaagatcatgccaagaccagtgatccaggaagatcatggaaaataatgcacatcagtgaacaagaggaacccatagagcttaaatgtgtgtctgtgacaggattcactgcactgtttacttgggaagtggaaaggatgggctataccattaccctctgggatttggagacccagggcatgcagtgtttttcccttggcacaaagtgtattcctgtagacagtagtggagaccagcagctgtgctttgttttgacagagaatggactctctctgattttgtttggtttgactcaagaagagtttttaaacagactcatgatccatggaagtgccagcactgtggacactctttgtcatctcaatggctggggaaggtgctcaattcccatacatgcactagaggccgggatagaaaatcgtcagctggacacagtaaatttctttttgaagagcaaggaaaatctttttaatccatcctcaaaatcttctgtatctgatcagtttgatcacttgtcatcccatttatatttaagaaatgtggaagagctgataccagcattggatttactttgctcggcaattagagaaagttattctgaaccccaaagcaaacacttttcagaacaattgcttaatcttacactgtctttccttaacaaccaaataaaggagcttttcattcacactgaagaactagatgaacatctgcaaaaaggagtgaacattttgactagctacattaatgaacttcgaaccttcatgataaagtttccttggaagctaacagatgctatagatgaatatgatgtacatgaaaatgtccccaaagtaaaggagagcaatatatggaagaaactcagctttgaggaagttattgccagcgccattttaaacaacaaaataccagaggcacagactttcttcaggattgatagtcattctgctcaaaaacttgaggagcttattggcataggcctaaatttggtctttgacaatttaaaaaagaacaatataaaggaagcctctgaacttttgaagaatatggggtttgatgtaaaaggccaattgctcaagatctgcttctatacaactaataaaaatatacgtgactttttggtaggtaaaggtgagactacatagtatacattttctagaaagcctgggtgaaaaacttggaagaaaaccttggaagaaaaaccttaagtaattttaatgttcaactaatatctaataagtaaaagtgtgacaaccccttcatctttttttccccttcatctttcttcaatgactattttacatttgtggcaaaagaaaatttgtgttaacatacattaactcaaatgttcaaaatataattcttgaatggcatattatctcatgactttttttaataatctttaattcccagcactaccttatttgataatctcatgacattttttgcaaaagtgcttgattttttgtaaagtcactgctttaattactttttattcaaggttgaaattttaaaagaaaaaaattatttttctgaaaaagagaaaagaactatagacttcgtgcatcaagttgagaagctttatttgggacatttccaagaaaatatgcaaatccagtcatttcccaggtactggataaaggaacaagattttttcaagcacaagtctgttttggactcattcctgaaatatgattgtaaagatgaatttaacaaacaggaccatagaattgtgttaaattgggctctgtggtgggatcaactaacacaagaatccatccttctccccaggataagtccagaagaatacaaatcatattcccctgaagccctctggagatacctcacagctcgccatgattggttaaacattatcttatggattggagaatttcaaacccagcatagttatgcttcacttcagcagaacaaatggccccttctgactgttgatgttattaaccagaatacttcctgtaacaactacatgaggaatgaaattttagataagctggccaggaatggggtttttttggcatctgaactggaagactttgaatgcttcctcctaagactgagccgtattggaggtgtaatacaggataccctccctgttcaaaactacaagaccaaagaaggttgggatttccattctcaattcattctctattgtttggagcacagtctgcagcatcttctttatgtctaccttgactgttacaaacttagtcctgaaaattgtccctttttggaaaaaaaagagttacatgaagcacacccttggtttgaatttttagttcagtgtcgacaagttgccagtaacttaacagatcccaaactgatcttccaggctagccttgcaaatgctcagattttgattcccaccaatcaggccagtgtaagcagtatgctattggaaggacataccctcctggcccttgctactacaatgtattctcctgggggtgtcagtcaggttgttcagaatgaagaaaatgaaaactgtttgaagaaagtggatccccagctattgaagatggcattaactccttaccccaagctaaaaactgctctcttcccacagtgcactcctcctagtgtcctgccatctgatattacaatctaccaccttattcagtcattatcaccctttgatcctagcagattgtttggctggcagtctgctaacacactagctataggagatgcatggagtcatctcccacatttctctagccctgacctggttaataaatatgctatagtggaacgtctgaattttgcttattatttacataatgggcggccatcatttgcatttggtacttttctggtccaggaattaatcaagagcaagactcccaagcagctgatccagcaagtaggcaatgaagcctatgttatagggctctcctccttccacataccttcaataggagctgcatgtgtttgtttcttagaattgcttggccttgacagcctcaagctcagagttgatatgaaagtggccaatataattttgagctacaagtgcagaaatgaagatgctcagtacagctttatcagagagtctgtagccgaaaaactatctaaactagctgatggtgaaaagacaaccacagaagaattgcttgttctcttagaagaaggtacatggaacagcattcagcaacaggaaataaagaggttatccagtgaatctagcagccaatgggcattagtggtgcagttctgcaggctacacaatatgaaactaagcatatcttaccttagagaatgtgccaaagcaaatgattggctgcagttcattattcacagccaactccacaactaccacccagcagaggtgaaatcccttatccagtacttcagcccagtcattcaagaccacttaaggctggcttttgagaacttgccctcagtgcccacctccaaaatggacagcgatcaagtctgcaataagtgcccccaggaacttcaaggaagcaaacaagagatgaccgatttatttgaaattctgctccaatgctcagaggagccagactcctggcactggcttctggttgaagcagtgaaacaacaggcccctatcctcagtgttctggcctcatgtctccagggtgccagtgccatttcttgtctctgtgtttggatcatcacttctgtggaggacaatgttgcaactgaagcaatgggacacattcaggactcaacagaggaccatacctggaaccttgaggatctttcagtcatctggagaacattattaacaagacaaaagagcaaaactctcatcagaggtttccagcttttctttaaggattccccgttactactggtgatggagatgtatgaactgtgtatgttcttcaggaattataaagaagctgaagctaaacttctggagtttcagaagagccttgaaacgcttaacacagcagccacaaaggtccaccctgtcatccctgccatgtggctggaggatcaggtgtgtttccttttgaagcttatgctacagcagtgtaagacccagtatgagctggggaagcttttacagctctttgttgaaagagagcatctcttctctgatggtccagatgtgaaaaagctttgcatcctttgccagattttgaaggatacatccatagccattaatcatacaattattaccagctacagcattgagaatcttcagcatgaatgtagatctatttggaaagactgcagacagatggacaattcgctttggccaggagggtagcagaattagctgagttacctgtggacaacttggttattaaagagataacacaggaaatgcagaccctaaaacacattgaacagtggtcactaaaacaagcaagaattgacttctggaaaaaatgccatgagaattttaagaaaaattcaatttcaagcaaagcagcttcttcctttttctcaacccaggcccatgtggcatgtgagcacccaactggatggagcagcatggaggagcgccatctgctgctcaccttggcagggcactggcttgcccaggaggacgtggtgcccttggataagctggaggagctggagaagcagatctggctgtgccgcatcacccagcacactcttggaagaaatcaggaggaaacagagcccagattttctcgacagatctcaactagtggtgaactttcctttgatagtttagccagtgagttttccttctccaagttggctgctctgaacacatcaaaatacttagaacttaacagccttccatccaaagagacatgcgagaatagattggattggaaagagcaggagtcactaaactttttgattgggcgcctactggatgatggctgtgtgcatgaagcaagtagagtatgccggtattttcatttttataatccagatgtcgccttggtattgcactgcagagcactggcctcaggggaagctagtatggaggatctgcacccagagatccatgctctcctacaaagtgctgagctgcttgaggaagaagcacccgacattcccctaaggagagtccacagcacttcaagtctggatagtcagaagtttgtgacagtgccctccagtaatgaagtggtaactaacctggaagtgctgacaagcaaatgcctccatgggaagaactactgtcgacaggtcctctgtctgtatgatcttgccaaggagttgggctgttcctacacagatgttgctgctcaggatggtgaagccatgctccggaaaatcttggcctctcagcagcctgaccgatgcaaacgagcccaggccttcatcagcacacagggccttaagccagatactgtggctgaactcgtggcagaagaggtgacacgggagctgcttacttcatcacagggaacaggacataagcagatgttcaacccaacagaggaaagccagacatttcttcagctgaccactctgtgtcaagaccgcacattggtaggcatgaagttgttggataagatttcctccgttccccatggggaactgtcttgcaccacagagctcctgatcctggcccatcattgcttcaccctgacgtgccacatggagggcatcatccgagtcctacaggccgcccacatgctcacagataaccacctggcccccagtgaggagtatgggctggtggtacggctcctcactggcattggaaggtacaacgagatgacatacatatttgatttgctgcataaaaagcactactttgaagtgctaatgaggaagaagttggatccgagtggtaccctgaaaacagccctgctggactacatcaaacgctgccgtcctggagacagtgaaaagcacaatatgattgccctgtgcttcagcatgtgccgggagattggcgagaaccacgaggcagctgcccgcatccaactgaaattgattgagtctcagccctgggaggacagcctcaaggatgggcaccagctgaaacaactgctgctgaaggccctgactctgatgttggatgcagcagagagttatgccaaggactcctgtgtgcgacaggcccagcactgtcagcggctcaccaagttgataactctgcagattcactttctgaacactggccagaacacaatgctcatcaacttgggccgccacaagctgatggactgtattctggccctacctcggttctaccaggcttctattgtggctgaggcctacgattttgttccagattgggctgaaattttataccagcaagtgattcttaaaggagactttaattacttggaagaatttaagcagcaaaggttattaaagtccagtatatttgaagagatttccaaaaagtaagtattaaaagttgactgtaaacattgctccttgcctctgctttgaggtgagacaagtgtaagaattttatggctaagtacaccatgcctttagattacctctacttaaaatggcaaagcagtatcaagaatccttagaaggaagtcttttaacagatttatgcaaagagatcaacaagaacagtttgctcatagtgctttgtactttaaaatgggaggatagctactcagtgccaaaaacctaaaacactggccaggcccagtggctcatgcctgtaatcccagcactatgggaggccgaggcgggaggatcacttgaggtcaggagtttgagaccagccttgccaacatggtgaaaccctgtctctactaaaaatacaaaaattagctgggtgtggtagctggcacctgtagtcccagctactcgggaggctgaggcaggagaatcacttgaacctggggacagaggctgcagtaagctgagatcgtgccactatactccagcctggcaacagagtgtgactcttgtctcaaaaaaagaaacgaaaaacactaaaacatcagaggtgccttttggagtactaaacttactctataaggtaagcattaacatactcatttttaaagaaatattttatcaagcacccctaatactagtctgagataacccagactccagcaccctctcctctataggtaatagtaagtggtacttcagagctgacagccctcactcaaaatacagtatcctaaggtgggcacagtggtgcacacttgtagtcctagttactcgggaggctgcaagagaagcagctgagcccaggagttcacactctgaaaaaccactgtactccagcctgggcaacacagtgagacctccatcttttatttaagagagaaaaaaaagggcagccacagtgactcacgcctgtaatcccagcactttgggaggccaaggcaggcaggtaacttgaggcccggagttcaacaccagcctagccaacatagc

SEQ ID NO: 374192 - DNA, 6815 bp, Homo sapiens
ggaggctgagtatctcctgatcacttagttaattttatggggttttttctttctccctcatctgagttatagttctctgtctctacatttttgatgttgtggatggtacatatgtagctcatgtggatttagcacttcacaaagaagacatgtgtaatgagcagcaacaggagccagccaagatttcttcatttacttcactgaaagtttctcaagacctcgatgttgcagtgattgtcagctcctccaactccgcagttgctcttaacttaaatttgtatttcaggcaacacccaggacacctactgtgtgaaagaatactagaagatcttcctattcaaggacctaagggcgtagatgaagatgatcctgttaactctgcctacaacatgaaactggccaagttttccttccaaattgataggtcttggaaagcccagctatcatcattgaatgaaacaataaagaactccaaactggaggtttcctgttgtgctccatggttccaggatattttgcatttggagtcacctgaatctggtaaccacagtacaagtgtgcagagctgggccttcattccacaggacataatgcatgggcaatataatgttctacagaaagatcatgccaagaccagtgatccaggaagatcatggaaaataatgcacatcagtgaacaagaggaacccatagagcttaaatgtgtgtctgtgacaggattcactgcactgtttacttgggaagtggaaaggatgggctataccattaccctctgggatttggagacccagggcatgcagtgtttttcccttggcacaaagtgtattcctgtagacagtagtggagaccagcagctgtgctttgttttgacagagaatggactctctctgattttgtttggtttgactcaagaagagtttttaaacagactcatgatccatggaagtgccagcactgtggacactctttgtcatctcaatggctggggaaggtgctcaattcccatacatgcactagaggccgggatagaaaatcgtcagctggacacagtaaatttctttttgaagagcaaggaaaatctttttaatccatcctcaaaatcttctgtatctgatcagtttgatcacttgtcatcccatttatatttaagaaatgtggaagagctgataccagcattggatttactttgctcggcaattagagaaagttattctgaaccccaaagcaaacacttttcagaacaattgcttaatcttacactgtctttccttaacaaccaaataaaggagcttttcattcacactgaagaactagatgaacatctgcaaaaaggagtgaacattttgactagctacattaatgaacttcgaaccttcatgataaagtttccttggaagctaacagatgctatagatgaatatgatgtacatgaaaatgtccccaaagtaaaggagagcaatatatggaagaaactcagctttgaggaagttattgccagcgccattttaaacaacaaaataccagaggcacagactttcttcaggattgatagtcattctgctcaaaaacttgaggagcttattggcataggcctaaatttggtctttgacaatttaaaaaagaacaatataaaggaagcctctgaacttttgaagaatatggggtttgatgtaaaaggccaattgctcaagatctgcttctatacaactaataaaaatatacgtgactttttggtaggtaaaggtgagactacatagtatacattttctagaaagcctgggtgaaaaacttggaagaaaaccttggaagaaaaaccttaagtaattttaatgttcaactaatatctaataagtaaaagtgtgacaaccccttcatctttttttccccttcatctttcttcaatgactattttacatttgtggcaaaagaaaatttgtgttaacatacattaactcaaatgttcaaaatataattcttgaatggcatattatctcatgactttttttaataatctttaattcccagcactaccttatttgataatctcatgacattttttgcaaaagtgcttgattttttgtaaagtcactgctttaattactttttattcaaggttgaaattttaaaagaaaaaaattatttttctgaaaaagagaaaagaactatagacttcgtgcatcaagttgagaagctttatttgggacatttccaagaaaatatgcaaatccagtcatttcccaggtactggataaaggaacaagattttttcaagcacaagtctgttttggactcattcctgaaatatgattgtaaagatgaatttaacaaacaggaccatagaattgtgttaaattgggctctgtggtgggatcaactaacacaagaatccatccttctccccaggataagtccagaagaatacaaatcatattcccctgaagccctctggagatacctcacagctcgccatgattggttaaacattatcttatggattggagaatttcaaacccagcatagttatgcttcacttcagcagaacaaatggccccttctgactgttgatgttattaaccagaatacttcctgtaacaactacatgaggaatgaaattttagataagctggccaggaatggggtttttttggcatctgaactggaagactttgaatgcttcctcctaagactgagccgtattggaggtgtaatacaggataccctccctgttcaaaactacaagaccaaagaaggttgggatttccattctcaattcattctctattgtttggagcacagtctgcagcatcttctttatgtctaccttgactgttacaaacttagtcctgaaaattgtccctttttggaaaaaaaagagttacatgaagcacacccttggtttgaatttttagttcagtgtcgacaagttgccagtaacttaacagatcccaaactgatcttccaggctagccttgcaaatgctcagattttgattcccaccaatcaggccagtgtaagcagtatgctattggaaggacataccctcctggcccttgctactacaatgtattctcctgggggtgtcagtcaggttgttcagaatgaagaaaatgaaaactgtttgaagaaagtggatccccagctattgaagatggcattaactccttaccccaagctaaaaactgctctcttcccacagtgcactcctcctagtgtcctgccatctgatattacaatctaccaccttattcagtcattatcaccctttgatcctagcagattgtttggctggcagtctgctaacacactagctataggagatgcatggagtcatctcccacatttctctagccctgacctggttaataaatatgctatagtggaacgtctgaattttgcttattatttacataatgggcggccatcatttgcatttggtacttttctggtccaggaattaatcaagagcaagactcccaagcagctgatccagcaagtaggcaatgaagcctatgttatagggctctcctccttccacataccttcaataggagctgcatgtgtttgtttcttagaattgcttggccttgacagcctcaagctcagagttgatatgaaagtggccaatataattttgagctacaagtgcagaaatgaagatgctcagtacagctttatcagagagtctgtagccgaaaaactatctaaactagctgatggtgaaaagacaaccacagaagaattgcttgttctcttagaagaaggtacatggaacagcattcagcaacaggaaataaagaggttatccagtgaatctagcagccaatgggcattagtggtgcagttctgcaggctacacaatatgaaactaagcatatcttaccttagagaatgtgccaaagcaaatgattggctgcagttcattattcacagccaactccacaactaccacccagcagaggtgaaatcccttatccagtacttcagcccagtcattcaagaccacttaaggctggcttttgagaacttgccctcagtgcccacctccaaaatggacagcgatcaagtctgcaataagtgcccccaggaacttcaaggaagcaaacaagagatgaccgatttatttgaaattctgctccaatgctcagaggagccagactcctggcactggcttctggttgaagcagtgaaacaacaggcccctatcctcagtgttctggcctcatgtctccagggtgccagtgccatttcttgtctctgtgtttggatcatcacttctgtggaggacaatgttgcaactgaagcaatgggacacattcaggactcaacagaggaccatacctggaaccttgaggatctttcagtcatctggagaacattattaacaagacaaaagagcaaaactctcatcagaggtttccagcttttctttaaggattccccgttactactggtgatggagatgtatgaactgtgtatgttcttcaggaattataaagaagctgaagctaaacttctggagtttcagaagagccttgaaacgcttaacacagcagccacaaaggtccaccctgtcatccctgccatgtggctggaggatcaggtgtgtttccttttgaagcttatgctacagcagtgtaagacccagtatgagctggggaagcttttacagctctttgttgaaagagagcatctcttctctgatggtccagatgtgaaaaagctttgcatcctttgccagattttgaaggatacatccatagccattaatcatacaattattaccagctacagcattgagaatcttcagcatgaatgtagatctatttggaaagactgcagacagatggacaattcgctttggccaggagggtagcagaattagctgagttacctgtggacaacttggttattaaagagataacacaggaaatgcagaccctaaaacacattgaacagtggtcactaaaacaagcaagaattgacttctggaaaaaatgccatgagaattttaagaaaaattcaatttcaagcaaagcagcttcttcctttttctcaacccaggcccatgtggcatgtgagcacccaactggatggagcagcatggaggagcgccatctgctgctcaccttggcagggcactggcttgcccaggaggacgtggtgcccttggataagctggaggagctggagaagcagatctggctgtgccgcatcacccagcacactcttggaagaaatcaggaggaaacagagcccagattttctcgacagatctcaactagtggtgaactttcctttgatagtttagccagtgagttttccttctccaagttggctgctctgaacacatcaaaatacttagaacttaacagccttccatccaaagagacatgcgagaatagattggattggaaagagcaggagtcactaaactttttgattgggcgcctactggatgatggctgtgtgcatgaagcaagtagagtatgccggtattttcatttttataatccagatgtcgccttggtattgcactgcagagcactggcctcaggggaagctagtatggaggatctgcacccagagatccatgctctcctacaaagtgctgagctgcttgaggaagaagcacccgacattcccctaaggagagtccacagcacttcaagtctggatagtcagaagtttgtgacagtgccctccagtaatgaagtggtaactaacctggaagtgctgacaagcaaatgcctccatgggaagaactactgtcgacaggtcctctgtctgtatgatcttgccaaggagttgggctgttcctacacagatgttgctgctcaggatggtgaagccatgctccggaaaatcttggcctctcagcagcctgaccgatgcaaacgagcccaggccttcatcagcacacagggccttaagccagatactgtggctgaactcgtggcagaagaggtgacacgggagctgcttacttcatcacagggaacaggacataagcagatgttcaacccaacagaggaaagccagacatttcttcagctgaccactctgtgtcaagaccgcacattggtaggcatgaagttgttggataagatttcctccgttccccatggggaactgtcttgcaccacagagctcctgatcctggcccatcattgcttcaccctgacgtgccacatggagggcatcatccgagtcctacaggccgcccacatgctcacagataaccacctggcccccagtgaggagtatgggctggtggtacggctcctcactggcattggaaggtacaacgagatgacatacatatttgatttgctgcataaaaagcactactttgaagtgctaatgaggaagaagttggatccgagtggtaccctgaaaacagccctgctggactacatcaaacgctgccgtcctggagacagtgaaaagcacaatatgattgccctgtgcttcagcatgtgccgggagattggcgagaaccacgaggcagctgcccgcatccaactgaaattgattgagtctcagccctggggtgagtgaggtcacagccacactaccagaacagtgctgctagctaggtaaaattccttttttttttttttttttttttttttttttttttttttttttttttttttttttttttttttttttttttttttttttttttttttttttttttttttttattccagtttcaaagaaatttaattattatttacacagttaaggaacaggtgatacattttcatttgttagaaactgatctttctgtaataaaatagattttcaattca

SEQ ID NO: 374193 - DNA, 5710 bp, Homo sapiens
ggaggctgagtatctcctgatcacttagttaattttatggggttttttctttctccctcatctgagttatagttctctgtctctacatttttgatgttgtggatggtacatatgtagctcatgtggatttagcacttcacaaagaagacatgtgtaatgagcagcaacaggagccagccaagatttcttcatttacttcactgaaagtttctcaagacctcgatgttgcagtgattgtcagctcctccaactccgcagttgctcttaacttaaatttgtatttcaggcaacacccaggacacctactgtgtgaaagaatactagaagatcttcctattcaaggacctaagggcgtagatgaagatgatcctgttaactctgcctacaacatgaaactggccaagttttccttccaaattgataggtcttggaaagcccagctatcatcattgaatgaaacaataaagaactccaaactggaggtttcctgttgtgctccatggttccaggatattttgcatttggagtcacctgaatctggtaaccacagtacaagtgtgcagagctgggccttcattccacaggacataatgcatgggcaatataatgttctacagaaagatcatgccaagaccagtgatccaggaagatcatggaaaataatgcacatcagtgaacaagaggaacccatagagcttaaatgtgtgtctgtgacaggattcactgcactgtttacttgggaagtggaaaggatgggctataccattaccctctgggatttggagacccagggcatgcagtgtttttcccttggcacaaagtgtattcctgtagacagtagtggagaccagcagctgtgctttgttttgacagagaatggactctctctgattttgtttggtttgactcaagaagagtttttaaacagactcatgatccatggaagtgccagcactgtggacactctttgtcatctcaatggctggggaaggtgctcaattcccatacatgcactagaggccgggatagaaaatcgtcagctggacacagtaaatttctttttgaagagcaaggaaaatctttttaatccatcctcaaaatcttctgtatctgatcagtttgatcacttgtcatcccatttatatttaagaaatgtggaagagctgataccagcattggatttactttgctcggcaattagagaaagttattctgaaccccaaagcaaacacttttcagaacaattgcttaatcttacactgtctttccttaacaaccaaataaaggagcttttcattcacactgaagaactagatgaacatctgcaaaaaggagtgaacattttgactagctacattaatgaacttcgaaccttcatgataaagtttccttggaagctaacagatgctatagatgaatatgatgtacatgaaaatgtccccaaagtaaaggagagcaatatatggaagaaactcagctttgaggaagttattgccagcgccattttaaacaacaaaataccagaggcacagactttcttcaggattgatagtcattctgctcaaaaacttgaggagcttattggcataggcctaaatttggtctttgacaatttaaaaaagaacaatataaaggaagcctctgaacttttgaagaatatggggtttgatgtaaaaggccaattgctcaagatctgcttctatacaactaataaaaatatacgtgactttttggtaggtaaaggtgagactacatagtatacattttctagaaagcctgggtgaaaaacttggaagaaaaccttggaagaaaaaccttaagtaattttaatgttcaactaatatctaataagtaaaagtgtgacaaccccttcatctttttttccccttcatctttcttcaatgactattttacatttgtggcaaaagaaaatttgtgttaacatacattaactcaaatgttcaaaatataattcttgaatggcatattatctcatgactttttttaataatctttaattcccagcactaccttatttgataatctcatgacattttttgcaaaagtgcttgattttttgtaaagtcactgctttaattactttttattcaaggttgaaattttaaaagaaaaaaattatttttctgaaaaagagaaaagaactatagacttcgtgcatcaagttgagaagctttatttgggacatttccaagaaaatatgcaaatccagtcatttcccaggtactggataaaggaacaagattttttcaagcacaagtctgttttggactcattcctgaaatatgattgtaaagatgaatttaacaaacaggaccatagaattgtgttaaattgggctctgtggtgggatcaactaacacaagaatccatccttctccccaggataagtccagaagaatacaaatcatattcccctgaagccctctggagatacctcacagctcgccatgattggttaaacattatcttatggattggagaatttcaaacccagcatagttatgcttcacttcagcagaacaaatggccccttctgactgttgatgttattaaccagaatacttcctgtaacaactacatgaggaatgaaattttagataagctggccaggaatggggtttttttggcatctgaactggaagactttgaatgcttcctcctaagactgagccgtattggaggtgtaatacaggataccctccctgttcaaaactacaagaccaaagaaggttgggatttccattctcaattcattctctattgtttggagcacagtctgcagcatcttctttatgtctaccttgactgttacaaacttagtcctgaaaattgtccctttttggaaaaaaaagagttacatgaagcacacccttggtttgaatttttagttcagtgtcgacaagttgccagtaacttaacagatcccaaactgatcttccaggctagccttgcaaatgctcagattttgattcccaccaatcaggccagtgtaagcagtatgctattggaaggacataccctcctggcccttgctactacaatgtattctcctgggggtgtcagtcaggttgttcagaatgaagaaaatgaaaactgtttgaagaaagtggatccccagctattgaagatggcattaactccttaccccaagctaaaaactgctctcttcccacagtgcactcctcctagtgtcctgccatctgatattacaatctaccaccttattcagtcattatcaccctttgatcctagcagattgtttggctggcagtctgctaacacactagctataggagatgcatggagtcatctcccacatttctctagccctgacctggttaataaatatgctatagtggaacgtctgaattttgcttattatttacataatgggcggccatcatttgcatttggtacttttctggtccaggaattaatcaagagcaagactcccaagcagctgatccagcaagtaggcaatgaagcctatgttatagggctctcctccttccacataccttcaataggagctgcatgtgtttgtttcttagaattgcttggccttgacagcctcaagctcagagttgatatgaaagtggccaatataattttgagctacaagtgcagaaatgaagatgctcagtacagctttatcagagagtctgtagccgaaaaactatctaaactagctgatggtgaaaagacaaccacagaagaattgcttgttctcttagaagaaggtacatggaacagcattcagcaacaggaaataaagaggttatccagtgaatctagcagccaatgggcattagtggtgcagttctgcaggctacacaatatgaaactaagcatatcttaccttagagaatgtgccaaagcaaatgattggctgcagttcattattcacagccaactccacaactaccacccagcagaggtgaaatcccttatccagtacttcagcccagtcattcaagaccacttaaggctggcttttgagaacttgccctcagtgcccacctccaaaatggacagcgatcaagtctgcaataagtgcccccaggaacttcaaggaagcaaacaagagatgaccgatttatttgaaattctgctccaatgctcagaggagccagactcctggcactggcttctggttgaagcagtgaaacaacaggcccctatcctcagtgttctggcctcatgtctccagggtgccagtgccatttcttgtctctgtgtttggatcatcacttctgtggaggacaatgttgcaactgaagcaatgggacacattcaggactcaacagaggaccatacctggaaccttgaggatctttcagtcatctggagaacattattaacaagacaaaagagcaaaactctcatcagaggtttccagcttttctttaaggattccccgttactactggtgatggagatgtatgaactgtgtatgttcttcaggaattataaagaagctgaagctaaacttctggagtttcagaagagccttgaaacgcttaacacagcagccacaaaggtccaccctgtcatccctgccatgtggctggaggatcaggtgtgtttccttttgaagcttatgctacagcagtgtaagacccagtatgagctggggaagcttttacagctctttgttgaaagagagcatctcttctctgatggtccagatgtgaaaaagctttgcatcctttgccagattttgaaggatacatccatagccattaatcatacaattattaccagctacagcattgagaatcttcagcatgaatgtagatctatttggaaagactgcagacagatggacaattcgctttggccaggagggtagcagaattagctgagttacctgtggacaacttggttattaaagagataacacaggaaatgcagaccctaaaacacattgaacagtggtcactaaaacaagcaagaattgacttctggaaaaaatgccatgagaattttaagaaaaattcaatttcaagcaaagcagcttcttcctttttctcaacccaggcccatgtggcatgtgagcacccaactggatggagcagcatggaggagcgccatctgctgctcaccttggcagggcactggcttgcccaggaggacgtggtgcccttggataagctggaggagctggagaagcagatctggctgtgccgcatcacccagcacactcttggaagaaatcaggaggaaacagagcccagattttctcgacagatctcaactagtggtgaactttcctttgatagtttagccagtgagttttccttctccaagttggctgctctgaacacatcaaaatacttagaacttaacagccttccatccaaagagacatgcgagaatagattggattggaaagagcaggagtcactaaactttttgattgggcgcctactggatgatggctgtgtgcatgaagcaagtagagtatgccggtattttcatttttataatccagatgtcgccttggtattgcactgcagagcactggcctcaggggaagctagtatggaggatctgcacccagagatccatgctctcctacaaagtgctgagctgcttgagtggcatgctgcccaaatgtcccaaaggagagcgcccagccgtaagtagaggaactcagttgggcatgactctaagcgcacctcggggg

SEQ ID NO: 374194 - DNA, 2489 bp, Homo sapiens
ggaggctgagtatctcctgatcacttagttaattttatggggttttttctttctccctcatctgagttatagttctctgtctctacatttttgatgttgtggatggtacatatgtagctcatgtggatttagcacttcacaaagaagacatgtgtaatgagcagcaacaggagccagccaagatttcttcatttacttcactgaaagtttctcaagacctcgatgttgcagtgattgtcagctcctccaactccgcagttgctcttaacttaaatttgtatttcaggcaacacccaggacacctactgtgtgaaagaatactagaagatcttcctattcaaggacctaagggcgtagatgaagatgatcctgttaactctgcctacaacatgaaactggccaagttttccttccaaattgataggtcttggaaagcccagctatcatcattgaatgaaacaataaagaactccaaactggaggtttcctgttgtgctccatggttccaggatattttgcatttggagtcacctgaatctggtaaccacagtacaagtgtgcagagctgggccttcattccacaggacataatgcatgggcaatataatgttctacagaaagatcatgccaagaccagtgatccaggaagatcatggaaaataatgcacatcagtgaacaagaggaacccatagagcttaaatgtgtgtctgtgacaggattcactgcactgtttacttgggaagtggaaaggatgggctataccattaccctctgggatttggagacccagggcatgcagtgtttttcccttggcacaaagtgtattcctgtagacagtagtggagaccagcagctgtgctttgttttgacagagaatggactctctctgattttgtttggtttgactcaagaagagtttttaaacagactcatgatccatggaagtgccagcactgtggacactctttgtcatctcaatggctggggaaggtgctcaattcccatacatgcactagaggccgggatagaaaatcgtcagctggacacagtaaatttctttttgaagagcaaggaaaatctttttaatccatcctcaaaatcttctgtatctgatcagtttgatcacttgtcatcccatttatatttaagaaatgtggaagagctgataccagcattggatttactttgctcggcaattagagaaagttattctgaaccccaaagcaaacacttttcagaacaattgcttaatcttacactgtctttccttaacaaccaaataaaggagcttttcattcacactgaagaactagatgaacatctgcaaaaaggagtgaacattttgactagctacattaatgaacttcgaaccttcatgataaagtttccttggaagctaacagatgctatagatgaatatgatgtacatgaaaatgtccccaaagtaaaggagagcaatatatggaagaaactcagctttgaggaagttattgccagcgccattttaaacaacaaaataccagaggcacagactttcttcaggattgatagtcattctgctcaaaaacttgaggagcttattggcataggcctaaatttggtctttgacaatttaaaaaagaacaatataaaggaagcctctgaacttttgaagaatatggggtttgatgtaaaaggccaattgctcaagatctgcttctatacaactaataaaaatatacgtgactttttggtaggtaaaggtgagactacatagtatacattttctagaaagcctgggtgaaaaacttggaagaaaaccttggaagaaaaaccttaagtaattttaatgttcaactaatatctaataagtaaaagtgtgacaaccccttcatctttttttccccttcatctttcttcaatgactattttacatttgtggcaaaagaaaatttgtgttaacatacattaactcaaatgttcaaaatataattcttgaatggcatattatctcatgactttttttaataatctttaattcccagcactaccttatttgataatctcatgacattttttgcaaaagtgcttgattttttgtaaagtcactgctttaattactttttattcaaggttgaaattttaaaagaaaaaaattatttttctgaaaaagagaaaagaactatagacttcgtgcatcaagttgagaagctttatttgggacatttccaagaaaatatgcaaatccagtcatttcccaggtagtctcattagtcctcttttgataatattagaataccgttagatagtatttcatttatagttgttagtgaacacaagtttcttatgtggaactgagcctgcattctccttggagataaaacttgtatcagacagaagggactcgagagttttctgtcattttaatatttgcataatcagaattatgtgttccccaaaagagtggatgttcttgagcagataaaaaggaatgatgcctttttctcca

SEQ ID NO: 374195 - DNA, 1189 bp, Homo sapiens
ggaggctgagtatctcctgatcacttagttaattttatggggttttttctttctccctcatctgagttatagttctctgtctctacatttttgatgttgtggatggtacatatgtagctcatgtggatttagcacttcacaaagaagacatgtgtaatgagcagcaacaggagccagccaagatttcttcatttacttcactgaaagtttctcaagacctcgatgttgcagtgattgtcagctcctccaactccgcagttgctcttaacttaaatttgtatttcaggcaacacccaggacacctactgtgtgaaagaatactagaagatcttcctattcaaggacctaagggcgtagatgaagatgatcctgttaactctgcctacaacatgaaactggccaagttttccttccaaattgataggtcttggaaagcccagctatcatcattgaatgaaacaataaagaactccaaactggaggtttcctgttgtgctccatggttccaggatattttgcatttggagtcacctgaatctggtaaccacagtacaagtgtgcagagctgggccttcattccacaggacataatgcatgggcaatataatgttctacagaaagatcatgccaagaccagtgatccaggaagatcatggaaaataatgcacatcagtgaacaagaggaacccatagagcttaaatgtgtgtctgtgacaggattcactgcactgtttacttgggaagtggaaaggatgggctataccattaccctctgggatttggagacccagggcatgcagtgtttttcccttggcacaaagtgtattcctgtagacagtagtggagaccagcagctgtgctttgttttgacagagaatggactctctctgattttgtttggtttgactcaagaagagtttttaaacagactcatgatccatggaagtgccagcactgtggacactctttgtcatctcaatggctggggaaggtgctcaattcccatacatgcactagaggccgggatagaaaatcgtcagctggacacagtaaatttctttttgaagagcaaggaaaatctttttaatccatcctcaaaatcttctgtatctgatcagtttgatcacttgtcatcccatttatatttaagaagtaagtggaataaagatttctacatttgtatttatca

SEQ ID NO: 374196 - DNA, 2424 bp, Homo sapiens
gcccagcggctgggcctgagcgtcgagactcggggccgaggcggaggagcggccgccgcgccggggcccagccggagccgccgccctcgcccttgcctttgcctgcgcggctcagaatcaccatccgcggcgcgggagacgagccggccgtcccgggccgggggacccgcccgccatggccaccaaggctcgggttatgtatgattttgctgctgaacctggaaataatgaactgacggttaatgaaggagaaatcatcacaatcacaaatccggatgtaggtggaggatggctggaaggaagaaacatcaaaggagaacgagggctggttcccacagactacgttgaaattttacccagtgatggaaaagatcaattttcttgtggaaattcagtggctgaccaagccttccttgattctctctcagccagcacagctcaggccagttcgtcggctgccagcaacaatcaccaggttggcagtggcaatgacccctggtcagcctggagtgcctccaaatctgggaactgggaaagctcagaaggctggggggcccagccagagggggctggagcccaaagaaacacaaacactcccaacaactgggacactgccttcggccacccccaggcctaccaaggaccagcaactggtgatgatgatgactgggatgaagactgggatgggcccaaatcctcttcctactttaaggattcagagtcagctgatgcaggcggcgctcagcgaggaaacagtcgtgctagttcctcatccatgaaaattccccttaacaaatttcctggatttgcgaaacctggcacggaacagtatttgttggccaaacaactagcaaaacccaaagagaaaattcccatcattgttggagattatggcccaatgtgggtttatcctacctctacttttgactgtgtggtagcagatcccaggaaaggctccaaaatgtatggtctaaagagctacatcgaatatcagctaacacctactaacactaatcgatctgtaaaccacaggtataagcactttgactggttatatgagcgtctcctggttaagtttgggtcagccattccaatcccttctcttccagacaaacaagtcacaggccgctttgaagaggaatttatcaaaatgcgcatggagagacttcaggcctggatgaccaggatgtgtcgccatccagtaatctcagaaagtgaagttttccagcagttcctaaatttccgagatgagaaggaatggaaaactggaaagaggaaggccgagagagatgagctggcgggagtcatgatattttccaccatggaaccagaggcacctgacttggacttagtagaaatagagcagaagtgcgaggctgtggggaagttcaccaaggccatggatgacggcgtgaaggagctgctgacggtggggcaggagcactggaagcgctgcacgggcccattacccaaggaatatcagaagataggaaaggccttgcagagtttggccacagtgttcagttccagtggctatcaaggtgaaacagatctcaatgatgcaataacagaagcaggaaagacttatgaagaaattgccagtctcgtggcagaacagccaaagaaagatctccatttcctgatggaatgtaatcacgagtataaaggttttcttggctgcttccctgacatcattggcactcacaagggagcaatagaaaaagtgaaagaaagtgacaaactagttgcaacaagtaaaatcaccctacaagacaaacagaacatggtgaagagagtcagcatcatgtcttacgcgttgcaagctgagatgaatcactttcacagtaaccggatctatgattacaacagtgtcatccgcctgtacctggagcagcaagtgcaattttacgaaacgattgcagaaaagctgaggcaggccctcagccgctttccagtgatgtaggacagaacgggccttgaagagaatgccgcgtgctttctcctgacttggggcaatgcaattcaaaactttttttcccctattattcagaaaaaaaaggaaacaaaaccaaaaagaaagagttgcaaaaaactgcatttattttattagccaccctaaatgcgtcagttatttagggatggtcttttgttcatttccgcatccattatttaaaccagtggaaattgtctctatttttggaaagtacttaaaagttaccagaattttcaatggaaaatgaggggtttctccccactgatattttacatagagtcataatttatatgtcttataaattataagtcttatataatttataagtctcccacaatcttccagttcttacccagtgtcagataattaattactaattactttcttaaaaacatgaactatgccagaataaaaaatatctatgtttgtat

SEQ ID NO: 374197 - DNA, 513 bp, Homo sapiens
gcccagcggctgggcctgagcgtcgagactcggggccgaggcggaggagcggccgccgcgccggggcccagccggagccgccgccctcgcccttgcctttgcctgcgcggctcagaatcaccatccgcggcgcgggagacgagccggccgtcccgggccgggggacccgcccgccatggccaccaaggctcgggttatgtatgattttgctgctgaacctggaaataatgaactgacggttaatgaaggagaaatcatcacaatcacaaatccggatgtaggtggaggatggctggaaggaagaaacatcaaaggagaacgagggctggttcccacagactacgttgaaattttacccagtgatggaaaagatcaattttcttgtggaaattcagtggctgaccaagccttccttgattctctctcagccagcacagctcaggccagttcgtcggctgccagcaacaatcaccaggtacgtctcacttcctccttctggatgtggctggcttt

SEQ ID NO: 374198 - DNA, 345 bp, Homo sapiens
gtgagctggaccccgcggttatgtcttacgcgttgcaagctgagatgaatcactttcacagtaaccggatctatgattacaacagtgtcatccgcctgtacctggagcagcaagtgcaattttacgaaacgattgcagaaaagctgaggcaggccctcagccgctttccagtgatgtaggacagaaccgcggccgcggttatgtcttacgtactgcctttatgtgagcggtttcatgtgtcgccgtctcttgctaacgtgttgtcatttacgatcgcttttgcgagcatcacgtttttacacgttgttgtcggggaattggcaccgaagacgcttgcaagcgttt

SEQ ID NO: 374199 - DNA, 3662 bp, Homo sapiens
gcccagcggctgggcctgagcgtcgagactcggggccgaggcggaggagcggccgccgcgccggggcccagccggagccgccgccctcgcccttgcctttgcctgcgcggctcagaatcaccatccgcggcgcgggagacgagccggccgtcccgggccgggggacccgcccgccatggccaccaaggctcgggttatgtatgattttgctgctgaacctggaaataatgaactgacggttaatgaaggagaaatcatcacaatcacaaatccggatgtaggtggaggatggctggaaggaagaaacatcaaaggagaacgagggctggttcccacagactacgttgaaattttacccagtgatggaaaagatcaattttcttgtggaaattcagtggctgaccaagccttccttgattctctctcagccagcacagctcaggccagttcgtcggctgccagcaacaatcaccaggttggcagtggcaatgacccctggtcagcctggagtgcctccaaatctgggaactgggaaagctcagaaggctggggggcccagccagagggggctggagcccaaagaaacacaaacactcccaacaactgggacactgccttcggccacccccaggcctaccaaggaccagcaactggtgatgatgatgactgggatgaagactgggatgggcccaaatcctcttcctactttaaggattcagagtcagctgatgcaggcggcgctcagcgaggaaacagtcgtgctagttcctcatccatgaaaattccccttaacaaatttcctggatttgcgaaacctggcacggaacagtatttgttggccaaacaactagcaaaacccaaagagaaaattcccatcattgttggagattatggcccaatgtgggtttatcctacctctacttttgactgtgtggtagcagatcccaggaaaggctccaaaatgtatggtctaaagagctacatcgaatatcagctaacacctactaacactaatcgatctgtaaaccacaggtataagcactttgactggttatatgagcgtctcctggttaagtttgggtcagccattccaatcccttctcttccagacaaacaagtcacaggccgctttgaagaggaatttatcaaaatgcgcatggagagacttcaggcctggatgaccaggatgtgtcgccatccagtaatctcagaaagtgaagttttccagcagttcctaaatttccgagatgagaaggaatggaaaactggaaagaggaaggccgagagagatgagctggcgggagtcatgatattttccaccatggaaccagaggcacctgacttggacttagtagaaatagagcagaagtgcgaggctgtggggaagttcaccaaggccatggatgacggcgtgaaggagctgctgacggtggggcaggagcactggaagcgctgcacgggcccattacccaaggaatatcagaagataggaaaggccttgcagagtttggccacagtgttcagttccagtggctatcaaggtgaaacagatctcaatgatgcaataacagaagcaggaaagacttatgaagaaattgccagtctcgtggcagaacagccaaagaaagatctccatttcctgatggaatgtaatcacgagtataaaggttttcttggctgcttccctgacatcattggcactcacaagggagcaatagaaaaagtgaaagaaagtgacaaactagttgcaacaagtaaaatcaccctacaagacaaacagaacatggtgaagagagtcagcatcatgtcttacgcgttgcaagctgagatgaatcactttcacagtaaccggatctatgattacaacagtgtcatccgcctgtacctggagcagcaagtgcaattttacgaaacgattgcagaaaagctgaggcaggccctcagccgctttccagtgatgtaggacagaacgggccttgaagagaatgccgcgtgctttctcctgacttggggcaatgcaattcaaaactttttttcccctattattcagaaaaaaaaggaaacaaaaccaaaaagaaagagttgcaaaaaactgcatttattttattagccaccctaaatgcgtcagttatttagggatggtcttttgttcatttccgcatccattatttaaaccagtggaaattgtctctatttttggaaagtacttaaaagttaccagaattttcaatggaaaatgaggggtttctccccactgatattttacatagagtcataatttatatgtcttataaattataagtcttatataatttataagtctcccacaatcttccagttcttacccagtgtcagataattaattactaattactttcttaaaaacatgaactatgccagaataaaaaatatctatgtttgtatatttttataactcctttcagtcctctggggctcctgtcattgagggaagtcgttacgcctttcactgccacagttacagctcaagtgcttacacttcaagagggaggacgctgggggcccctggggctggctagtgccatcgtggtgtgtggcaggtgggccatcccatgtccctccagggggaccccacagcctggcagatgagcagatacccctggccacccatgtcctcagcgacatttctgatgtgctgctcttatgtgaggaccagtgctttctctctttgcacttccttcctaatcttggttaaggcatgttttatgccatgaagaatacattagaagaattgagggactttgtagagaattttgtggctttggtccaacgggtgagtggctgtgcggaggcctgtgttcgggagggcctgggagaaggagggcacccagcaccccggcgtctctggccctttcttattctttggctcctcatccaccgtgatgagaagcgctgctgtggccacggcacactgcttggcttgggtggcgggttcatggccagttggtgtcatcagcaaagagaaaaagcacaggttagctccccattagatggaaaagtgtagggactgagaagggctgcagcctcagcagtgtacagagtccccggcgctctgaggttggagagaaagaacagaccagcgcccttcccgactacatccgaaacttcacacagggtgtttctgagcaccagcacttccagcgcttcacttaacggcataaagcaaaacaggaccttggcacaccgtcagctcgaactcaacactggcagccaccgtctcacccctgcggaggagcgctcccgtctcccacaggtgccttaccgcgttccctcccgctgctttcatttttctgacctaataattacgggaaatggaaagtctgggccagcatcaataaaatgacaccaaaaataagtagatgaaatcaaatgaatatgagaacatcttgttcttcaatatcacgggtttttgttaatgtttcataagtaattctccccacttgatttttcttctataaaatcccatagaacaatgtttatgctatagccatttaatatatgtacaaattgtaaagaatatgtataaatgttttacacgaatgtaagagcatgtagaagccaacatataaataaattgtttaaaaaaactgtacagtaaattctcaaagcactttttcaaaaca

SEQ ID NO: 374200 - DNA, 3523 bp, Homo sapiens
  misc_feature (2)..(3): n is a, c, g, or t
  misc_feature (7)..(8): n is a, c, g, or t
  misc_feature (11)..(12): n is a, c, g, or t
  misc_feature (15)..(15): n is a, c, g, or t
gnntgcnnccnngtngactgactttgctccttcttcgccttctgccatgattgtgaggcctccccagccacgtggaactgctcgggttatgtatgattttgctgctgaacctggaaataatgaactgacggttaatgaaggagaaatcatcacaatcacaaatccggatgtaggtggaggatggctggaaggaagaaacatcaaaggagaacgagggctggttcccacagactacgttgaaattttacccagtgatggaaaagatcaattttcttgtggaaattcagtggctgaccaagccttccttgattctctctcagccagcacagctcaggccagttcgtcggctgccagcaacaatcaccaggttggcagtggcaatgacccctggtcagcctggagtgcctccaaatctgggaactgggaaagctcagaaggctggggggcccagccagagggggctggagcccaaagaaacacaaacactcccaacaactgggacactgccttcggccacccccaggcctaccaaggaccagcaactggtgatgatgatgactgggatgaagactgggatgggcccaaatcctcttcctactttaaggattcagagtcagctgatgcaggcggcgctcagcgaggaaacagtcgtgctagttcctcatccatgaaaattccccttaacaaatttcctggatttgcgaaacctggcacggaacagtatttgttggccaaacaactagcaaaacccaaagagaaaattcccatcattgttggagattatggcccaatgtgggtttatcctacctctacttttgactgtgtggtagcagatcccaggaaaggctccaaaatgtatggtctaaagagctacatcgaatatcagctaacacctactaacactaatcgatctgtaaaccacaggtataagcactttgactggttatatgagcgtctcctggttaagtttgggtcagccattccaatcccttctcttccagacaaacaagtcacaggccgctttgaagaggaatttatcaaaatgcgcatggagagacttcaggcctggatgaccaggatgtgtcgccatccagtaatctcagaaagtgaagttttccagcagttcctaaatttccgagatgagaaggaatggaaaactggaaagaggaaggccgagagagatgagctggcgggagtcatgatattttccaccatggaaccagaggcacctgacttggacttagtagaaatagagcagaagtgcgaggctgtggggaagttcaccaaggccatggatgacggcgtgaaggagctgctgacggtggggcaggagcactggaagcgctgcacgggcccattacccaaggaatatcagaagataggaaaggccttgcagagtttggccacagtgttcagttccagtggctatcaaggtgaaacagatctcaatgatgcaataacagaagcaggaaagacttatgaagaaattgccagtctcgtggcagaacagccaaagaaagatctccatttcctgatggaatgtaatcacgagtataaaggttttcttggctgcttccctgacatcattggcactcacaagggagcaatagaaaaagtgaaagaaagtgacaaactagttgcaacaagtaaaatcaccctacaagacaaacagaacatggtgaagagagtcagcatcatgtcttacgcgttgcaagctgagatgaatcactttcacagtaaccggatctatgattacaacagtgtcatccgcctgtacctggagcagcaagtgcaattttacgaaacgattgcagaaaagctgaggcaggccctcagccgctttccagtgatgtaggacagaacgggccttgaagagaatgccgcgtgctttctcctgacttggggcaatgcaattcaaaactttttttcccctattattcagaaaaaaaaggaaacaaaaccaaaaagaaagagttgcaaaaaactgcatttattttattagccaccctaaatgcgtcagttatttagggatggtcttttgttcatttccgcatccattatttaaaccagtggaaattgtctctatttttggaaagtacttaaaagttaccagaattttcaatggaaaatgaggggtttctccccactgatattttacatagagtcataatttatatgtcttataaattataagtcttatataatttataagtctcccacaatcttccagttcttacccagtgtcagataattaattactaattactttcttaaaaacatgaactatgccagaataaaaaatatctatgtttgtatatttttataactcctttcagtcctctggggctcctgtcattgagggaagtcgttacgcctttcactgccacagttacagctcaagtgcttacacttcaagagggaggacgctgggggcccctggggctggctagtgccatcgtggtgtgtggcaggtgggccatcccatgtccctccagggggaccccacagcctggcagatgagcagatacccctggccacccatgtcctcagcgacatttctgatgtgctgctcttatgtgaggaccagtgctttctctctttgcacttccttcctaatcttggttaaggcatgttttatgccatgaagaatacattagaagaattgagggactttgtagagaattttgtggctttggtccaacgggtgagtggctgtgcggaggcctgtgttcgggagggcctgggagaaggagggcacccagcaccccggcgtctctggccctttcttattctttggctcctcatccaccgtgatgagaagcgctgctgtggccacggcacactgcttggcttgggtggcgggttcatggccagttggtgtcatcagcaaagagaaaaagcacaggttagctccccattagatggaaaagtgtagggactgagaagggctgcagcctcagcagtgtacagagtccccggcgctctgaggttggagagaaagaacagaccagcgcccttcccgactacatccgaaacttcacacagggtgtttctgagcaccagcacttccagcgcttcacttaacggcataaagcaaaacaggaccttggcacaccgtcagctcgaactcaacactggcagccaccgtctcacccctgcggaggagcgctcccgtctcccacaggtgccttaccgcgttccctcccgctgctttcatttttctgacctaataattacgggaaatggaaagtctgggccagcatcaataaaatgacaccaaaaataagtagatgaaatcaaatgaatatgagaacatcttgttcttcaatatcacgggtttttgttaatgtttcataagtaattctccccacttgatttttcttctataaaatcccatagaacaatgtttatgctatagccatttaatatatgtacaaattgtaaagaatatgtataaatgttttacacgaatgtaagagcatgtagaagccaacatataaataaattgtttaaaaaaactgta

SEQ ID NO: 374201 - DNA, 4204 bp, Homo sapiens
gcccagcggctgggcctgagcgtcgagactcggggccgaggcggaggagcggccgccgcgccggggcccagccggagccgccgccctcgcccttgcctttgcctgcgcggctcagaatcaccatccgcggcgcgggagacgagccggccgtcccgggccgggggacccgcccgccatggccaccaaggctcgggttatgtatgattttgctgctgaacctggaaataatgaactgacggttaatgaaggagaaatcatcacaatcacaaatccggatgtaggtggaggatggctggaaggaagaaacatcaaaggagaacgagggctggttcccacagactacgttgaaattttacccagtgatggaaaagatcaattttcttgtggaaattcagtggctgaccaagccttccttgattctctctcagccagcacagctcaggccagttcgtcggctgccagcaacaatcaccaggttggcagtggcaatgacccctggtcagcctggagtgcctccaaatctgggaactgggaaagctcagaaggctggggggcccagccagagggggctggagcccaaagaaacacaaacactcccaacaactgggacactgccttcggccacccccaggcctaccaaggaccagcaactggtgatgatgatgactgggatgaagactgggatgggcccaaatcctcttcctactttaaggattcagagtcagctgatgcaggcggcgctcagcgaggaaacagtcgtgctagttcctcatccatgaaaattccccttaacaaatttcctggatttgcgaaacctggcacggaacagtatttgttggccaaacaactagcaaaacccaaagagaaaattcccatcattgttggagattatggcccaatgtgggtttatcctacctctacttttgactgtgtggtagcagatcccaggaaaggctccaaaatgtatggtctaaagagctacatcgaatatcagctaacacctactaacactaatcgatctgtaaaccacaggtataagcactttgactggttatatgagcgtctcctggttaagtttgggtcagccattccaatcccttctcttccagacaaacaagtcacaggccgctttgaagaggaatttatcaaaatgcgcatggagagacttcaggcctggatgaccaggatgtgtcgccatccagtaatctcagaaagtgaagttttccagcagttcctaaatttccgagatgagaaggaatggaaaactggaaagaggaaggccgagagagatgagctggcgggagtcatgatattttccaccatggaaccagaggcacctgacttggacttagtagaaatagagcagaagtgcgaggctgtggggaagttcaccaaggccatggatgacggcgtgaaggagctgctgacggtggggcaggagcactggaagcgctgcacgggcccattacccaaggaatatcagaagataggaaaggccttgcagagtttggccacagtgttcagttccagtggctatcaaggtgaaacagatctcaatgatgcaataacagaagcaggaaagacttatgaagaaattgccagtctcgtggcagaacagccaaagaaagatctccatttcctgatggaatgtaatcacgagtataaaggttttcttggctgcttccctgacatcattggcactcacaagggagcaatagaaaaagtgaaagaaagtgacaaactagttgcaacaagtaaaatcaccctacaagacaaacagaacatggtgaagagagtcagcatcatgtcttacgcgttgcaagctgagatgaatcactttcacagtaaccggatctatgattacaacagtgtcatccgcctgtacctggagcagcaagtgcaattttacgaaacgattgcagaaaagctgaggcaggccctcagccgctttccagtgatgtaggacagaacgggccttgaagagaatgccgcgtgctttctcctgacttggggcaatgcaattcaaaactttttttcccctattattcagaaaaaaaaggaaacaaaaccaaaaagaaagagttgcaaaaaactgcatttattttattagccaccctaaatgcgtcagttatttagggatggtcttttgttcatttccgcatccattatttaaaccagtggaaattgtctctatttttggaaagtacttaaaagttaccagaattttcaatggaaaatgaggggtttctccccactgatattttacatagagtcataatttatatgtcttataaattataagtcttatataatttataagtctcccacaatcttccagttcttacccagtgtcagataattaattactaattactttcttaaaaacatgaactatgccagaataaaaaatatctatgtttgtatatttttataactcctttcagtcctctggggctcctgtcattgagggaagtcgttacgcctttcactgccacagttacagctcaagtgcttacacttcaagagggaggacgctgggggcccctggggctggctagtgccatcgtggtgtgtggcaggtgggccatcccatgtccctccagggggaccccacagcctggcagatgagcagatacccctggccacccatgtcctcagcgacatttctgatgtgctgctcttatgtgaggaccagtgctttctctctttgcacttccttcctaatcttggttaaggcatgttttatgccatgaagaatacattagaagaattgagggactttgtagagaattttgtggctttggtccaacgggtgagtggctgtgcggaggcctgtgttcgggagggcctgggagaaggagggcacccagcaccccggcgtctctggccctttcttattctttggctcctcatccaccgtgatgagaagcgctgctgtggccacggcacactgcttggcttgggtggcgggttcatggccagttggtgtcatcagcaaagagaaaaagcacaggttagctccccattagatggaaaagtgtagggactgagaagggctgcagcctcagcagtgtacagagtccccggcgctctgaggttggagagaaagaacagaccagcgcccttcccgactacatccgaaacttcacacagggtgtttctgagcaccagcacttccagcgcttcacttaacggcataaagcaaaacaggaccttggcacaccgtcagctcgaactcaacactggcagccaccgtctcacccctgcggaggagcgctcccgtctcccacaggtgccttaccgcgttccctcccgctgctttcatttttctgacctaataattacgggaaatggaaagtctgggccagcatcaataaaatgacaccaaaaataagtagatgaaatcaaatgaatatgagaacatcttgttcttcaatatcacgggtttttgttaatgtttcataagtaattctccccacttgatttttcttctataaaatcccatagaacaatgtttatgctatagccatttaatatatgtacaaattgtaaagaatatgtataaatgttttacacgaatgtaagagcatgtagaagccaacatataaataaattgtttaaaaaaactgtacagtaaattctcaaagcactttttcaaaacactttttggactttgtgtgtgatttttgttgttgttgttaagtactttttattccagctgctgaaaatggtccaggtaatgaattcttccccaaatcctatttcttctgacatgaattcatcatttcagttccgtaggtcaagtgttgcggtccgggaagcgtatcataaccacctgggagttgccaagaagcagacagtctcccagtgtctgactctcggatatttggatttgactggtgtgaggcaaagtgaaaaagggatgggggaaatggagatggcacgggctcctcagagcgtggtagccgactgtgaggaaaagcagagggaatgtgaaagaaaataagagaatccacgggatttgatgcctggaagattctccttcaagtggcaacatggcatatatatccttctccggggagtcacatgcaccatttggttcttagatacgttgatgttttgatttttaatgatttgtatcaacctgtaggtaccacagaagagctgtagtcatacaatcacataacttttacaaatatagtgg

SEQ ID NO: 374202 - DNA, 3578 bp, Homo sapiens
gcccagcggctgggcctgagcgtcgagactcggggccgaggcggaggagcggccgccgcgccggggcccagccggagccgccgccctcgcccttgcctttgcctgcgcggctcagaatcaccatccgcggcgcgggagacgagccggccgtcccgggccgggggacccgcccgccatggccaccaaggctcgggttatgtatgattttgctgctgaacctggaaataatgaactgacggttaatgaaggagaaatcatcacaatcacaaatccggatgtaggtggaggatggctggaaggaagaaacatcaaaggagaacgagggctggttcccacagactacgttgaaattttacccagtgatggaaaagatcaattttcttgtggaaattcagtggctgaccaagccttccttgattctctctcagccagcacagctcaggccagttcgtcggctgccagcaacaatcaccaggttggcagtggcaatgacccctggtcagcctggagtgcctccaaatctgggaactgggaaagctcagaaggctggggggcccagccagagggggctggagcccaaagaaacacaaacactcccaacaactgggacactgccttcggccacccccaggcctaccaaggaccagcaactggtgatgatgatgactgggatgaagactgggatgggcccaaatcctcttcctactttaaggattcagagtcagctgatgcaggcggcgctcagcgaggaaacagtcgtgctagttcctcatccatgaaaattccccttaacaaatttcctggatttgcgaaacctggcacggaacagtatttgttggccaaacaactagcaaaacccaaagagaaaattcccatcattgttggagattatggcccaatgtgggtttatcctacctctacttttgactgtgtggtagcagatcccaggaaaggctccaaaatgtatggtctaaagagctacatcgaatatcagctaacacctactaacactaatcgatctgtaaaccacaggtataagcactttgactggttatatgagcgtctcctggttaagtttgggtcagccattccaatcccttctcttccagacaaacaagtcacaggccgctttgaagaggaatttatcaaaatgcgcatggagagacttcaggcctggatgaccaggatgtgtcgccatccagtaatctcagaaagtgaagttttccagcagttcctaaatttccgagatgagaaggatattttccaccatggaaccagaggcacctgacttggacttagtagaaatagagcagaagtgcgaggctgtggggaagttcaccaaggccatggatgacggcgtgaaggagctgctgacggtggggcaggagcactggaagcgctgcacgggcccattacccaaggaatatcagaagataggaaaggccttgcagagtttggccacagtgttcagttccagtggctatcaaggtgaaacagatctcaatgatgcaataacagaagcaggaaagacttatgaagaaattgccagtctcgtggcagaacagccaaagaaagatctccatttcctgatggaatgtaatcacgagtataaaggttttcttggctgcttccctgacatcattggcactcacaagggagcaatagaaaaagtgaaagaaagtgacaaactagttgcaacaagtaaaatcaccctacaagacaaacagaacatggtgaagagagtcagcatcatgtcttacgcgttgcaagctgagatgaatcactttcacagtaaccggatctatgattacaacagtgtcatccgcctgtacctggagcagcaagtgcaattttacgaaacgattgcagaaaagctgaggcaggccctcagccgctttccagtgatgtaggacagaacgggccttgaagagaatgccgcgtgctttctcctgacttggggcaatgcaattcaaaactttttttcccctattattcagaaaaaaaaggaaacaaaaccaaaaagaaagagttgcaaaaaactgcatttattttattagccaccctaaatgcgtcagttatttagggatggtcttttgttcatttccgcatccattatttaaaccagtggaaattgtctctatttttggaaagtacttaaaagttaccagaattttcaatggaaaatgaggggtttctccccactgatattttacatagagtcataatttatatgtcttataaattataagtcttatataatttataagtctcccacaatcttccagttcttacccagtgtcagataattaattactaattactttcttaaaaacatgaactatgccagaataaaaaatatctatgtttgtatatttttataactcctttcagtcctctggggctcctgtcattgagggaagtcgttacgcctttcactgccacagttacagctcaagtgcttacacttcaagagggaggacgctgggggcccctggggctggctagtgccatcgtggtgtgtggcaggtgggccatcccatgtccctccagggggaccccacagcctggcagatgagcagatacccctggccacccatgtcctcagcgacatttctgatgtgctgctcttatgtgaggaccagtgctttctctctttgcacttccttcctaatcttggttaaggcatgttttatgccatgaagaatacattagaagaattgagggactttgtagagaattttgtggctttggtccaacgggtgagtggctgtgcggaggcctgtgttcgggagggcctgggagaaggagggcacccagcaccccggcgtctctggccctttcttattctttggctcctcatccaccgtgatgagaagcgctgctgtggccacggcacactgcttggcttgggtggcgggttcatggccagttggtgtcatcagcaaagagaaaaagcacaggttagctccccattagatggaaaagtgtagggactgagaagggctgcagcctcagcagtgtacagagtccccggcgctctgaggttggagagaaagaacagaccagcgcccttcccgactacatccgaaacttcacacagggtgtttctgagcaccagcacttccagcgcttcacttaacggcataaagcaaaacaggaccttggcacaccgtcagctcgaactcaacactggcagccaccgtctcacccctgcggaggagcgctcccgtctcccacaggtgccttaccgcgttccctcccgctgctttcatttttctgacctaataattacgggaaatggaaagtctgggccagcatcaataaaatgacaccaaaaataagtagatgaaatcaaatgaatatgagaacatcttgttcttcaatatcacgggtttttgttaatgtttcataagtaattctccccacttgatttttcttctataaaatcccatagaacaatgtttatgctatagccatttaatatatgtacaaattgtaaagaatatgtataaatgttttacacgaatgtaagagcatgtagaagccaacatataaataaattgtttaaaaaaactgta

SEQ ID NO: 374203 - DNA, 3279 bp, Homo sapiens
gcccagcggctgggcctgagcgtcgagactcggggccgaggcggaggagcggccgccgcgccggggcccagccggagccgccgccctcgcccttgcctttgcctgcgcggctcagaatcaccatccgcggcgcgggagacgagccggccgtcccgggccgggggacccgcccgccatggccaccaaggctcgggttatgtatgattttgctgctgaacctggaaataatgaactgacggttaatgaaggagaaatcatcacaatcacaaatccggatgtaggtggaggatggctggaaggaagaaacatcaaaggagaacgagggctggttcccacagactacgttgaaattttacccagtgatggaaaagatcaattttcttgtggaaattcagtggctgaccaagccttccttgattctctctcagccagcacagctcaggccagttcgtcggctgccagcaacaatcaccaggttggcagtggcaatgacccctggtcagcctggagtgcctccaaatctgggaactgggaaagctcagaaggctggggggcccagccagagggggctggagcccaaagaaacacaaacactcccaacaactgggacactgccttcggccacccccaggcctaccaaggaccagcaactggtgatgatgatgactgggatgaagactgggatgggcccaaatcctcttcctactttaaggattcagagtcagctgatgcaggcggcgctcagcgaggaaacagtcgtgctagttcctcatccatgaaaattccccttaacaaatttcctggatttgcgaaacctggcacggaacagtatttgttggccaaacaactagcaaaacccaaagagaaaattcccatcattgttggagattatggcccaatgtgggtttatcctacctctacttttgactgtgtggtagcagatcccaggaaaggctccaaaatgtatggtctaaagagctacatcgaatatcagctaacacctactaacactaatcgatctgtaaaccacaggtataagcactttgactggttatatgagcgtctcctggttaagtttgggtcagccattccaatcccttctcttccagacaaacaagtcacaggccgctttgaagaggaatttatcaaaatgcgcatggagagacttcaggcctggatgaccaggatgtgtcgccatccagtaatctcagaaagtgaagttttccagcagttcctaaatttccgagatgagaaggaatggaaaactggaaagaggaaggccgagagagatgagctggcgggagtcatgatattttccaccatggaaccagaggcacctgacttggacttagtagaaatagagcagaagtgcgaggctgtggggaagttcaccaaggccatggatgacggcgtgaaggagctgctgacggtggggcaggagcactggaagcgctgcacgggcccattacccaaggaatatcagaagataggaaaggccttgcagagtttggccacagtgttcagttccagtggctatcaaggtgaaacagatctcaatgatgcaataacagaagcaggaaagacttatgaagaaattgccagtctcgtggcagaacagccaaagaaagatctccatttcctgatggaatgtaatcacgagtataaaggttttcttggctgcttccctgacatcattggcactcacaagggagcaatagaaaaagtgaaagaaagtgacaaactagttgcaacaagtaaaatcaccctacaagacaaacagaacatggtgaagagagtcagcatcatgtcttacgcgttgcaagctgagatgaatcactttcacagtaaccggatctatgattacaacagtgtcatccgcctgtacctggagcagcaagtgcaattttacgaaacgattgcagaaaagctgaggcaggccctcagccgctttccagtgatgtaggacagaacgggccttgaagagaatgccgcgtgctttctcctgacttggggcaatgcaattcaaaactttttttcccctattattcagaaaaaaaaggaaacaaaaccaaaaagaaagagttgcaaaaaactgcatttattttattagccaccctaaatgcgtcagttatttagggatggtcttttgttcatttccgcatccattatttaaaccagtggaaattgtctctatttttggaaagtacttaaaagttaccagaattttcaatggaaaatgaggggtttctccccactgatattttacatagagtcataatttatatgtcttataaattataagtcttatataatttataagtctcccacaatcttccagttcttacccagtgtcagataattaattactaattactttcttaaaaacatgaactatgccagaataaaaaatatctatgtttgtatatttttataactcctttcagtcctctggggctcctgtcattgagggaagtcgttacgcctttcactgccacagttacagctcaagtgcttacacttcaagagggaggacgctgggggcccctggggctggctagtgccatcgtggtgtgtggcaggtgggccatcccatgtccctccagggggaccccacagcctggcagatgagcagatacccctggccacccatgtcctcagcgacatttctgatgtgctgctcttatgtgaggaccagtgctttctctctttgcacttccttcctaatcttggttaaggcatgttttatgccatgaagaatacattagaagaattgagggactttgtagagaattttgtggctttggtccaacgggtgagtggctgtgcggaggcctgtgttcgggagggcctgggagaaggagggcacccagcaccccggcgtctctggccctttcttattctttggctcctcatccaccgtgatgagaagccgctgctttcatttttctgacctaataattacgggaaatggaaagtctgggccagcatcaataaaatgacaccaaaaataagtagatgaaatcaaatgaatatgagaacatcttgttcttcaatatcacgggtttttgttaatgtttcataagtaattctccccacttgatttttcttctataaaatcccatagaacaatgtttatgctatagccatttaatatatgtacaaattgtaaagaatatgtataaatgttttacacgaatgtaagagcatgtagaagccaacatataaataaattgtttaaaaaaactgtacagtaaattctcaaagcactttttcaaaaca

SEQ ID NO: 374204 - DNA, 1963 bp, Homo sapiens
tctaacctcttagtaaagtgatttaccaagaactgacaacagcagccaaccagattaggtcaggttgatgattaattgtaactgagcagagaaaccaggtgttgtcatttgaaaacttgagggaaaactgattgatgttctgatttgggttgtagctgagatgaatcactttcacagtaaccggatctatgattacaacagtgtcatccgcctgtacctggagcagcaagtgcaattttacgaaacgattgcagaaaagctgaggcaggccctcagccgctttccagtgatgtaggacagaacgggccttgaagagaatgccgcgtgctttctcctgacttggggcaatgcaattcaaaactttttttcccctattattcagaaaaaaaaggaaacaaaaccaaaaagaaagagttgcaaaaaactgcatttattttattagccaccctaaatgcgtcagttatttagggatggtcttttgttcatttccgcatccattatttaaaccagtggaaattgtctctatttttggaaagtacttaaaagttaccagaattttcaatggaaaatgaggggtttctccccactgatattttacatagagtcataatttatatgtcttataaattataagtcttatataatttataagtctcccacaatcttccagttcttacccagtgtcagataattaattactaattactttcttaaaaacatgaactatgccagaataaaaaatatctatgtttgtatatttttataactcctttcagtcctctggggctcctgtcattgagggaagtcgttacgcctttcactgccacagttacagctcaagtgcttacacttcaagagggaggacgctgggggcccctggggctggctagtgccatcgtggtgtgtggcaggtgggccatcccatgtccctccagggggaccccacagcctggcagatgagcagatacccctggccacccatgtcctcagcgacatttctgatgtgctgctcttatgtgaggaccagtgctttctctctttgcacttccttcctaatcttggttaaggcatgttttatgccatgaagaatacattagaagaattgagggactttgtagagaattttgtggctttggtccaacgggtgagtggctgtgcggaggcctgtgttcgggagggcctgggagaaggagggcacccagcaccccggcgtctctggccctttcttattctttggctcctcatccaccgtgatgagaagcgctgctgtggccacggcacactgcttggcttgggtggcgggttcatggccagttggtgtcatcagcaaagagaaaaagcacaggttagctccccattagatggaaaagtgtagggactgagaagggctgcagcctcagcagtgtacagagtccccggcgctctgaggttggagagaaagaacagaccagcgcccttcccgactacatccgaaacttcacacagggtgtttctgagcaccagcacttccagcgcttcacttaacggcataaagcaaaacaggaccttggcacaccgtcagctcgaactcaacactggcagccaccgtctcacccctgcggaggagcgctcccgtctcccacaggtgccttaccgcgttccctcccgctgctttcatttttctgacctaataattacgggaaatggaaagtctgggccagcatcaataaaatgacaccaaaaataagtagatgaaatcaaatgaatatgagaacatcttgttcttcaatatcacgggtttttgttaatgtttcataagtaattctccccacttgatttttcttctataaaatcccatagaacaatgtttatgctatagccatttaatatatgtacaaattgtaaagaatatgtataaatgttttacacgaatgtaagagcatgtagaagccaacatataaataaattgtttaaaaaaactgta

SEQ ID NO: 374205 - DNA, 1574 bp, Homo sapiens
gcccagcggctgggcctgagcgtcgagactcggggccgaggcggaggagcggccgccgcgccggggcccagccggagccgccgccctcgcccttgcctttgcctgcgcggctcagaatcaccatccgcggcgcgggagacgagccggccgtcccgggccgggggacccgcccgccatggccaccaaggctcgggttatgtatgattttgctgctgaacctggaaataatgaactgacggttaatgaaggagaaatcatcacaatcacaaatccggatgtaggtggaggatggctggaaggaagaaacatcaaaggagaacgagggctggttcccacagactacgttgaaattttacccagtgatggaaaagatcaattttcttgtggaaattcagtggctgaccaagccttccttgattctctctcagccagcacagctcaggccagttcgtcggctgccagcaacaatcaccaggttggcagtggcaatgacccctggtcagcctggagtgcctccaaatctgggaactgggaaagctcagaaggctggggggcccagccagagggggctggagcccaaagaaacacaaacactcccaacaactgggacactgccttcggccacccccaggcctaccaaggaccagcaactggtgatgatgatgactgggatgaagactgggatgggcccaaatcctcttcctactttaaggattcagagtcagctgatgcaggcggcgctcagcgaggaaacagtcgtgctagttcctcatccatgaaaattccccttaacaaatttcctggatttgcgaaacctggcacggaacagtatttgttggccaaacaactagcaaaacccaaagagaaaattcccatcattgttggagattatggcccaatgtgggtttatcctacctctacttttgactgtgtggtagcagatcccaggaaaggctccaaaatgtatggtctaaagagctacatcgaatatcagctaacacctactaacactaatcgatctgtaaaccacaggtataagcactttgactggttatatgagcgtctcctggttaagtttgggtcagccattccaatcccttctcttccagacaaacaagtcacaggccgctttgaagaggaatttatcaaaatgcgcatggagagacttcaggcctggatgaccaggatgtgtcgccatccagtaatctcagaaagtgaagttttccagcagttcctaaatttccgagatgagaaggaatggaaaactggaaagaggaaggccgagagagatgagctggcgggagtcatgatattttccaccatggaaccagaggcacctgacttggacttagtagaaatgtgagagacgctgccaggttttctttcttctcaatccgcaccctcctcctttggccatcaggcttcagccagtgtagccgcagccgaaactcaaatcagactagacttttatgaaatgagtgggatttgtagtccaatgacaagggaaacatcatttgtacatagaagtactgtctttctaaccgcaacatcaaattacaatctttctttcacct

SEQ ID NO: 374206 - DNA, 1683 bp, Homo sapiens
gcccagcggctgggcctgagcgtcgagactcggggccgaggcggaggagcggccgccgcgccggggcccagccggagccgccgccctcgcccttgcctttgcctgcgcggctcagaatcaccatccgcggcgcgggagacgagccggccgtcccgggccgggggacccgcccgccatggccaccaaggctcgggttatgtatgattttgctgctgaacctggaaataatgaactgacggttaatgaaggagaaatcatcacaatcacaaatccggatgtaggtggaggatggctggaaggaagaaacatcaaaggagaacgagggctggttcccacagactacgttgaaattttacccagtgatggaaaagatcaattttcttgtggaaattcagtggctgaccaagccttccttgattctctctcagccagcacagctcaggccagttcgtcggctgccagcaacaatcaccaggttggcagtggcaatgacccctggtcagcctggagtgcctccaaatctgggaactgggaaagctcagaaggctggggggcccagccagagggggctggagcccaaagaaacacaaacactcccaacaactgggacactgccttcggccacccccaggcctaccaaggaccagcaactggtgatgatgatgactgggatgaagactgggatgggcccaaatcctcttcctactttaaggattcagagtcagctgatgcaggcggcgctcagcgaggaaacagtcgtgctagttcctcatccatgaaaattccccttaacaagtaagtttaaaggggagccagggaaccagggccgtggtagaagtatacattaatacaaagtatataccctaccaagaggcagctggccttttccctttccagtgatctcctaagttttggatatgattcagttatttttatttggatcttaactgagaagcttacttaaaaaaaaaaaaggatttttgatttacaaggttaataagtgaaatatttattttatttaatgatttcccaaactgttttcattacttctagctttatcaatttatgacatattaaggtttcattgctaatgtcacaggaaagctaaaaagaataataataacaactctcttttaaatgttttactgttttgttaatcacttgccatgtgccaggcattgtgcagagaggtttgtatcattcgcatgtagccctcatatccctttgtggtacataaaacccctgttttactgcaggcaaactgatgcccagagagacgcatcgagtgttccagtcaggaagccaggccctcaggcgccaaagcacgtgtttcagctcctgtgcctaaaaacgtggtccggagctttgtgttagcttaggtttctcttagatttaaaacaaaaaaaaaagtgttgtgttttatttttttgttttgagacaggcgtctcgctctgtcacccaggctgaagtgcagtggtgcgatcttggttcactgcaaccccaacgtcccgggttcaagcaattctcgtgcctcagccacctgagtagctgggattacaaacatgtgccaccgcgcccagctaatttttgtatttttagtagagacgaggttttaccacgttggccaggctggtctcaagctcctggtctcaagtgatccgcccgcctctacctcccaaagtg

SEQ ID NO: 374207 - DNA, 579 bp, Homo sapiens
gttacttagaggatggagtgaatggtggcggagtgatggtggcggagtgatggtggcggagtgcaatggctggcggagtgcactgtgtgtgcggagtgcaatgtgtggctgggtgagtggctgtgcggaggcctgtgttcgggagggcctgggagaaggagggcacccagcaccccggcgtctctggccctttcttattctttggctcctcatccaccgtgatgagaagccgctgctttcatttttctgacctaataattacgggaaatggaaagtctgggccagcatcaataaaatgacaccaaaaataagtagatgaaatcaaatgaatatgagaacatcttgttcttcaatatcacgggtttttgttaatgtttcataagtaattctccccacttgatttttcttctataaaatcccatagaacaatgtttatgctatagccatttaatatatgtacaaattgtaaagaatatgtataaatgttttacacgaatgtaagagcatgtagaagccaacatataaataaattgtttaaaaaaactgtacagtaaattctcaaagcactttttcaaaaca

SEQ ID NO: 374208 - DNA, 392 bp, Homo sapiens
ttctccactgtgtcatctcggtgcccgtgtcaaaaatttaaaagtaatctgatagccctctttaagttgcttctgatttgtcttttgcactaaaagaatctgtaattcaaggcttaaaattgactacacagcctttactcttaacatccatattatactcctatactatacccttttctccatcaaaaaaaaattgatttgcccagtaggtagttactgtcagaaaattaagtaatttcatttttattttggtcttttttttttttttaactgatgatcttccattttcacctctagcaactggtgatgatgatgactgggatgaagactgggatgggcccaaatcctcttcctactttaaggattcagagtcagctgatgcaggcggcgct

SEQ ID NO: 374209 - DNA, 379 bp, Homo sapiens
attacattaggtttcatttaccacagtttccagttctagtgcacccgaaagacaggacaaggttaaaactggtaagtaaatgtagacgagagttgtaaaattcttacaaggaaagtcttaagactgatgaacatttatattcatgattagatttcctggatttgcgaaacctggcacggaacagtatttgttggccaaacaactagcaaaacccaaagagaaaattcccatcattgtaagtttgtttatttttgtttgctttctttctgattaagctctttcttataccgtactttaaagctaagcgagttattcatcttttggaaagtatttttaaatatatttaatgccccacataactgataatatatgttagtgt

SEQ ID NO: 374210 - DNA, 457 bp, Homo sapiens
gccacgtcaaaataactaattttacaaaccaacttaaaaattacatgatgttttgttgttttctttacaacatatgattcaaagtatggcagtcttgggagttattttcttttagaaaaagtgatctgaatgcttaacactcaataatttagtgtagcacatgcaggatttatagtctttgggtataatagttctcttttccttgattttctgaatttctctgccagtaacaatcagcttgtatcttgttatagccaaagaaagatctccatttcctgatggaatgtaatcacgagtataaaggttttcttggctgcttccctgacatcattggcactcacaaggtaacctgatcgtagacatttatagaagacaacagcaggtgaaggaggcagatgtgcgcagtagtcagtattggttttatatgtttattattaaaaaagaaacaatctataat

SEQ ID NO: 374211 - DNA, 3631 bp, Homo sapiens
gcccagcggctgggcctgagcgtcgagactcggggccgaggcggaggagcggccgccgcgccggggcccagccggagccgccgccctcgcccttgcctttgcctgcgcggctcagaatcaccatccgcggcgcgggagacgagccggccgtcccgggccgggggacccgcccgccatggccaccaaggctcgggttatgtatgattttgctgctgaacctggaaataatgaactgacggttaatgaaggagaaatcatcacaatcacaaatccggatgtaggtggaggatggctggaaggaagaaacatcaaaggagaacgagggctggttcccacagactacgttgaaattttacccagtgatggaaaagatcaattttcttgtggaaattcagtggctgaccaagccttccttgattctctctcagccagcacagctcaggccagttcgtcggctgccagcaacaatcaccaggttggcagtggcaatgacccctggtcagcctggagtgcctccaaatctgggaactgggaaagctcagaaggctggggggcccagccagagggggctggagcccaaagaaacacaaacactcccaacaactgggacactgccttcggccacccccaggcctaccaaggaccagcaactggtgatgatgatgactgggatgaagactgggatgggcccaaatcctcttcctactttaaggattcagagtcagctgatgcaggcggcgctcagcgaggaaacagtcgtgctagttcctcatccatgaaaattccccttaacaaatttcctggatttgcgaaacctggcacggaacagtatttgttggccaaacaactagcaaaacccaaagagaaaattcccatcattgttggagattatggcccaatgtgggtttatcctacctctacttttgactgtgtggtagcagatcccaggaaaggctccaaaatgtatggtctaaagagctacatcgaatatcagctaacacctactaacactaatcgatctgtaaaccacaggtataagcactttgactggttatatgagcgtctcctggttaagtttgggtcagccattccaatcccttctcttccagacaaacaagtcacaggccgctttgaagaggaatttatcaaaatgcgcatggagagacttcaggcctggatgaccaggatgtgtcgccatccagtaatctcagaaagtgaagttttccagcagttcctaaatttccgagatgagaaggaatggaaaactggaaagaggaaggccgagagagatgagctggcgggagtcatgatattttccaccatggaaccagaggcacctgacttggacttagtagaaatagagcagaagtgcgaggctgtggggaagttcaccaaggccatggatgacggcgtgaaggagctgctgacggtggggcaggagcactggaagcgctgcacgggcccattacccaaggaatatcagaagataggaaaggccttgcagagtttggccacagtgttcagttccagtggctatcaaggtgaaacagatctcaatgatgcaataacagaagcaggaaagacttatgaagaaattgccagtctcgtggcagaacagccaaagaaagatctccatttcctgatggaatgtaatcacgagtataaaggttttcttggctgcttccctgacatcattggcactcacaagggagcaatagaaaaagtgaaagaaagtgacaaactagttgcaacaagtaaaatcaccctacaagacaaacagaacatggtgaagagagtcagcatcatgtcttacgcgttgcaagctgagatgaatcactttcacagtaaccggatctatgattacaacagtgtcatccgcctgtacctggagcagcaagtgcaattttacgaaacgattgcagaaaagctgaggcaggccctcagccgctttccagtgatgtaggacagaacgggccttgaagagaatgccgcgtgctttctcctgacttggggcaatgcaattcaaaactttttttcccctattattcagaaaaaaaaggaaacaaaaccaaaaagaaagagttgcaaaaaactgcatttattttattagccaccctaaatgcgtcagttatttagggatggtcttttgttcatttccgcatccattatttaaaccagtggaaattgtctctatttttggaaagtacttaaaagttaccagaattttcaatggaaaatgaggggtttctccccactgatattttacatagagtcataatttatatgtcttataaattataagtcttatataatttataagtctcccacaatcttccagttcttacccagtgtcagataattaattactaattactttcttaaaaacatgaactatgccagaataaaaaatatctatgtttgtatatttttataactcctttcagtcctctggggctcctgtcattgagggaagtcgttacgcctttcactgccacagttacagctcaagtgcttacacttcaagagggaggacgctgggggcccctggggctggctagtgccatcgtggtgtgtggcaggtgggccatcccatgtccctccagggggaccccacagcctggcagatgagcagatacccctggccacccatgtcctcagcgacatttctgatgtgctgctcttatgtgaggaccagtgctttctctctttgcacttccttcctaatcttggttaaggcatgttttatgccatgaagaatacattagaagaattgagggactttgtagagaattttgtggctttggtccaacgggtgagtggctgtgcggaggcctgtgttcgggagggcctgggagaaggagggcacccagcaccccggcgtctctggccctttcttattctttggctcctcatccaccgtgatgagaagcgctgctgtggccacggcacactgcttggcttgggtggcgggttcatggccagttggtgtcatcagcaaagagaaaaagcacaggttagctccccattagatggaaaagtgtagggactgagaagggctgcagcctcagcagtgtacagagtccccggcgctctgaggttggagagaaagaacagaccagcgcccttcccgactacatccgaaacttcacacagggtgtttctgagcaccagcacttccagcgcttcacttaacggcataaagcaaaacaggaccttggcacaccgtcagctcgaactcaacactggcagccaccgtctcacccctgcggaggagcgctcccgtctcccacaggtgccttaccgcgttccctcccgctgctttcatttttctgacctaataattacgggaaatggaaagtctgggccagcatcaataaaatgacaccaaaaataagtagatgaaatcaaatgaatatgagaacatcttgttcttcaatatcacgggtttttgttaatgtttcataagtaattctccccacttgatttttcttctataaaatcccatagaacaatgtttatgctatagccatttaatatatgtacaaattgtaaagaatatgtataaatgttttacacgaatgtaagagcatgtagaagccaacatataaataaattgtttaaaaaaactgta

SEQ ID NO: 374212 - DNA, 3800 bp, Homo sapiens
gcccagcggctgggcctgagcgtcgagactcggggccgaggcggaggagcggccgccgcgccggggcccagccggagccgccgccctcgcccttgcctttgcctgcgcggctcagaatcaccatccgcggcgcgggagacgagccggccgtcccgggccgggggacccgcccgccatggccaccaaggctcgggttatgtatgattttgctgctgaacctggaaataatgaactgacggttaatgaaggagaaatcatcacaatcacaaatccggatgtaggtggaggatggctggaaggaagaaacatcaaaggagaacgagggctggttcccacagactacgttgaaattttacccagtgatggaaaagatcaattttcttgtggaaattcagtggctgaccaagccttccttgattctctctcagccagcacagctcaggccagttcgtcggctgccagcaacaatcaccaggttggcagtggcaatgacccctggtcagcctggagtgcctccaaatctgggaactgggaaagctcagaaggctggggggcccagccagagggggctggagcccaaagaaacacaaacactcccaacaactgggacactgccttcggccacccccaggcctaccaaggaccagcaactggtgatgatgatgactgggatgaagactgggatgggcccaaatcctcttcctactttaaggattcagagtcagctgatgcaggcggcgctcagcgaggaaacagtcgtgctagttcctcatccatgaaaattccccttaacaaatttcctggatttgcgaaacctggcacggaacagtatttgttggccaaacaactagcaaaacccaaagagaaaattcccatcattgttggagattatggcccaatgtgggtttatcctacctctacttttgactgtgtggtagcagatcccaggaaaggctccaaaatgtatggtctaaagagctacatcgaatatcagctaacacctactaacactaatcgatctgtaaaccacaggtataagcactttgactggttatatgagcgtctcctggttaagtttgggtcagccattccaatcccttctcttccagacaaacaagtcacaggccgctttgaagaggaatttatcaaaatgcgcatggagagacttcaggcctggatgaccaggatgtgtcgccatccagtaatctcagaaagtgaagttttccagcagttcctaaatttccgagatgagaaggaatggaaaactggaaagaggaaggccgagagagatgagctggcgggagtcatgatattttccaccatggaaccagaggcacctgacttggacttagtagaaatagagcagaagtgcgaggctgtggggaagttcaccaaggccatggatgacggcgtgaaggagctgctgacggtggggcaggagcactggaagcgctgcacgggcccattacccaaggaatatcagaagataggaaaggccttgcagagtttggccacagtgttcagttccagtggctatcaaggtgaaacagatctcaatgatgcaataacagaagcaggaaagacttatgaagaaattgccagtctcgtggcagaacagccaaagaaagatctccatttcctgatggaatgtaatcacgagtataaaggttttcttggctgcttccctgacatcattggcactcacaagggagcaatagaaaaagtgaaagaaagtgacaaactagttgcaacaagtaaaatcaccctacaagacaaacagaacatggtgaagagagtcagcatcatgtcttacgcgttgcaagctgagatgaatcactttcacagtaaccggatctatgattacaacagtgtcatccgcctgtacctggagcagcaagtgcaattttacgaaacgattgcagaaaagctgaggcaggccctcagccgctttccagtgatgtaggacagaacgggccttgaagagaatgccgcgtgctttctcctgacttggggcaatgcaattcaaaactttttttcccctattattcagaaaaaaaaggaaacaaaaccaaaaagaaagagttgcaaaaaactgcatttattttattagccaccctaaatgcgtcagttatttagggatggtcttttgttcatttccgcatccattatttaaaccagtggaaattgtctctatttttggaaagtacttaaaagttaccagaattttcaatggaaaatgaggggtttctccccactgatattttacatagagtcataatttatatgtcttataaattataagtcttatataatttataagtctcccacaatcttccagttcttacccagtgtcagataattaattactaattactttcttaaaaacatgaactatgccagaataaaaaatatctatgtttgtatatttttataactcctttcagtcctctggggctcctgtcattgagggaagtcgttacgcctttcactgccacagttacagctcaagtgcttacacttcaagagggaggacgctgggggcccctggggctggctagtgccatcgtggtgtgtggcaggtgggccatcccatgtccctccagggggaccccacagcctggcagatgagcagatacccctggccacccatgtcctcagcgacatttctgatgtgctgctcttatgtgaggaccagtgctttctctctttgcacttccttcctaatcttggttaaggcatgttttatgccatgaagaatacattagaagaattgagggactttgtagagaattttgtggctttggtccaacgggtgagtggctgtgcggaggcctgtgttcgggagggcctgggagaaggagggcacccagcaccccggcgtctctggccctttcttattctttggctcctcatccaccgtgatgagaagcgctgctgtggccacggcacactgcttggcttgggtggcgggttcatggccagttggtgtcatcagcaaagagaaaaagcacaggttagctccccattagatggaaaagtgtagggactgagaagggctgcagcctcagcagtgtacagagtccccggcgctctgaggttggagagaaagaacagaccagcgcccttcccgactacatccgaaacttcacacagggtgtttctgagcaccagcacttccagcgcttcacttaacggcataaagcaaaacaggaccttggcacaccgtcagctcgaactcaacactggcagccaccgtctcacccctgcggaggagcgctcccgtctcccacaggtgccttaccgcgttccctcccgctgctttcatttttctgacctaataattacgggaaatggaaagtctgggccagcatcaataaaatgacaccaaaaataagtagatgaaatcaaatgaatatgagaacatcttgttcttcaatatcacgggtttttgttaatgtttcataagtaattctccccacttgatttttcttctataaaatcccatagaacaatgtttatgctatagccatttaatatatgtacaaattgtaaagaatatgtataaatgttttacacgaatgtaagagcatgtagaagccaacatataaataaattgtttaaaaaaactgtacagtaaattctcaaagcactttttcaaaacaaaaaaagaaaaaaaaaaaaaacccggggcttttttcgggggggaaaaagggtttaaagggggggtctctgggttccgccccctttttttacagggaattggggcccaaaggggggtaattggagcgtcggttgaaaat

SEQ ID NO: 374213 - DNA, 2941 bp, Homo sapiens
gtagaatagaagtatgaattccgattcagagtcagctgatgcaggcggcgctcagcgaggaaacagtcgtgctagttcctcatccatgaaaattccccttaacaaatttcctggatttgcgaaacctggcacggaacagtatttgttggccaaacaactagcaaaacccaaagagaaaattcccatcattgttggagattatggcccaatgtgggtttatcctacctctacttttgactgtgtggtagcagatcccaggaaaggctccaaaatgtatggtctaaagagctacatcgaatatcagctaacacctactaacactaatcgatctgtaaaccacaggtataagcactttgactggttatatgagcgtctcctggttaagtttgggtcagccattccaatcccttctcttccagacaaacaagtcacaggccgctttgaagaggaatttatcaaaatgcgcatggagagacttcaggcctggatgaccaggatgtgtcgccatccagtaatctcagaaagtgaagttttccagcagttcctaaatttccgagatgagaaggaatggaaaactggaaagaggaaggccgagagagatgagctggcgggagtcatgatattttccaccatggaaccagaggcacctgacttggacttagtagaaatagagcagaagtgcgaggctgtggggaagttcaccaaggccatggatgacggcgtgaaggagctgctgacggtggggcaggagcactggaagcgctgcacgggcccattacccaaggaatatcagaagataggaaaggccttgcagagtttggccacagtgttcagttccagtggctatcaaggtgaaacagatctcaatgatgcaataacagaagcaggaaagacttatgaagaaattgccagtctcgtggcagaacagccaaagaaagatctccatttcctgatggaatgtaatcacgagtataaaggttttcttggctgcttccctgacatcattggcactcacaagggagcaatagaaaaagtgaaagaaagtgacaaactagttgcaacaagtaaaatcaccctacaagacaaacagaacatggtgaagagagtcagcatcatgtcttacgcgttgcaagctgagatgaatcactttcacagtaaccggatctatgattacaacagtgtcatccgcctgtacctggagcagcaagtgcaattttacgaaacgattgcagaaaagctgaggcaggccctcagccgctttccagtgatgtaggacagaacgggccttgaagagaatgccgcgtgctttctcctgacttggggcaatgcaattcaaaactttttttcccctattattcagaaaaaaaaggaaacaaaaccaaaaagaaagagttgcaaaaaactgcatttattttattagccaccctaaatgcgtcagttatttagggatggtcttttgttcatttccgcatccattatttaaaccagtggaaattgtctctatttttggaaagtacttaaaagttaccagaattttcaatggaaaatgaggggtttctccccactgatattttacatagagtcataatttatatgtcttataaattataagtcttatataatttataagtctcccacaatcttccagttcttacccagtgtcagataattaattactaattactttcttaaaaacatgaactatgccagaataaaaaatatctatgtttgtatatttttataactcctttcagtcctctggggctcctgtcattgagggaagtcgttacgcctttcactgccacagttacagctcaagtgcttacacttcaagagggaggacgctgggggcccctggggctggctagtgccatcgtggtgtgtggcaggtgggccatcccatgtccctccagggggaccccacagcctggcagatgagcagatacccctggccacccatgtcctcagcgacatttctgatgtgctgctcttatgtgaggaccagtgctttctctctttgcacttccttcctaatcttggttaaggcatgttttatgccatgaagaatacattagaagaattgagggactttgtagagaattttgtggctttggtccaacgggtgagtggctgtgcggaggcctgtgttcgggagggcctgggagaaggagggcacccagcaccccggcgtctctggccctttcttattctttggctcctcatccaccgtgatgagaagcgctgctgtggccacggcacactgcttggcttgggtggcgggttcatggccagttggtgtcatcagcaaagagaaaaagcacaggttagctccccattagatggaaaagtgtagggactgagaagggctgcagcctcagcagtgtacagagtccccggcgctctgaggttggagagaaagaacagaccagcgcccttcccgactacatccgaaacttcacacagggtgtttctgagcaccagcacttccagcgcttcacttaacggcataaagcaaaacaggaccttggcacaccgtcagctcgaactcaacactggcagccaccgtctcacccctgcggaggagcgctcccgtctcccacaggtgccttaccgcgttccctcccgctgctttcatttttctgacctaataattacgggaaatggaaagtctgggccagcatcaataaaatgacaccaaaaataagtagatgaaatcaaatgaatatgagaacatcttgttcttcaatatcacgggtttttgttaatgtttcataagtaattctccccacttgatttttcttctataaaatcccatagaacaatgtttatgctatagccatttaatatatgtacaaattgtaaagaatatgtataaatgttttacacgaatgtaagagcatgtagaagccaacatataaataaattgtttaaaaaaactgta

SEQ ID NO: 374214 - DNA, 3300 bp, Homo sapiens
caagctgctcggggggctgaagcaggagaatgacttgaactgggaggcggccactgcagtaagccgagatcgtgccactgtactccagcctgggcgagtgagactcctcaaaagaaaaagaatatctgtcaattgaccttccaagttggcagtggcaatgacccctggtcagcctggagtgcctccaaatctgggaactgggaaagctcagaaggctggggggcccagccagagggggctggagcccaaagaaacacaaacactcccaacaactgggacactgccttcggccacccccaggcctaccaaggaccagcaactggtgatgatgatgactgggatgaagactgggatgggcccaaatcctcttcctactttaaggattcagagtcagctgatgcaggcggcgctcagcgaggaaacagtcgtgctagttcctcatccatgaaaattccccttaacaaatttcctggatttgcgaaacctggcacggaacagtatttgttggccaaacaactagcaaaacccaaagagaaaattcccatcattgttggagattatggcccaatgtgggtttatcctacctctacttttgactgtgtggtagcagatcccaggaaaggctccaaaatgtatggtctaaagagctacatcgaatatcagctaacacctactaacactaatcgatctgtaaaccacaggtataagcactttgactggttatatgagcgtctcctggttaagtttgggtcagccattccaatcccttctcttccagacaaacaagtcacaggccgctttgaagaggaatttatcaaaatgcgcatggagagacttcaggcctggatgaccaggatgtgtcgccatccagtaatctcagaaagtgaagttttccagcagttcctaaatttccgagatgagaaggaatggaaaactggaaagaggaaggccgagagagatgagctggcgggagtcatgatattttccaccatggaaccagaggcacctgacttggacttagtagaaatagagcagaagtgcgaggctgtggggaagttcaccaaggccatggatgacggcgtgaaggagctgctgacggtggggcaggagcactggaagcgctgcacgggcccattacccaaggaatatcagaagataggaaaggccttgcagagtttggccacagtgttcagttccagtggctatcaaggtgaaacagatctcaatgatgcaataacagaagcaggaaagacttatgaagaaattgccagtctcgtggcagaacagccaaagaaagatctccatttcctgatggaatgtaatcacgagtataaaggttttcttggctgcttccctgacatcattggcactcacaagggagcaatagaaaaagtgaaagaaagtgacaaactagttgcaacaagtaaaatcaccctacaagacaaacagaacatggtgaagagagtcagcatcatgtcttacgcgttgcaagctgagatgaatcactttcacagtaaccggatctatgattacaacagtgtcatccgcctgtacctggagcagcaagtgcaattttacgaaacgattgcagaaaagctgaggcaggccctcagccgctttccagtgatgtaggacagaacgggccttgaagagaatgccgcgtgctttctcctgacttggggcaatgcaattcaaaactttttttcccctattattcagaaaaaaaaggaaacaaaaccaaaaagaaagagttgcaaaaaactgcatttattttattagccaccctaaatgcgtcagttatttagggatggtcttttgttcatttccgcatccattatttaaaccagtggaaattgtctctatttttggaaagtacttaaaagttaccagaattttcaatggaaaatgaggggtttctccccactgatattttacatagagtcataatttatatgtcttataaattataagtcttatataatttataagtctcccacaatcttccagttcttacccagtgtcagataattaattactaattactttcttaaaaacatgaactatgccagaataaaaaatatctatgtttgtatatttttataactcctttcagtcctctggggctcctgtcattgagggaagtcgttacgcctttcactgccacagttacagctcaagtgcttacacttcaagagggaggacgctgggggcccctggggctggctagtgccatcgtggtgtgtggcaggtgggccatcccatgtccctccagggggaccccacagcctggcagatgagcagatacccctggccacccatgtcctcagcgacatttctgatgtgctgctcttatgtgaggaccagtgctttctctctttgcacttccttcctaatcttggttaaggcatgttttatgccatgaagaatacattagaagaattgagggactttgtagagaattttgtggctttggtccaacgggtgagtggctgtgcggaggcctgtgttcgggagggcctgggagaaggagggcacccagcaccccggcgtctctggccctttcttattctttggctcctcatccaccgtgatgagaagcgctgctgtggccacggcacactgcttggcttgggtggcgggttcatggccagttggtgtcatcagcaaagagaaaaagcacaggttagctccccattagatggaaaagtgtagggactgagaagggctgcagcctcagcagtgtacagagtccccggcgctctgaggttggagagaaagaacagaccagcgcccttcccgactacatccgaaacttcacacagggtgtttctgagcaccagcacttccagcgcttcacttaacggcataaagcaaaacaggaccttggcacaccgtcagctcgaactcaacactggcagccaccgtctcacccctgcggaggagcgctcccgtctcccacaggtgccttaccgcgttccctcccgctgctttcatttttctgacctaataattacgggaaatggaaagtctgggccagcatcaataaaatgacaccaaaaataagtagatgaaatcaaatgaatatgagaacatcttgttcttcaatatcacgggtttttgttaatgtttcataagtaattctccccacttgatttttcttctataaaatcccatagaacaatgtttatgctatagccatttaatatatgtacaaattgtaaagaatatgtataaatgttttacacgaatgtaagagcatgtagaagccaacatataaataaattgtttaaaaaaactgta

SEQ ID NO: 374215 - DNA, 2520 bp, Homo sapiens
gcccagcggctgggcctgagcgtcgagactcggggccgaggcggaggagcggccgccgcgccggggcccagccggagccgccgccctcgcccttgcctttgcctgcgcggctcagaatcaccatccgcggcgcgggagacgagccggccgtcccgggccgggggacccgcccgccatggccaccaaggctcgggttatgtatgattttgctgctgaacctggaaataatgaactgacggttaatgaagagagcagaagtgcgaggctgtggggaagttcaccaaggccatggatgacggcgtgaaggagctgctgacggtggggcaggagcactggaagcgctgcacgggcccattacccaaggaatatcagaagataggaaaggccttgcagagtttggccacagtgttcagttccagtggctatcaaggtgaaacagatctcaatgatgcaataacagaagcaggaaagacttatgaagaaattgccagtctcgtggcagaacagccaaagaaagatctccatttcctgatggaatgtaatcacgagtataaaggttttcttggctgcttccctgacatcattggcactcacaagggagcaatagaaaaagtgaaagaaagtgacaaactagttgcaacaagtaaaatcaccctacaagacaaacagaacatggtgaagagagtcagcatcatgtcttacgcgttgcaagctgagatgaatcactttcacagtaaccggatctatgattacaacagtgtcatccgcctgtacctggagcagcaagtgcaattttacgaaacgattgcagaaaagctgaggcaggccctcagccgctttccagtgatgtaggacagaacgggccttgaagagaatgccgcgtgctttctcctgacttggggcaatgcaattcaaaactttttttcccctattattcagaaaaaaaaggaaacaaaaccaaaaagaaagagttgcaaaaaactgcatttattttattagccaccctaaatgcgtcagttatttagggatggtcttttgttcatttccgcatccattatttaaaccagtggaaattgtctctatttttggaaagtacttaaaagttaccagaattttcaatggaaaatgaggggtttctccccactgatattttacatagagtcataatttatatgtcttataaattataagtcttatataatttataagtctcccacaatcttccagttcttacccagtgtcagataattaattactaattactttcttaaaaacatgaactatgccagaataaaaaatatctatgtttgtatatttttataactcctttcagtcctctggggctcctgtcattgagggaagtcgttacgcctttcactgccacagttacagctcaagtgcttacacttcaagagggaggacgctgggggcccctggggctggctagtgccatcgtggtgtgtggcaggtgggccatcccatgtccctccagggggaccccacagcctggcagatgagcagatacccctggccacccatgtcctcagcgacatttctgatgtgctgctcttatgtgaggaccagtgctttctctctttgcacttccttcctaatcttggttaaggcatgttttatgccatgaagaatacattagaagaattgagggactttgtagagaattttgtggctttggtccaacgggtgagtggctgtgcggaggcctgtgttcgggagggcctgggagaaggagggcacccagcaccccggcgtctctggccctttcttattctttggctcctcatccaccgtgatgagaagcgctgctgtggccacggcacactgcttggcttgggtggcgggttcatggccagttggtgtcatcagcaaagagaaaaagcacaggttagctccccattagatggaaaagtgtagggactgagaagggctgcagcctcagcagtgtacagagtccccggcgctctgaggttggagagaaagaacagaccagcgcccttcccgactacatccgaaacttcacacagggtgtttctgagcaccagcacttccagcgcttcacttaacggcataaagcaaaacaggaccttggcacaccgtcagctcgaactcaacactggcagccaccgtctcacccctgcggaggagcgctcccgtctcccacaggtgccttaccgcgttccctcccgctgctttcatttttctgacctaataattacgggaaatggaaagtctgggccagcatcaataaaatgacaccaaaaataagtagatgaaatcaaatgaatatgagaacatcttgttcttcaatatcacgggtttttgttaatgtttcataagtaattctccccacttgatttttcttctataaaatcccatagaacaatgtttatgctatagccatttaatatatgtacaaattgtaaagaatatgtataaatgttttacacgaatgtaagagcatgtagaagccaacatataaataaattgtttaaaaaaactgta

SEQ ID NO: 374216 - DNA, 312 bp, Homo sapiens
agctctagagaagaaaagttctttcagaattaaaaaaatatatacacatatttctcaaacagtatataggctctgggtttaaaaaagaaaggacagggtgctacagtacttgccatccatttatatttagatggagcccaactgtcctaacagtgtttataaatcttttccagagaagctggaaaacacaccgttttataaaactgcattatagggtttttgctacgagatactgaataagatatataatccacatttccattgttagtcagtagtgcagaaacacacatgatcccaaatgactggggcaga

SEQ ID NO: 374217 - DNA, 455 bp, Homo sapiens
gaggcaggagaatcacttgaacccgggacacagaggttgcagtgagcccagattgcgccattgaactccagcctgggcaacgagaacgaaactctgcctcaaaaaaagaaaaaaagaaaaagaagtaaaaataaagtcaaataaaccaagctttgtggttaaatgagaaagattgtcatacttgatttattttaaagctctagcaatataatatttattttttattatttttaaatggagacagggtcttgctatgtttcccaggcaggtctcaaactcttagcctcaagctgtccttctgcctaggcctcccaaagtgctgaggttacaggggagagccaccacgcccagcccaatgtgatatttaaagagagaaatctaaaacttaagactacagatagaagacaaaggatcagtagaagaaagctgttgaagagtatttagtaacaaaggca

SEQ ID NO: 374218 - DNA, 546 bp, Homo sapiens
cttctcctctctgctctcataaagaagaatgggagatgaaagtggaggggcagctgaggtggggcggcatcaggctgatacaacaccccagggaaccctgcttccatgtaaccctgaccttaaatccctatcctataataaagagttgggcacaacagaagggaaaaggaagtattctgcaaattgttttccataacagtgcagaggacacactttgcaatgtgtaatttgtgcagtatgacatgcatttgggtgtgtctggtcaggtacatcatgtggtgtccctgttatgcattttgcagactgacactctgcttaaccagtccttccgtgctgtgctgttttgtaagctcttaaccagaatgcaaaaatgttaaataactgtctggttttattttccagccctctgggatgagtctgatgacagtaactcagaaattgaggctgctttacgccccagaaaccataacaccgatgattctgatgatttttatgactaacgtgctgtgacattggtttcaaataaagtctttaaacaaactaaaa

SEQ ID NO: 374219 - DNA, 2184 bp, Homo sapiens
agcggaggcggcccggcgcggtgtttacccgcggtgcatggtggggcggtctccttcggcaaccccggccgaacggccacccagaggctgtgctgagctggcgcagcggcagcagcatgagccggaccctcgcatcggccgtgcccctgtcgagtcccgactactacgagaggctgggccaactccagcacgggctgcgggacagtgaaaagaagagattggacctggaaaagaaactttatgaatataatcagtctgatacatgcagagttaagctgaaatatgtaaaactaaagaattatctgaaggaaatatgtgaatctgaaaagaaggctcatactcgaaaccaagaatatttaaagcgatttgagcgtgtccaagctcatgttgtacacttcaccacaaatacagagaagcttcaaaaactgaagctcgaatatgagactcaaattaagaagatgctatgctcaaaagatagcctgggactaaaagaggaactgacagatgaagacagagaaaaggttgcagtgcaggaggggattaactcaggaacagccatgtcaagaggattgtatcaaccagcaacaatctttatgggccgccaaatgtcagccatcttaagcatgagagatttcagtacagagcacaaatctccccagcccacaaagaacttttcaattcctgacccacattcacaccgacagacagcccagagcagtaatgtgacagacagctgtgtagtacaaactagtaatgacacacagtgcttaaataagtctgacaacatagatggaaaggcatctcttcagattggtgagaaaatgccagtcacagccagtgtattgtctgaggaggaacaaactcattgcttggagataggaagtaacacacgtcatggcaagagtaatttatctgaaggcaaaaagtctgctgaactcaattccccgttacgggaaagattaagtccagagaacagaaccactgatttaaagtgtgacagttccagcggatcagagggagaaatactgacacgggaacatattgaagttgaggaaaaaagagccagcccgccagtctctccgataccagtttcagaatactgtgaatctgaaaataagtggtctcaagagaagcattctccttgggaaggtgtttcagatcatcttgctcacagggaaccaaagtcacaaaagcccttcagaaaaatgcaggaagaggaggaggaaagttggagcaccagcagtgaccttaccatttcaataagtgaagatgatctgattttagagagcccagaaccacagccaaatccaggtggcaagatggagggagaagatggaatagaggccttaaaattaatccatgctgagcaagaaagagttgccctatccactgaaaaaaattgtattttgcaaaccctaagctctcctgattcagaaaaggaatcctccactaacgcaccaacaagagaacctggacaaacaccagactcagacgtaccgagggcacaggtgggtcagcatgttgccaccttgaaagaacatgataattctgtcaaagaagaggcaacagcattattgagaaaagcccttacagaagagtgtggccgtaggtcagctattcacagtagtgaatcatcttgcagcttgccatctattctgaatgacaatagtggaataaaggaagccaaacctgctgtatggctcaacagtgttcctacaagggaacaagaagtttcaagtggctgtggagacaagagcaagaaagaaaatgtggctgcagatatcccaatcacagaaacagaagcctatcagttgctgaagaaggccacccttcaggataatacaaatcaaactgaaaacaggtttcaaaagacagatgcttctgtgtcacacttgtcaggtttgaatattggcagcggtgcattcgagacaaagacagctaacaaaattgcttcggaagctagtttttcatctagtgaaggaagtcctttgtcaaggcatgaaaacaaaaagaaacccgtgatcaatttaaaatctaatgccctctgggatgagtctgatgacagtaactcagaaattgaggctgctttacgccccagaaaccataacaccgatgattctgatgatttttatgactaacgtgctgtgacattggtttcaaataaagtctttaaacaaactaaaa

SEQ ID NO: 374220 - DNA, 2211 bp, Homo sapiens
  misc_feature (200)..(200): n is a, c, g, or t
  misc_feature (1071)..(1071): n is a, c, g, or t
atcagggattgccctgcaaactgggggcattgtgggaatatccaagtctctggctccaaagaaagaggtggagtgtgcatcctcctcctcaacctttagaggctggtaaagagtggccttgatgattttcagtggagattctttctcctctgtgggatggaaaatagaggattttacagaggggcttaagagtggataangtgggtgactgttatccatgggtctcaattatttctgagccctggtttgctgcccgtgtgttataacaatgggaattatccagtgctttgtgacacagtagagatccatatgcctacatgtgcatcttagtcatttaaaattgaactctttggatgatttcagttttcactttttgtggcttgtgtttcggtatcacaggaaagtgcctcactccctttcggtattctaccagcatttcattctctgcctcagaagctcccttgccttctgtggcttgaacagcatcttcctctgttggcgtttgtttcaccaaacttactgtgaggccactttattcattttgtcccatggctgcatgacagctaaccctcactctccatgtttacgcttatcacaggtttgaatattggcagcggtgcattcgagacaaagacagctaacaaaattgcttcggaagctagtttttcatctagtgaaggaagtcctttgtcaaggtaaagttgtgaaagcctttctgaatagcagcaacaagatgagaaatgtcacagcgcaatgaattaaactctggctgcgtattattttgttgtatgacttggagggttatggtttgggtttttgtttatctaaaataacagttgaaactttagtctacctttgaaaatatttgcaccagagccaagtattgttttgcagctgttgtttccttggtttaagactcaattgacacctcagtgaaccacaaattagcgtctacagctgctcgcagtaggactgcttagagaccacacaatggaggttgtcagaaaaagggcagagagaaaacatcaggccttaaaagaaataaagtggcatgtttcttctttttgtganggctaatatataaactagtaattgctggatattcatttttattttcctctttttttttaaccaagtgtttaggctaggttattctttccttttctaatactttcttgcttattttccataaagaacaaaatttatcttttcacatttgtcaaactgtagcactcgcttcttgtaggttttttgagctgtgataagagagttgtgtgctgaatttgtcattaacataaaatactaatcacagtagcttcaggtcacttagaatttatagatgggaatataagccatcacctgatgaaataccctactcttttgctttgagctaaatattgtttaaaatggcatagcaactttccttttggaacagcattgctcagtaaaaaggtgtccttcagatgattatattacatttgaattaactgcttgtctctgatgaaattttagaacaggaactttacatttctagtataacatataatgttccataagagaaaatgatttgaaccagaaatgctgaattttttaaatgaaaaaaatcctatttttattcatattttataaacaatacaatgtttttagaacctggagtatattaaaatgagattgaatttctaaaattataagttttagaaacttgacaagttaagttttagagaaataactcatttaattttcagaagttattatttttaatgcctgagttttcgtccatatttttgaaggaagtgggaggtaaatgggacaggaagagtgttaaagtattatgttattatgattgtattataaattcaagttctaggtctcctaaaagaaagtttaaaagacagtaaattctacagataattttcagggccgaatgttaccatttggcttaataatatatagaggcactaaaaaactcacttcttcctaaacagtctttacgtaggttctttgggaaatttttaaagacattgagaaagcaattggattttgtaaaacatttctcagtctaataatttcacatcttgtctatattttactaaactaaaatcaagcattttcctccttcaaattgagacagaggtattttgttattagtatcgtttccgtatgaaattaatttcctaataaattacaagtaatctcatcatcccctttaag

SEQ ID NO: 374221 - DNA, 524 bp, Homo sapiens
agaaaatacatcaattaatacatattttgttgcccagccctgtgtgatccttctctctctctgcagtatgcataatgcatagaagcatagtgaagacttggaaaagactttcagcaaaggaattgtttaaaaataaacagaagcctatcagttgctgaagaaggccacccttcaggataatacaaatcaaactgaaaacaggtttcaaaagacagatgcttctgtgtcacacttgtcaggtttgaatattggcagcggtgcattcgagacaaagacagctaacaaaattgcttcggaagctagtttttcatctagtgaaggaagtcctttgtcaaggcatgaaaacaaaaagaaacccgtgatcaatttaaaatctaatgccctctgggatgagtctgatgacagtaactcagaaattgaggctgctttacgccccagaaaccataacaccgatgattctgatgatttttatgactaacgtgctgtgacattggtttcaaataaagtctttaaacaaactaaaa

SEQ ID NO: 374222 - DNA, 486 bp, Homo sapiens
tgcctgagggctttctctggctgcaggagcgtgctcagccctcacaaggcagcccaaagtaccagggagttgatgccctgggttgagagcaaccctcaaccaacagaggcaagttggtggatcagtaaccccactcccttgctcttcactgggacaatctggggagagttctgcagtctctcagggggccccagcaggctgagccttgcctgtccactcactgccaggcacccactcgtcatcatacccttcattggcttcctgtcttccttgtgtcactgtccccatggttcctgggatcacctctcaagtaaatgatgtggaccaaagtcctgtctcaggccctctgggatgagtctgatgacagtaactcagaaattgaggctgctttacgccccagaaaccataacaccgatgattctgatgatttttatgactaacgtgctgtgacattggtttcaaataaagtctttaaacaaactaaaa

SEQ ID NO: 374223 - DNA, 2021 bp, Homo sapiens
agcggaggcggcccggcgcggtgtttacccgcggtgcatggtggggcggtctccttcggcaaccccggccgaacggccacccagaggctgtgctgagctggcgcagcggcagcagcatgagccggaccctcgcatcggccgtgcccctgtcgagtcccgactactacgagaggctgggccaactccagcacgggctgcgggacagtgaaaagaagagattggacctggaaaagaaactttatgaatataatcagtctgatacatgcagctcgaatatgagactcaaattaagaagatgctatgctcaaaagatagcctgggactaaaagaggaactgacagatgaagacagagaaaaggttgcagtgcaggaggggattaactcaggaacagccatgtcaagaggattgtatcaaccagcaacaatctttatgggccgccaaatgtcagccatcttaagcatgagagatttcagtacagagcacaaatctccccagcccacaaagaacttttcaattcctgacccacattcacaccgacagacagcccagagcagtaatgtgacagacagctgtgtagtacaaactagtaatgacacacagtgcttaaataagtctgacaacatagatggaaaggcatctcttcagattggtgagaaaatgccagtcacagccagtgtattgtctgaggaggaacaaactcattgcttggagataggaagtaacacacgtcatggcaagagtaatttatctgaaggcaaaaagtctgctgaactcaattccccgttacgggaaagattaagtccagagaacagaaccactgatttaaagtgtgacagttccagcggatcagagggagaaatactgacacgggaacatattgaagttgaggaaaaaagagccagcccgccagtctctccgataccagtttcagaatactgtgaatctgaaaataagtggtctcaagagaagcattctccttgggaaggtgtttcagatcatcttgctcacagggaaccaaagtcacaaaagcccttcagaaaaatgcaggaagaggaggaggaaagttggagcaccagcagtgaccttaccatttcaataagtgaagatgatctgattttagagagcccagaaccacagccaaatccaggtggcaagatggagggagaagatggaatagaggccttaaaattaatccatgctgagcaagaaagagttgccctatccactgaaaaaaattgtattttgcaaaccctaagctctcctgattcagaaaaggaatcctccactaacgcaccaacaagagaacctggacaaacaccagactcagacgtaccgagggcacaggtgggtcagcatgttgccaccttgaaagaacatgataattctgtcaaagaagaggcaacagcattattgagaaaagcccttacagaagagtgtggccgtaggtcagctattcacagtagtgaatcatcttgcagcttgccatctattctgaatgacaatagtggaataaaggaagccaaacctgctgtatggctcaacagtgttcctacaagggaacaagaagtttcaagtggctgtggagacaagagcaagaaagaaaatgtggctgcagatatcccaatcacagaaacagaagcctatcagttgctgaagaaggccacccttcaggataatacaaatcaaactgaaaacaggtttcaaaagacagatgcttctgtgtcacacttgtcaggtttgaatattggcagcggtgcattcgagacaaagacagctaacaaaattgcttcggaagctagtttttcatctagtgaaggaagtcctttgtcaaggcatgaaaacaaaaagaaacccgtgatcaatttaaaatctaatgccctctgggatgagtctgatgacagtaactcagaaattgaggctgctttacgccccagaaaccataacaccgatgattctgatgatttttatgactaacgtgctgtgacattggtttcaaataaagtctttaaacaaactaaaa

SEQ ID NO: 374224 - DNA, 1987 bp, Homo sapiens
gggacacctgtctgagcagtatgtgccagacagctgtgtagtacaaactagtaatgacacacagggcttaaataagtctgacaacatagatggaaaggcatctcttcagattggtgagaaaacgccagtcacagccagtgtattgtctgaggaggaacaaactcattgcttggagataggaagtaacacacgtcatggcaagagtaatttatctgaaggcaaaaagtccgctgactcgaatatgagactcaaattaagaagatgctatgctcaaaagatagcctgggactaaaagaggaactgacagatgaagacagagaaaaggttgcagtgcaggaggggattaactcaggaacagccatgtcaagaggattgtatcaaccagcaacaatctttatgggccgccaaatgtcagccatcttaagcatgagagatttcagtacagagcacaaatctccccagcccacaaagaacttttcaattcctgacccacattcacaccgacagacagcccagagcagtaatgtgacagacagctgtgtagtacaaactagtaatgacacacagtgcttaaataagtctgacaacatagatggaaaggcatctcttcagattggtgagaaaatgccagtcacagccagtgtattgtctgaggaggaacaaactcattgcttggagataggaagtaacacacgtcatggcaagagtaatttatctgaaggcaaaaagtctgctgaactcaattccccgttacgggaaagattaagtccagagaacagaaccactgatttaaagtgtgacagttccagcggatcagagggagaaatactgacacgggaacatattgaagttgaggaaaaaagagccagcccgccagtctctccgataccagtttcagaatactgtgaatctgaaaataagtggtctcaagagaagcattctccttgggaaggtgtttcagatcatcttgctcacagggaaccaaagtcacaaaagcccttcagaaaaatgcaggaagaggaggaggaaagttggagcaccagcagtgaccttaccatttcaataagtgaagatgatctgattttagagagcccagaaccacagccaaatccaggtggcaagatggagggagaagatggaatagaggccttaaaattaatccatgctgagcaagaaagagttgccctatccactgaaaaaaattgtattttgcaaaccctaagctctcctgattcagaaaaggaatcctccactaacgcaccaacaagagaacctggacaaacaccagactcagacgtaccgagggcacaggtgggtcagcatgttgccaccttgaaagaacatgataattctgtcaaagaagaggcaacagcattattgagaaaagcccttacagaagagtgtggccgtaggtcagctattcacagtagtgaatcatcttgcagcttgccatctattctgaatgacaatagtggaataaaggaagccaaacctgctgtatggctcaacagtgttcctacaagggaacaagaagtttcaagtggctgtggagacaagagcaagaaagaaaatgtggctgcagatatcccaatcacagaaacagaagcctatcagttgctgaagaaggccacccttcaggataatacaaatcaaactgaaaacaggtttcaaaagacagatgcttctgtgtcacacttgtcaggtttgaatattggcagcggtgcattcgagacaaagacagctaacaaaattgcttcggaagctagtttttcatctagtgaaggaagtcctttgtcaaggcatgaaaacaaaaagaaacccgtgatcaatttaaaatctaatgccctctgggatgagtctgatgacagtaactcagaaattgaggctgctttacgccccagaaaccataacaccgatgattctgatgatttttatgactaacgtgctgtgacattggtttcaaataaagtctttaaacaaactaaaa

SEQ ID NO: 374225 - DNA, 2130 bp, Homo sapiens
agcggaggcggcccggcgcggtgtttacccgcggtgcatggtggggcggtctccttcggcaaccccggccgaacggccacccagaggctgtgctgagctggcgcagcggcagcagcatgagccggaccctcgcatcggccgtgcccctgtcgagtcccgactactacgagaggctgggccaactccagcacgggctgcgggacagtgaaaagaagagattggacctggaaaagaaactttatgaatataatcagtctgatacatgcagagttaagctgaaatatgtaaaactaaagaattatctgaaggaaatatgtgaatctgaaaagaaggctcatactcgaaaccaagaatatttaaagcgatttgagcgtgtccaagctcatgttgtacacttcaccacaaatacagagaagcttcaaaaactgaagctcgaatatgagactcaaattaagaagatgctatgctcaaaagatagcctgggactaaaagaggaactgacagatgaagacagagaaaaggttgcagtgcaggaggggattaactcaggaacagccatgtcaagaggattgtatcaaccagcaacaatctttatgggccgccaaatgtcagccatcttaagcatgagagatttcagtacagagcacaaatctccccagcccacaaagaacttttcaattcctgacccacattcacaccgacagacagcccagagcagtaatgtgacagacagctgtgtagtacaaactagtaatgacacacagtgcttaaataagtctgacaacatagatggaaaggcatctcttcagattggtgagaaaatgccagtcacagccagtgtattgtctgaggaggaacaaactcattgcttggagataggaagtaacacacgtcatggcaagagtaatttatctgaaggcaaaaagtctgctgaactcaattccccgttacgggaaagattaagtccagagaacagaaccactgatttaaagtgtgacagttccagcggatcagagggagaaatactgacacgggaacatattgaagttgaggaaaaaagagccagcccgccagtctctccgataccagtttcagaatactgtgaatctgaaaataagtggtctcaagagaagcattctccttgggaaggtgtttcagatcatcttgctcacagggaaccaaagtcacaaaagcccttcagaaaaatgcaggaagaggaggaggaaagttggagcaccagcagtgaccttaccatttcaataagtgaagatgatctgattttagagagcccagaaccacagccaaatccaggtggcaagatggagggagaagatggaatagaggccttaaaattaatccatgctgagcaagaaagagttgccctatccactgaaaaaaattgtattttgcaaaccctaagctctcctgattcagaaaaggaatcctccactaacgcaccaacaagagaacctggacaaacaccagactcagacgtaccgagggcacaggcaacagcattattgagaaaagcccttacagaagagtgtggccgtaggtcagctattcacagtagtgaatcatcttgcagcttgccatctattctgaatgacaatagtggaataaaggaagccaaacctgctgtatggctcaacagtgttcctacaagggaacaagaagtttcaagtggctgtggagacaagagcaagaaagaaaatgtggctgcagatatcccaatcacagaaacagaagcctatcagttgctgaagaaggccacccttcaggataatacaaatcaaactgaaaacaggtttcaaaagacagatgcttctgtgtcacacttgtcaggtttgaatattggcagcggtgcattcgagacaaagacagctaacaaaattgcttcggaagctagtttttcatctagtgaaggaagtcctttgtcaaggcatgaaaacaaaaagaaacccgtgatcaatttaaaatctaatgccctctgggatgagtctgatgacagtaactcagaaattgaggctgctttacgccccagaaaccataacaccgatgattctgatgatttttatgactaacgtgctgtgacattggtttcaaataaagtctttaaacaaactaaaa

SEQ ID NO: 374226 - DNA, 861 bp, Homo sapiens
taagattcagccctcaaaaagtgtattattgtgagggtaacttgtaaagaattagattatagtagaaaataaccaggtgttttttttcttgacattttaatttcatttaaatgtgggaaacagattaaatcctaagtaaagcttaacttaaaattatatttgaaggctatctttgagaccaagaggaatgtggctacagtttgtttttatttctttgtgctttttttgaaacactgtaggcaacagcattattgagaaaagcccttacagaagagtgtggccgtaggtcagctattcacagtagtgaatcatcttgcagcttgccatctattctgaatgacaatagtggaataaaggaagccaaacctgctgtatggctcaacagtgttcctacaagggaacaagaagtttcaagtggctgtggagacaagagcaagaaagaaaatgtggctgcagatatcccaatcacagaaacagaagcctatcagttgctgaagaaggccacccttcaggataatacaaatcaaactgaaaacaggtttcaaaagacagatgcttctgtgtcacacttgtcaggtttgaatattggcagcggtgcattcgagacaaagacagctaacaaaattgcttcggaagctagtttttcatctagtgaaggaagtcctttgtcaaggcatgaaaacaaaaagaaacccgtgatcaatttaaaatctaatgccctctgggatgagtctgatgacagtaactcagaaattgaggctgctttacgccccagaaaccataacaccgatgattctgatgatttttatgactaacgtgctgtgacattggtttcaaataaagtctttaaacaaactaaaa

SEQ ID NO: 374227 - DNA, 2506 bp, Homo sapiens
  misc_feature (2320)..(2320): n is a, c, g, or t
  misc_feature (2445)..(2445): n is a, c, g, or t
  misc_feature (2468)..(2468): n is a, c, g, or t
  misc_feature (2473)..(2473): n is a, c, g, or t
agcggaggcggcccggcgcggtgtttacccgcggtgcatggtggggcggtctccttcggcaaccccggccgaacggccacccagaggctgtgctgagctggcgcagcggcagcagcatgagccggaccctcgcatcggccgtgcccctgtcgagtcccgactactacgagaggctgggccaactccagcacgggctgcgggacagtgaaaagaagagattggacctggaaaagaaactttatgaatataatcagtctgatacatgcagagttaagctgaaatatgtaaaactaaagaattatctgaaggaaatatgtgaatctgaaaagaaggctcatactcgaaaccaagaatatttaaagcgatttgagcgtgtccaagctcatgttgtacacttcaccacaaatacagagaagcttcaaaaactgaagctcgaatatgagactcaaattaagaagatgctatgctcaaaagatagcctgggactaaaagaggaactgacagatgaagacagagaaaaggttgcagtgcaggaggggattaactcaggaacagccatgtcaagaggattgtatcaaccagcaacaatctttatgggccgccaaatgtcagccatcttaagcatgagagatttcagtacagagcacaaatctccccagcccacaaagaacttttcaattcctgacccacattcacaccgacagacagcccagagcagtaatgtgacagacagctgtgtagtacaaactagtaatgacacacagtgcttaaataagtctgacaacatagatggaaaggcatctcttcagattggtgagaaaatgccagtcacagccagtgtattgtctgaggaggaacaaactcattgcttggagataggaagtaacacacgtcatggcaagagtaatttatctgaaggcaaaaagtctgctgaactcaattccccgttacgggaaagattaagtccagagaacagaaccactgatttaaagtgtgacagttccagcggatcagagggagaaatactgacacgggaacatattgaagttgaggaaaaaagagccagcccgccagtctctccgataccagtttcagaatactgtgaatctgaaaataagtggtctcaagagaagcattctccttgggaaggtgtttcagatcatcttgctcacagggaaccaaagtcacaaaagcccttcagaaaaatgcaggaagaggaggaggaaagttggagcaccagcagtgaccttaccatttcaataagtgaagatgatctgattttagagagcccagaaccacagccaaatccaggtggcaagatggagggagaagatggaatagaggccttaaaattaatccatgctgagcaagaaagagttgccctatccactgaaaaaaattgtattttgcaaaccctaagctctcctgattcagaaaaggaatcctccactaacgcaccaacaagagaacctggacaaacaccagactcagacgtaccgagggcacaggtgggtcagcatgttgccaccttgaaagaacatgataattctgtcaaagaagaggcaacagcattattgagaaaagcccttacagaagagtgtggccgtaggtcagctattcacagtagtgaatcatcttgcagcttgccatctattctgaatgacaatagtggaataaaggaagccaaacctgctgtatggctcaacagtgttcctacaagggaacaagaagtttcaagtggctgtggagacaagagcaagaaagaaaatgtggctgcagatatcccaatcacagaaacagaagcctatcagttgctgaagaaggccacccttcaggataatacaaatcaaactgaaaacaggtttcaaaagacagatgcttctgtgtcacacttgtcaggtttgaatattggcagcggtgcattcgagacaaagacagctaacaaaattgcttcggaagctagtttttcatctagtgaaggaagtcctttgtcaaggcatgaaaacaaaaagaaacccgtgatcaatttaaaatctaatgccctctgggatgagtctgatgacagtaactcagaaattgaggctgctttacgccccagaaaccataacaccgatgattctgatgatttttatgactaacgtgctgtgacattggtttcaaataaagtctttaaacaaactaaaaaaaaaaaaaaaaaaaaaaaaacctcgtgccgaattcggcacgaggtgacgcggtacagctgcccaagggcgttcgtaacgggaatgccgaagcgtgggaaaaagggagcggtggcggaagacggggatgagctcangacaggggtttgtgaagaagtccaggaaccgaggctttcggtggtctataagtacgccgaatcgcagttggaaccaccactttttgcagatatatactcatttatagagccgaggcaagagagtnagacgccgcaagaaaatgccaanagccncggagaggcccaacctgttgaagacccccagac

SEQ ID NO: 374228 - DNA, 3908 bp, Homo sapiens
  misc_feature (2372)..(2372): n is a, c, g, or t
agcggaggcggcccggcgcggtgtttacccgcggtgcatggtggggcggtctccttcggcaaccccggccgaacggccacccagaggctgtgctgagctggcgcagcggcagcagcatgagccggaccctcgcatcggccgtgcccctgtcgagtcccgactactacgagaggctgggccaactccagcacgggctgcgggacagtgaaaagaagagattggacctggaaaagaaactttatgaatataatcagtctgatacatgcagagttaagctgaaatatgtaaaactaaagaattatctgaaggaaatatgtgaatctgaaaagaaggctcatactcgaaaccaagaatatttaaagcgatttgagcgtgtccaagctcatgttgtacacttcaccacaaatacagagaagcttcaaaaactgaagctcgaatatgagactcaaattaagaagatgctatgctcaaaagatagcctgggactaaaagaggaactgacagatgaagacagagaaaaggttgcagtgcaggaggggattaactcaggaacagccatgtcaagaggattgtatcaaccagcaacaatctttatgggccgccaaatgtcagccatcttaagcatgagagatttcagtacagagcacaaatctccccagcccacaaagaacttttcaattcctgacccacattcacaccgacagacagcccagagcagtaatgtgacagacagctgtgtagtacaaactagtaatgacacacagtgcttaaataagtctgacaacatagatggaaaggcatctcttcagattggtgagaaaatgccagtcacagccagtgtattgtctgaggaggaacaaactcattgcttggagataggaagtaacacacgtcatggcaagagtaatttatctgaaggcaaaaagtctgctgaactcaattccccgttacgggaaagattaagtccagagaacagaaccactgatttaaagtgtgacagttccagcggatcagagggagaaatactgacacgggaacatattgaagttgaggaaaaaagagccagcccgccagtctctccgataccagtttcagaatactgtgaatctgaaaataagtggtctcaagagaagcattctccttgggaaggtgtttcagatcatcttgctcacagggaaccaaagtcacaaaagcccttcagaaaaatgcaggaagaggaggaggaaagttggagcaccagcagtgaccttaccatttcaataagtgaagatgatctgattttagagagcccagaaccacagccaaatccaggtggcaagatggagggagaagatggaatagaggccttaaaattaatccatgctgagcaagaaagagttgccctatccactgaaaaaaattgtattttgcaaaccctaagctctcctgattcagaaaaggaatcctccactaacgcaccaacaagagaacctggacaaacaccagactcagacgtaccgagggcacaggtgggtcagcatgttgccaccttgaaagaacatgataattctgtcaaagaagaggcaacagcattattgagaaaagcccttacagaagagtgtggccgtaggtcagctattcacagtagtgaatcatcttgcagcttgccatctattctgaatgacaatagtggaataaaggaagccaaacctgctgtatggctcaacagtgttcctacaagggaacaagaagtttcaagtggctgtggagacaagagcaagaaagaaaatgtggctgcagatatcccaatcacagaaacagaagcctatcagttgctgaagaaggccacccttcaggataatacaaatcaaactgaaaacaggtttcaaaagacagatgcttctgtgtcacacttgtcaggtttgaatattggcagcggtgcattcgagacaaagacagctaacaaaattgcttcggaagctagtttttcatctagtgaaggaagtcctttgtcaaggtaaagttgtgaaagcctttctgaatagcagcaacaagatgagaaatgtcacagcgcaatgaattaaactctggctgcgtattattttgttgtatgacttggagggttatggtttgggtttttgtttatctaaaataacagttgaaactttagtctacctttgaaaatatttgcaccagagccaagtattgttttgcagctgttgtttccttggtttaagactcaattgacacctcagtgaaccacaaattagcgtctacagctgctcgcagtaggactgcttagagaccacacaatggaggttgtcagaaaaagggcagagagaaaacatcaggccttaaaagaaataaagtggcatgtttcttctttttgtganggctaatatataaactagtaattgctggatattcatttttattttcctctttttttttaaccaagtgtttaggctaggttattctttccttttctaatactttcttgcttattttccataaagaacaaaatttatcttttcacatttgtcaaactgtagcactcgcttcttgtaggttttttgagctgtgataagagagttgtgtgctgaatttgtcattaacataaaatactaatcacagtagcttcaggtcacttagaatttatagatgggaatataagccatcacctgatgaaataccctactcttttgctttgagctaaatattgtttaaaatggcatagcaactttccttttggaacagcattgctcagtaaaaaggtgtccttcagatgattatattacatttgaattaactgcttgtctctgatgaaattttagaacaggaactttacatttctagtataacatataatgttccataagagaaaatgatttgaaccagaaatgctgaattttttaaatgaaaaaaatcctatttttattcatattttataaacaatacaatgtttttagaacctggagtatattaaaatgagattgaatttctaaaattataagttttagaaacttgacaagttaagttttagagaaataactcatttaattttcagaagttattatttttaatgcctgagttttcgtccatatttttgaaggaagtgggaggtaaatgggacaggaagagtgttaaagtattatgttattatgattgtattataaattcaagttctaggtctcctaaaagaaagtttaaaagacagtaaattctacagataattttcagggccgaatgttaccatttggcttaataatatatagaggcactaaaaaactcacttcttcctaaacagtctttacgtaggttctttgggaaatttttaaagacattgagaaagcaattggattttgtaaaacatttctcagtctaataatttcacatcttgtctatattttactaaactaaaatcaagcattttcctccttcaaattgagacagaggtattttgttattagtatcgtttccgtatgaaattaatttcctaataaattacaagtaatctcatcatcccctttaagaaaacaaaaaaaaaaaccacacaaaaaggccttgaaggaactcttggttctaggcacttgataataatccagtgatgaaaaggtctgggtccagagtgcgtgggtttggcgtgctgtttgtcacggtttggttcttgtgctgggcttggtgttgttcatatgccaccctgggctttggagagctccagttttgctgtttgtgctggattcactgaaatttcttagaggcttacatttaaggatcccacttactgcagtcactccttgtgctttattgcttttacaagtggtctcgaaacccggtacttgagaataaacataacagtgcagtgctgctgtagcacttttaaaattcttctttgctctattttgtcagtgagctgatgagcaacctca

SEQ ID NO: 374229 - DNA, 2416 bp, Homo sapiens
agcggaggcggcccggcgcggtgtttacccgcggtgcatggtggggcggtctccttcggcaaccccggccgaacggccacccagaggctgtgctgagctggcgcagcggcagcagcatgagccggaccctcgcatcggccgtgcccctgtcgagtcccgactactacgagaggctgggccaactccagcacgggctgcgggacagtgaaaagaagagattggacctggaaaagaaactttatgaatataatcagtctgatacatgcagagttaagctgaaatatgtaaaactaaagaattatctgaaggaaatatgtgaatctgaaaagaaggctcatactcgaaaccaagaatatttaaagcgatttgagcgtgtccaagctcatgttgtacacttcaccacaaatacagagaagcttcaaaaactgaagctcgaatatgagactcaaattaagaagatgctatgctcaaaagatagcctgggactaaaagaggaactgacagatgaagacagagaaaaggttgcagtgcaggaggggattaactcaggaacagccatgtcaagaggattgtatcaaccagcaacaatctttatgggccgccaaatgtcagccatcttaagcatgagagatttcagtacagagcacaaatctccccagcccacaaagaacttttcaattcctgacccacattcacaccgacagacagcccagagcagtaatgtgacagacagctgtgtagtacaaactagtaatgacacacagtgcttaaataagtctgacaacatagatggaaaggcatctcttcagattggtgagaaaatgccagtcacagccagtgtattgtctgaggaggaacaaactcattgcttggagataggaagtaacacacgtcatggcaagagtaatttatctgaaggcaaaaagtctgctgaactcaattccccgttacgggaaagattaagtccagagaacagaaccactgatttaaagtgtgacagttccagcggatcagagggagaaatactgacacgggaacatattgaagttgaggaaaaaagagccagcccgccagtctctccgataccagtttcagaatactgtgaatctgaaaataagtggtctcaagagaagcattctccttgggaaggtgtttcagatcatcttgctcacagggaaccaaagtcacaaaagcccttcagaaaaatgcaggaagaggaggaggaaagttggagcaccagcagtgaccttaccatttcaataagtgaagatgatctgattttagagagcccagaaccacagccaaatccaggtggcaagatggagggagaagatggaatagaggccttaaaattaatccatgctgagcaagaaagagttgccctatccactgaaaaaaattgtattttgcaaaccctaagctctcctgattcagaaaaggaatcctccactaacgcaccaacaagagaacctggacaaacaccagactcagacgtaccgagggcacaggtgggtcagcatgttgccaccttgaaagaacatgataattctgtcaaagaagaggcaacagcattattgagaaaagcccttacagaagagtgtggccgtaggtcagctattcacagtagtgaatcatcttgcagcttgccatctattctgaatgacaatagtggaataaaggaagccaaacctgctgtatggctcaacagtgttcctacaagggaacaagaagtttcaagtggctgtggagacaagagcaagaaagaaaatgtggctgcagatatcccaatcacagaaacagaagcctatcagttgctgaagaaggccacccttcaggataatacaaatcaaactgaaaacaggtttcaaaagacagatgcttctgtgtcacacttgtcaggtttgaatattggcagcggtgcattcgagacaaagacagctaacaaaattgcttcggaagctagtttttcatctagtgaaggaagtcctttgtcaaggcatgaaaacaaaaagaaacccgtgatcaatttaaaatctaatggtgagagagataatcggacactagattttctttttctgttttaaccaaaaaactctgtgacatgcatttgttgtttgcaccctcatgtgagtcctgaagcgggcatgctcacagggactgccattgcagctgtccctggggtggaacctgagggcttctggaggctcagttcttcacagacaggaccacacgggtgccatggaccacaggggcagagcattgtaatttgcaaccctctgggatgagtctgatgacagtaactcagaaattgaggctgctttacgccccagaaaccataacaccgatgattctgatgatttttatgactaacgtgctgtgacattggtttcaaataaagtctttaaacaaactaaaa

SEQ ID NO: 374230 - DNA, 1636 bp, Homo sapiens
agcggaggcggcccggcgcggtgtttacccgcggtgcatggtggggcggtctccttcggcaaccccggccgaacggccacccagaggctgtgctgagctggcgcagcggcagcagcatgagccggaccctcgcatcggccgtgcccctgtcgagtcccgactactacgagaggctgggccaactccagcacgggctgcgggacagtgaaaagaagagattggacctggaaaagaaactttatgaatataatcagtctgatacatgcagagttaagctgaaatatgtaaaactaaagaattatctgaaggaaatatgtgaatctgaaaagaaggctcatactcgaaaccaagaatatttaaagcgatttgagcgtgtccaagctcatgttgtacacttcaccacaaatacagagaagcttcaaaaactgaagctcgaatatgagactcaaattaagaagatgctatgctcaaaagatagcctgggactaaaagaggaactgacagatgaagacagagaaaaggttgcagtgcaggaggggattaactcaggaacagccatgtcaagaggattgtatcaaccagcaacaatctttatgggccgccaaatgtcagccatcttaagcatgagagatttcagtacagagcacaaatctccccagcccacaaagaacttttcaattcctgacccacattcacaccgacagacagcccagagcagtaatgtgacagacagctgtgtagtacaaactagtaatgacacacagtgcttaaataagtctgacaacatagatggaaaggcatctcttcagattggtgagaaaatgccagtcacagccagtgtattgtctgaggaggaacaaactcattgcttggagataggaagtaacacacgtcatggcaagagtaatttatctgaaggcaaaaagtctgctgaactcaattccccgttacgggaaagattaagtccagagaacagaaccactgatttaaagtgtgacagttccagcggatcagagggagaaatactgacacgggaacatattgaagttgaggaaaaaagagccagcccgccagtctctccgataccagtttcagaatactgtgaatctgaaaataagtggtctcaagagaagcattctccttgggaaggtgtttcagatcatcttgctcacagggaaccaaagtcacaaaagcccttcagaaaaatgcaggaagaggaggaggaaagttggagcaccagcagtgaccttaccatttcaataagtgaagatgatctgattttagagagcccagaaccacagccaaatccaggtggcaagatggagggagaagatggaatagaggccttaaaattaatccatgctgagcaagaaagagttgccctatccactgaaaaaaattgtattttgcaaaccctaagctctcctgattcagaaaaggaatcctccactaacgcaccaacaagagaacctggacaaacaccagactcagacgtaccgagggcacaggtgggtcagcatgttgccaccttgaaagaacatgataattctgtcaaagaagaggtaggtagctaaactgtctgaagttttcccaatcacaaatgtggaccacagggtaaggttagtaatttttattt

SEQ ID NO: 374231 - DNA, 2242 bp, Homo sapiens
atatttgcagggtttcctgtgtccagaagaacaaggccctggctgtgagaagggcggtggtggtgcgtggggtagggcaaagtgtcgagccatgcaccaagaatggtttctctcccaacatctcctgtgaccattcaggcaattctgaaagaatctcagcatcataaaacattcgagtgacactccctgaggagacttttaaattcattaaaattgcaaaagctcctgaaaaggcacacagagaaatcatatcccgtggagccagttttcttgtcatattggcctcagtcgagacggtcctggacgccacgaacactagcatttatgtgacacttgcagggccctctaccaggtgtttgttttgaactcctttcttaactgttagtattgctgccactggtttgactaagtattttaacttccttaccaacatcttgaattccctactgcaagtgtttcatttttagcttgcctgaaagcactgaagtttgatgcatcactgtcttccagaagactgttgagggaaaccggtcccctgcctcaggggaacatgcgatcatcctcccccaagaacacgtggccccacacaggcacagctcagcagggcggggtgggccatgcagacctgccgaggggacacacgcaggacgggagcaatgctgttgagtagcgaccctcccgacaaggccacgctgcatcccgatattttccctttacttttaaactctgggaagtaagtgtaaagttctggcctccagtgaatcaaagtgcttcttctctaatgcgttcattatgaaaatattagtctcattgtcttttctttttcagaacttagactgtttctttattttgcaggcatgaaaacaaaaagaaacccgtgatcaatttaaaatctaatggtgagagagataatcggacactagattttctttttctgttttaaccaaaaaactctgtgacatgcatttgttgtttgcaccctcatgtgagtcctgaagcgggcatgctcacagggactgccattgcagctgtccctggggtggaacctgagggcttctggaggctcagttcttcacagacaggaccacacgggtgccatggaccacaggggcagagcattgtaatttgcaagtatgaatttgcaggggatcctggcctccatgtctaattaattatcagcaccctgtattttaccaatgaaatgtttcttgcctctctcctcatcctcagaagcacccattgctcatgaccggacaggctcttggagtaactctaactggtttcctcatacccagttcctcccagctcctgggaactcccagctcctccacctggccaccagcctccaaaccctggcttcccccgaccttcctgtgtaaggacggccaatgcctccccgtaccttcagggtagagtctgagctttctccattcctgggaggccccagccctgctctccagcttattcctcccaaggtcgcctctttgggtcaagccacagtcagcttttttcagctgtagcacacctatgcctctgtacctttgcccatgttgttccttctgtagggagttccttttccttttcctcagcccagtgagctcctattcatccttcaacacccaactcacgggaaaaatctagccctcctaccataacactgtggcatatcccctgcccagcttgggctctctcacctcctgtctccttaaaccccttataccttaaattaaaggtataatttgattaatagttttactgacaataacaaaatgattcagagctgctgtagaacctaggcctaggaatctgcctttttagcaagcaccccactgtgaatcactcttctagaaggacagctacctactgtgggggagacaagtacccagtgggttgtgatggagagtatgggcttgagtcagatgacttggatgggactcccagcttggccactcactggcattgtgattgtggccaatttcttaacccccttcagcgtccgtttgtttgcacagtgaaatggaaacattaatacttaccttgccaggctggtgcgaggatgagatggggttgtgtatgagaagtcagcacagagctggcaggtggtgccatgcaggtgtcagcagagttaagggattgttgatgtagtagacgtggtccgctccactacaccttgccagaccacctgcagggcacctcagctccaattcacagacgcgcctacagcttcctgcaccaagcagct

SEQ ID NO: 374232 - DNA, 2435 bp, Homo sapiens
  misc_feature (899)..(899): n is a, c, g, or t
agaaaatacatcaattaatacatattttgttgcccagccctgtgtgatccttctctctctctgcagtatgcataatgcatagaagcatagtgaagacttggaaaagactttcagcaaaggaattgtttaaaaattgttttatttttaaaaagaagaaagaaaaggcagaagtctggcaagaccaggaccactttcccaccaggcagcaattggctgaagccaaggagcagctgtgctctatagacaagtcatgtgcctccttgcctgctacagggcaggcccttcctgctgctcctgcctggccatagtcacttattggagaaacagaagcctatcagttgctgaagaaggccacccttcaggataatacaaatcaaactgaaaacaggtttcaaaagacagatgcttctgtgtcacacttgtcaggtttgaatattggcagcggtgcattcgagacaaagacagctaacaaaattgcttcggaagctagtttttcatctagtgaaggaagtcctttgtcaaggtaaagttgtgaaagcctttctgaatagcagcaacaagatgagaaatgtcacagcgcaatgaattaaactctggctgcgtattattttgttgtatgacttggagggttatggtttgggtttttgtttatctaaaataacagttgaaactttagtctacctttgaaaatatttgcaccagagccaagtattgttttgcagctgttgtttccttggtttaagactcaattgacacctcagtgaaccacaaattagcgtctacagctgctcgcagtaggactgcttagagaccacacaatggaggttgtcagaaaaagggcagagagaaaacatcaggccttaaaagaaataaagtggcatgtttcttctttttgtganggctaatatataaactagtaattgctggatattcatttttattttcctctttttttttaaccaagtgtttaggctaggttattctttccttttctaatactttcttgcttattttccataaagaacaaaatttatcttttcacatttgtcaaactgtagcactcgcttcttgtaggttttttgagctgtgataagagagttgtgtgctgaatttgtcattaacataaaatactaatcacagtagcttcaggtcacttagaatttatagatgggaatataagccatcacctgatgaaataccctactcttttgctttgagctaaatattgtttaaaatggcatagcaactttccttttggaacagcattgctcagtaaaaaggtgtccttcagatgattatattacatttgaattaactgcttgtctctgatgaaattttagaacaggaactttacatttctagtataacatataatgttccataagagaaaatgatttgaaccagaaatgctgaattttttaaatgaaaaaaatcctatttttattcatattttataaacaatacaatgtttttagaacctggagtatattaaaatgagattgaatttctaaaattataagttttagaaacttgacaagttaagttttagagaaataactcatttaattttcagaagttattatttttaatgcctgagttttcgtccatatttttgaaggaagtgggaggtaaatgggacaggaagagtgttaaagtattatgttattatgattgtattataaattcaagttctaggtctcctaaaagaaagtttaaaagacagtaaattctacagataattttcagggccgaatgttaccatttggcttaataatatatagaggcactaaaaaactcacttcttcctaaacagtctttacgtaggttctttgggaaatttttaaagacattgagaaagcaattggattttgtaaaacatttctcagtctaataatttcacatcttgtctatattttactaaactaaaatcaagcattttcctccttcaaattgagacagaggtattttgttattagtatcgtttccgtatgaaattaatttcctaataaattacaagtaatctcatcatcccctttaagaaaacaaaaaaaaaaaccacacaaaaaggccttgaaggaactcttggttctaggcacttgataataatccagtgatgaaaaggtctgggtccagagtgcgtgggtttggcgtgctgtttgtcacggtttggttcttgtgctgggcttggtgttgttcatatgccaccctgggctttggagagctccagttttgctgtttgtgctggattcactgaaatttcttagaggcttacatttaaggatcccacttactgcagtcactccttgtgctttattgcttttacaagtggtctcgaaacccggtacttgagaataaacataacagtgcagtgctgctgtagcacttttaaaattcttctttgctctattttgtcagtgagctgatgagcaacctca

SEQ ID NO: 374233 - DNA, 1813 bp, Homo sapiens
agaaaatacatcaattaatacatattttgttgcccagccctgtgtgatccttctctctctctgcagtatgcataatgcatagaagcatagtgaagacttggaaaagactttcagcaaaggaattgtttaaaaattgttttatttttaaaaagaagaaagaaaaggcagaagtctggcaagaccaggaccactttcccaccaggcagcaattggctgaagccaaggagcagctgtgctctatagacaagtcatgtgcctccttgcctgctacagggcaggcccttcctgctgctcctgcctggccatagtcacttattggagaaacagaagcctatcagttgctgaagaaggccacccttcaggataatacaaatcaaactgaaaacaggtttcaaaagacagatgcttctgtgtcacacttgtcaggcatgaaaacaaaaagaaacccgtgatcaatttaaaatctaatggtgagagagataatcggacactagattttctttttctgttttaaccaaaaaactctgtgacatgcatttgttgtttgcaccctcatgtgagtcctgaagcgggcatgctcacagggactgccattgcagctgtccctggggtggaacctgagggcttctggaggctcagttcttcacagacaggaccacacgggtgccatggaccacaggggcagagcattgtaatttgcaagtatgaatttgcaggggatcctggcctccatgtctaattaattatcagcaccctgtattttaccaatgaaatgtttcttgcctctctcctcatcctcagaagcacccattgctcatgaccggacaggctcttggagtaactctaactggtttcctcatacccagttcctcccagctcctgggaactcccagctcctccacctggccaccagcctccaaaccctggcttcccccgaccttcctgtgtaaggacggccaatgcctccccgtaccttcagggtagagtctgagctttctccattcctgggaggccccagccctgctctccagcttattcctcccaaggtcgcctctttgggtcaagccacagtcagcttttttcagctgtagcacacctatgcctctgtacctttgcccatgttgttccttctgtagggagttccttttccttttcctcagcccagtgagctcctattcatccttcaacacccaactcacgggaaaaatctagccctcctaccataacactgtggcatatcccctgcccagcttgggctctctcacctcctgtctccttaaaccccttataccttaaattaaaggtataatttgattaatagttttactgacaataacaaaatgattcagagctgctgtagaacctaggcctaggaatctgcctttttagcaagcaccccactgtgaatcactcttctagaaggacagctacctactgtgggggagacaagtacccagtgggttgtgatggagagtatgggcttgagtcagatgacttggatgggactcccagcttggccactcactggcattgtgattgtggccaatttcttaacccccttcagcgtccgtttgtttgcacagtgaaatggaaacattaatacttaccttgccaggctggtgcgaggatgagatggggttgtgtatgagaagtcagcacagagctggcaggtggtgccatgcaggtgtcagcagagttaagggattgttgatgtagtagacgtggtccgctccactacaccttgccagaccacctgcagggcacctcagctccaattcacagacgcgcctacagcttcctgcaccaagcagct

SEQ ID NO: 374234 - DNA, 1426 bp, Homo sapiens
cggacgcgtgggcttttctctgtcttcatctgtgtagtacaaactagtaatgacacacagtgcttaaataagtctgacaacatagatggaaaggcatctcttcagattggtgagaaaatgccagtcacagccagtgtattgtctgaggaggaacaaactcattgcttggagataggaagtaacacacgtcatggcaagagtaatttatctgaaggcaaaaagtctgctgaactcaattccccgttacgggaaagattaagtccagagaacagaaccactgatttaaagtgtgacagttccagcggatcagagggagaaatactgacacgggaacatattgaagttgaggaaaaaagagccagcccgccagtctctccgataccagtttcagaatactgtgaatctgaaaataagtggtctcaagagaagcattctccttgggaaggtgtttcagatcatcttgctcacagggaaccaaagtcacaaaagcccttcagaaaaatgcaggaagaggaggaggaaagttggagcaccagcagtgaccttaccatttcaataagtgaagatgatctgattttagagagcccagaaccacagccaaatccaggtggcaagatggagggagaagatggaatagaggccttaaaattaatccatgctgagcaagaaagagttgccctatccactgaaaaaaattgtattttgcaaaccctaagctctcctgattcagaaaaggaatcctccactaacgcaccaacaagagaacctggacaaacaccagactcagacgtaccgagggcacaggcaacagcattattgagaaaagcccttacagaagagtgtggccgtaggtcagctattcacagtagtgaatcatcttgcagcttgccatctattctgaatgacaatagtggaataaaggaagccaaacctgctgtatggctcaacagtgttcctacaagggaacaagaagtttcaagtggctgtggagacaagagcaagaaagaaaatgtggctgcagatatcccaatcacagaaacagaagcctatcagttgctgaagaaggccacccttcaggataatacaaatcaaactgaaaacaggtttcaaaagacagatgcttctgtgtcacacttgtcaggtttgaatattggcagcggtgcattcgagacaaagacagctaacaaaattgcttcggaagctagtttttcatctagtgaaggaagtcctttgtcaaggcatgaaaacaaaaagaaacccgtgatcaatttaaaatctaatgccctctgggatgagtctgatgacagtaactcagaaattgaggctgctttacgccccagaaaccataacaccgatgattctgatgatttttatgactaacgtgctgtgacattggtttcaaataaagtctttaaacaaactaaaa

SEQ ID NO: 374235 - DNA, 2228 bp, Homo sapiens
agcggaggcggcccggcgcggtgtttacccgcggtgcatggtggggcggtctccttcggcaaccccggccgaacggccacccagaggctgtgctgagctggcgcagcggcagcagcatgagccggaccctcgcatcggccgtgcccctgtcgagtcccgactactacgagaggctgggccaactccagcacgggctgcgggacagtgaaaagaagagattggacctggaaaagaaactttatgaatataatcagtctgatacatgcagagttaagctgaaatatgtaaaactaaagaattatctgaaggaaatatgtgaatctgaaaagaaggctcatactcgaaaccaagaatatttaaagcgatttgagcgtgtccaagctcatgttgtacacttcaccacaaatacagagaagcttcaaaaactgaaggttgggttctccctgaagcagacctggagaacagggatttgacgctcgaatatgagactcaaattaagaagatgctatgctcaaaagatagcctgggactaaaagaggaactgacagatgaagacagagaaaaggttgcagtgcaggaggggattaactcaggaacagccatgtcaagaggattgtatcaaccagcaacaatctttatgggccgccaaatgtcagccatcttaagcatgagagatttcagtacagagcacaaatctccccagcccacaaagaacttttcaattcctgacccacattcacaccgacagacagcccagagcagtaatgtgacagacagctgtgtagtacaaactagtaatgacacacagtgcttaaataagtctgacaacatagatggaaaggcatctcttcagattggtgagaaaatgccagtcacagccagtgtattgtctgaggaggaacaaactcattgcttggagataggaagtaacacacgtcatggcaagagtaatttatctgaaggcaaaaagtctgctgaactcaattccccgttacgggaaagattaagtccagagaacagaaccactgatttaaagtgtgacagttccagcggatcagagggagaaatactgacacgggaacatattgaagttgaggaaaaaagagccagcccgccagtctctccgataccagtttcagaatactgtgaatctgaaaataagtggtctcaagagaagcattctccttgggaaggtgtttcagatcatcttgctcacagggaaccaaagtcacaaaagcccttcagaaaaatgcaggaagaggaggaggaaagttggagcaccagcagtgaccttaccatttcaataagtgaagatgatctgattttagagagcccagaaccacagccaaatccaggtggcaagatggagggagaagatggaatagaggccttaaaattaatccatgctgagcaagaaagagttgccctatccactgaaaaaaattgtattttgcaaaccctaagctctcctgattcagaaaaggaatcctccactaacgcaccaacaagagaacctggacaaacaccagactcagacgtaccgagggcacaggtgggtcagcatgttgccaccttgaaagaacatgataattctgtcaaagaagaggcaacagcattattgagaaaagcccttacagaagagtgtggccgtaggtcagctattcacagtagtgaatcatcttgcagcttgccatctattctgaatgacaatagtggaataaaggaagccaaacctgctgtatggctcaacagtgttcctacaagggaacaagaagtttcaagtggctgtggagacaagagcaagaaagaaaatgtggctgcagatatcccaatcacagaaacagaagcctatcagttgctgaagaaggccacccttcaggataatacaaatcaaactgaaaacaggtttcaaaagacagatgcttctgtgtcacacttgtcaggtttgaatattggcagcggtgcattcgagacaaagacagctaacaaaattgcttcggaagctagtttttcatctagtgaaggaagtcctttgtcaaggcatgaaaacaaaaagaaacccgtgatcaatttaaaatctaatgccctctgggatgagtctgatgacagtaactcagaaattgaggctgctttacgccccagaaaccataacaccgatgattctgatgatttttatgactaacgtgctgtgacattggtttcaaataaagtctttaaacaaactaaaa

SEQ ID NO: 374236 - DNA, 1931 bp, Homo sapiens
agcggaggcggcccggcgcggtgtttacccgcggtgcatggtggggcggtctccttcggcaaccccggccgaacggccacccagaggctgtgctgagctggcgcagcggcagcagcatgagccggaccctcgcatcggccgtgcccctgtcgagtcccgactactacgagaggctgggccaactccagcacgggctgcgggacagtgaaaagaagagattggacctggaaaagaaactttatgaatataatcagtctgatacatgcaggttgcagtgcaggaggggattaactcaggaacagccatgtcaagaggattgtatcaaccagcaacaatctttatgggccgccaaatgtcagccatcttaagcatgagagatttcagtacagagcacaaatctccccagcccacaaagaacttttcaattcctgacccacattcacaccgacagacagcccagagcagtaatgtgacagacagctgtgtagtacaaactagtaatgacacacagtgcttaaataagtctgacaacatagatggaaaggcatctcttcagattggtgagaaaatgccagtcacagccagtgtattgtctgaggaggaacaaactcattgcttggagataggaagtaacacacgtcatggcaagagtaatttatctgaaggcaaaaagtctgctgaactcaattccccgttacgggaaagattaagtccagagaacagaaccactgatttaaagtgtgacagttccagcggatcagagggagaaatactgacacgggaacatattgaagttgaggaaaaaagagccagcccgccagtctctccgataccagtttcagaatactgtgaatctgaaaataagtggtctcaagagaagcattctccttgggaaggtgtttcagatcatcttgctcacagggaaccaaagtcacaaaagcccttcagaaaaatgcaggaagaggaggaggaaagttggagcaccagcagtgaccttaccatttcaataagtgaagatgatctgattttagagagcccagaaccacagccaaatccaggtggcaagatggagggagaagatggaatagaggccttaaaattaatccatgctgagcaagaaagagttgccctatccactgaaaaaaattgtattttgcaaaccctaagctctcctgattcagaaaaggaatcctccactaacgcaccaacaagagaacctggacaaacaccagactcagacgtaccgagggcacaggtgggtcagcatgttgccaccttgaaagaacatgataattctgtcaaagaagaggcaacagcattattgagaaaagcccttacagaagagtgtggccgtaggtcagctattcacagtagtgaatcatcttgcagcttgccatctattctgaatgacaatagtggaataaaggaagccaaacctgctgtatggctcaacagtgttcctacaagggaacaagaagtttcaagtggctgtggagacaagagcaagaaagaaaatgtggctgcagatatcccaatcacagaaacagaagcctatcagttgctgaagaaggccacccttcaggataatacaaatcaaactgaaaacaggtttcaaaagacagatgcttctgtgtcacacttgtcaggtttgaatattggcagcggtgcattcgagacaaagacagctaacaaaattgcttcggaagctagtttttcatctagtgaaggaagtcctttgtcaaggcatgaaaacaaaaagaaacccgtgatcaatttaaaatctaatgccctctgggatgagtctgatgacagtaactcagaaattgaggctgctttacgccccagaaaccataacaccgatgattctgatgatttttatgactaacgtgctgtgacattggtttcaaataaagtctttaaacaaactaaaa

SEQ ID NO: 374237 - DNA, 1858 bp, Homo sapiens
agcggaggcggcccggcgcggtgtttacccgcggtgcatggtggggcggtctccttcggcaaccccggccgaacggccacccagaggctgtgctgagctggcgcagcggcagcagcatgagccggaccctcgcatcggccgtgcccctgtcgagtcccgactactacgagaggctgggccaactccagcacgggctgcgggacagtgaaaagaagagattggacctggaaaagaaactttatgaatataatcagtctgatacatgcagagttaagctgaaatatgtaaaactaaagaattatctgaaggaaatatgtgaatctgaaaagaaggctcatactcgaaaccaagaatatttaaagcgatttgagcgtgtccaagctcatgttgtacacttcaccacaaatacagagaagcttcaaaaactgaagctcgaatatgagactcaaattaagaagatgctatgctcaaaagatagcctgggactaaaagaggaactgacagatgaagacagagaaaaggttgcagtgcaggaggggattaactcaggaacagccatgtcaagaggattgtatcaaccagcaacaatctttatgggccgccaaatgtcagccatcttaagcatgagagatttcagtacagagcacaaatctccccagcccacaaagaacttttcaattcctgacccacattcacaccgacagacagcccagagcagtaatgtgacagacagctgtgtagtacaaactagtaatgacacacagtgcttaaataagtctgacaacatagatggaaaggcatctcttcagattggtgagaaaatgccagtcacagccagtgtattgtctgaggaggaacaaactcattgcttggagataggaagtaacacacgtcatggcaagagtaatttatctgaaggcaaaaagtctgctgaactcaattccccgttacgggaaagattaagtccagagaacagaaccactgatttaaagtgtgacagttccagcggatcagagggagaaatactgacacgggaacatattgaagttgaggaaaaaagagccagcccgccagtctctccgataccagtttcagaatactgtgaatctgaaaataagtggtctcaagagaagcattctccttgggaaggtgtttcagatcatcttgctcacagggaaccaaagtcacaaaagcccttcagaaaaatgcaggaagaggaggaggaaagttggagcaccagcagtgaccttaccatttcaataagtgaagatgatctgattttagagagcccagaaccacagccaaatccaggtggcaagatggagggagaagatggaatagaggccttaaaattaatccatgctgagcaagaaagagttgccctatccactgaaaaaaattgtattttgcaaaccctaagctctcctgattcagaaagaaaatgtggctgcagatatcccaatcacagaaacagaagcctatcagttgctgaagaaggccacccttcaggataatacaaatcaaactgaaaacaggtttcaaaagacagatgcttctgtgtcacacttgtcaggtttgaatattggcagcggtgcattcgagacaaagacagctaacaaaattgcttcggaagctagtttttcatctagtgaaggaagtcctttgtcaaggcatgaaaacaaaaagaaacccgtgatcaatttaaaatctaatgccctctgggatgagtctgatgacagtaactcagaaattgaggctgctttacgccccagaaaccataacaccgatgattctgatgatttttatgactaacgtgctgtgacattggtttcaaataaagtctttaaacaaactaaaa

SEQ ID NO: 374238 - DNA, 3383 bp, Homo sapiens
agcggaggcggcccggcgcggtgtttacccgcggtgcatggtggggcggtctccttcggcaaccccggccgaacggccacccagaggctgtgctgagctggcgcagcggcagcagcatgagccggaccctcgcatcggccgtgcccctgtcgagtcccgactactacgagaggctgggccaactccagcacgggctgcgggacagtgaaaagaagagattggacctggaaaagaaactttatgaatataatcagtctgatacatgcagagttaagctgaaatatgtaaaactaaagaattatctgaaggaaatatgtgaatctgaaaagaaggctcatactcgaaaccaagaatatttaaagcgatttgagcgtgtccaagctcatgttgtacacttcaccacaaatacagagaagcttcaaaaactgaagctcgaatatgagactcaaattaagaagatgctatgctcaaaagatagcctgggactaaaagaggaactgacagatgaagacagagaaaaggttgcagtgcaggaggggattaactcaggaacagccatgtcaagaggattgtatcaaccagcaacaatctttatgggccgccaaatgtcagccatcttaagcatgagagatttcagtacagagcacaaatctccccagcccacaaagaacttttcaattcctgacccacattcacaccgacagacagcccagagcagtaatgtgacagacagctgtgtagtacaaactagtaatgacacacagtgcttaaataagtctgacaacatagatggaaaggcatctcttcagattggtgagaaaatgccagtcacagccagtgtattgtctgaggaggaacaaactcattgcttggagataggaagtaacacacgtcatggcaagagtaatttatctgaaggcaaaaagtctgctgaactcaattccccgttacgggaaagattaagtccagagaacagaaccactgatttaaagtgtgacagttccagcggatcagagggagaaatactgacacgggaacatattgaagttgaggaaaaaagagccagcccgccagtctctccgataccagtttcagaatactgtgaatctgaaaataagtggtctcaagagaagcattctccttgggaaggtgtttcagatcatcttgctcacagggaaccaaagtcacaaaagcccttcagaaaaatgcaggaagaggaggaggaaagttggagcaccagcagtgaccttaccatttcaataagtgaagatgatctgattttagagagcccagaaccacagccaaatccaggtggcaagatggagggagaagatggaatagaggccttaaaattaatccatgctgagcaagaaagagttgccctatccactgaaaaaaattgtattttgcaaaccctaagctctcctgattcagaaaaggaatcctccactaacgcaccaacaagagaacctggacaaacaccagactcagacgtaccgagggcacaggtgggtcagcatgttgccaccttgaaagaacatgataattctgtcaaagaagaggcaacagcattattgagaaaagcccttacagaagagtgtggccgtaggtcagctattcacagtagtgaatcatcttgcagcttgccatctattctgaatgacaatagtggaataaaggaagccaaacctgctgtatggctcaacagtgttcctacaagggaacaagaagtttcaagtggctgtggagacaagagcaagaaagaaaatgtggctgcagatatcccaatcacagaaacagaagcctatcagttgctgaagaaggccacccttcaggataatacaaatcaaactgaaaacaggtttcaaaagacagatgcttctgtgtcacacttgtcaggtttgaatattggcagcggtgcattcgagacaaagacagctaacaaaattgcttcggaagctagtttttcatctagtgaaggaagtcctttgtcaaggcatgaaaacaaaaagaaacccgtgatcaatttaaaatctaatggtgagagagataatcggacactagattttctttttctgttttaaccaaaaaactctgtgacatgcatttgttgtttgcaccctcatgtgagtcctgaagcgggcatgctcacagggactgccattgcagctgtccctggggtggaacctgagggcttctggaggctcagttcttcacagacaggaccacacgggtgccatggaccacaggggcagagcattgtaatttgcaagtatgaatttgcaggggatcctggcctccatgtctaattaattatcagcaccctgtattttaccaatgaaatgtttcttgcctctctcctcatcctcagaagcacccattgctcatgaccggacaggctcttggagtaactctaactggtttcctcatacccagttcctcccagctcctgggaactcccagctcctccacctggccaccagcctccaaaccctggcttcccccgaccttcctgtgtaaggacggccaatgcctccccgtaccttcagggtagagtctgagctttctccattcctgggaggccccagccctgctctccagcttattcctcccaaggtcgcctctttgggtcaagccacagtcagcttttttcagctgtagcacacctatgcctctgtacctttgcccatgttgttccttctgtagggagttccttttccttttcctcagcccagtgagctcctattcatccttcaacacccaactcacgggaaaaatctagccctcctaccataacactgtggcatatcccctgcccagcttgggctctctcacctcctgtctccttaaaccccttataccttaaattaaaggtataatttgattaatagttttactgacaataacaaaatgattcagagctgctgtagaacctaggcctaggaatctgcctttttagcaagcaccccactgtgaatcactcttctagaaggacagctacctactgtgggggagacaagtacccagtgggttgtgatggagagtatgggcttgagtcagatgacttggatgggactcccagcttggccactcactggcattgtgattgtggccaatttcttaacccccttcagcgtccgtttgtttgcacagtgaaatggaaacattaatacttaccttgccaggctggtgcgaggatgagatggggttgtgtatgagaagtcagcacagagctggcaggtggtgccatgcaggtgtcagcagagttaagggattgttgatgtagtagacgtggtccgctccactacaccttgccagaccacctgcagggcacctcagctccaattcacagacgcgcctacagcttcctgcaccaagcagct

SEQ ID NO: 374239 - DNA, 3440 bp, Homo sapiens
agcggaggcggcccggcgcggtgtttacccgcggtgcatggtggggcggtctccttcggcaaccccggccgaacggccacccagaggctgtgctgagctggcgcagcggcagcagcatgagccggaccctcgcatcggccgtgcccctgtcgagtcccgactactacgagaggctgggccaactccagcacgggctgcgggacagtgaaaagaagagattggacctggaaaagaaactttatgaatataatcagtctgatacatgcagagttaagctgaaatatgtaaaactaaagaattatctgaaggaaatatgtgaatctgaaaagaaggctcatactcgaaaccaagaatatttaaagcgatttgagcgtgtccaagctcatgttgtacacttcaccacaaatacagagaagcttcaaaaactgaagctcgaatatgagactcaaattaagaagatgctatgctcaaaagatagcctgggactaaaagaggaactgacagatgaagacagagaaaaggttgcagtgcaggaggggattaactcaggaacagccatgtcaagaggattgtatcaaccagcaacaatctttatgggccgccaaatgtcagccatcttaagcatgagagatttcagtacagagcacaaatctccccagcccacaaagaacttttcaattcctgacccacattcacaccgacagacagcccagagcagtaatgtgacagacagctgtgtagtacaaactagtaatgacacacagtgcttaaataagtctgacaacatagatggaaaggcatctcttcagattggtgagaaaatgccagtcacagccagtgtattgtctgaggaggaacaaactcattgcttggagataggaagtaacacacgtcatggcaagagtaatttatctgaaggcaaaaagtctgctgaactcaattccccgttacgggaaagattaagtccagagaacagaaccactgatttaaagtgtgacagttccagcggatcagagggagaaatactgacacgggaacatattgaagttgaggaaaaaagagccagcccgccagtctctccgataccagtttcagaatactgtgaatctgaaaataagtggtctcaagagaagcattctccttgggaaggtgtttcagatcatcttgctcacagggaaccaaagtcacaaaagcccttcagaaaaatgcaggaagaggaggaggaaagttggagcaccagcagtgaccttaccatttcaataagtgaagatgatctgattttagagagcccagaaccacagccaaatccaggtggcaagatggagggagaagatggaatagaggccttaaaattaatccatgctgagcaagaaagagttgccctatccactgaaaaaaattgtattttgcaaaccctaagctctcctgattcagaaaaggaatcctccactaacgcaccaacaagagaacctggacaaacaccagactcagacgtaccgagggcacaggtgggtcagcatgttgccaccttgaaagaacatgataattctgtcaaagaagaggcaacagcattattgagaaaagcccttacagaagagtgtggccgtaggtcagctattcacagtagtgaatcatcttgcagcttgccatctattctgaatgacaatagtggaataaaggaagccaaacctgctgtatggctcaacagtgttcctacaagggaacaagaagtttcaagtggctgtggagacaagagcaagaaagaaaatgtggctgcagatatcccaatcacagaaacagaagcctatcagttgctgaagaaggccacccttcaggataatacaaatcaaactgaaaacaggtttcaaaagacagatgcttctgtgtcacacttgtcaggtttgaatattggcagcggtgcattcgagacaaagacagctaacaaaattgcttcggaagctagtttttcatctagtgaaggaagtcctttgtcaaggcatgaaaacaaaaagaaacccgtgatcaatttaaaatctaatggtgagagagataatcggacactagattttctttttctgttttaaccaaaaaactctgtgacatgcatttgttgtttgcaccctcatgtgagtcctgaagcgggcatgctcacagggactgccattgcagctgtccctggggtggaacctgagggcttctggaggctcagttcttcacagacaggaccacacgggtgccatggaccacaggggcagagcattgtaatttgcaagtatgaatttgcaggggatcctggcctccatgtctaattaattatcagcaccctgtattttaccaatgaaatgtttcttgcctctctcctcatcctcagaagcacccattgctcatgaccggacaggctcttggagtaactctaactggtttcctcatacccagttcctcccagctcctgggaactcccagctcctccacctggccaccagcctccaaaccctggcttcccccgaccttcctgtgtaaggacggccaatgcctccccgtaccttcagggtagagtctgagctttctccattcctgggaggccccagccctgctctccagcttattcctcccaaggtcgcctctttgggtcaagccacagtcagcttttttcagctgtagcacacctatgcctctgtacctttgcccatgttgttccttctgtagggagttccttttccttttcctcagcccagtgagctcctattcatccttcaacacccaactcacgggaaaaatctagccctcctaccataacactgtggcatatcccctgcccagcttgggctctctcacctcctgtctccttaaaccccttataccttaaattaaaggtataatttgattaatagttttactgacaataacaaaaatattcgctgtttatttagccccagtatgtcccactttgctaacccagtatggaaactgattcagagctgctgtagaacctaggcctaggaatctgcctttttagcaagcaccccactgtgaatcactcttctagaaggacagctacctactgtgggggagacaagtacccagtgggttgtgatggagagtatgggcttgagtcagatgacttggatgggactcccagcttggccactcactggcattgtgattgtggccaatttcttaacccccttcagcgtccgtttgtttgcacagtgaaatggaaacattaatacttaccttgccaggctggtgcgaggatgagatggggttgtgtatgagaagtcagcacagagctggcaggtggtgccatgcaggtgtcagcagagttaagggattgttgatgtagtagacgtggtccgctccactacaccttgccagaccacctgcagggcacctcagctccaattcacagacgcgcctacagcttcctgcaccaagcagct

SEQ ID NO: 374240 - DNA, 235 bp, Homo sapiens
gggcacctggggctcagtccagacgcagcgcagcctagtgggtgcacctgggagtggtctgcccaggggtgacgctccggccagcccaggctcagccagggggctctgggtgacagtgtaggctccaggctgagggttgccctgcggggtgccagctctcctgctagtcctgccctgtgtgcctgctgaggctcagacagggatgtggtatctccaggaagctgcttggcagaat

SEQ ID NO: 374241 - DNA, 317 bp, Homo sapiens
tttttacttttcaaacttttgttaaaaactaaagtcacaaaacatgcacattagcctagacctccaaaaggtcgagatcattaatatcattgtcttccacctccacctcttgtcccactggaagatctttagggacaataacatgcagggagctgtcatctcctatgataacaatgtcttcttctggaatacctcctgaagtacctgcgtgaagctgtcttacagttaatcatttttataagtagaaatatatgctaaaataaagacagtatatacatcctaaaatgagtagaatatatacataaatcataaaatag

SEQ ID NO: 374242 - DNA, 2130 bp, Homo sapiens
agtttcagcggtttgtagtttgtagcggacaacatggcggccttcatgctgggctcgctgctgcggacgttcaagcagatggttccttcatcagcttcaggccaagttcgaagtcactatgtagactggagaatgtggcgcgatgtgaagagacgaaaaatggcctatgaatacgcagatgagaggctacgtattaattcactcaggaagaataccattttgccaaaaattcttcaggatgtggctgatgaagaaattgctgccctcccccgggatagctgtcctgttagaatcagaaatcggtgtgttatgacgtcccgtccgcgtggtgtgaagcggcgctggaggcttagtcgtatagtcttccgtcacttagctgaccatgggcaactttctgggatccagcgagcgacatggtaaatgagctccagaacctattgagcttgcagggaagccaagcttgcagttccagcaagcaaagattttttttaatagaccaaaccctaatctctacaggggcccagtacagttgtttggcctacctgatgctatctctaaactacttttaaaatgaagacatttgggtgtttcatgtcagtgaattatcttttctcttggacttaacaaacatactgttcccatacatagtacaaagagtagcataataaatattttctgtgaatgttttttataccctccttttaagtttaatcttttagtaacatataggggtttttgtattaagagcattatttcataaaatgctatcttatacataatccaactaattgacatgtagctcatgtatggcagtttgtaatcctggactagctttgctgacctgcagagctccccttaactattattgttagataaacagattggatagcaaggctgctgttctggattatctaatgctccacttcttcttgtgatggctgaacaaaagaaccactaagtgttttcttgtccatccttaagggactttaaaacaaattatgcctctttaagtccttgaaagtctccatctaaagaggaaaagtttgttggaacagtatatattccctatttttatgtttatttaatccataacagaaatgagtaagggtagcacaaagttctcattcagtaactcaacagtgtgatcatcagcccagtgataaaaatatacatactgaatggaagtacctacttaacatcaggaaaatattcctggagaacttaataaatcaggaggtgaggggtgagatttttttctgcacacagagggaacaaaagcacaaagaagcaaaggcactctgtagcatcagagaaccacagtcacttcagtagatcagaaatatgaagcacaagacaaggcccgtattgtggaggatctcacaaatcatgtgaaggaattaagactgacataccaggtattacagagttttaagcacaggaatgacatcatcagtttgtaatacaggtaagtgacagctgtgtggcagatggccatgagaggaaaaagctacaggcaagacaaccagttaggaggatgtcttagttgttgaggaagatgaaggcctgaactaacattgtggtattagtagaggagagaggacagatttttaaagttttaggaaagaaaattgggcaagacttacaagactgattatatctaagaggtaaagatggttctctgggttcctgataaaagtgtctagatagatggtagagggcaattccaagagggcaactccaagatagaaaatttggaaaaagaacaaatttaggggaaacagaagataagcgagttcaggttccagtcatgcggtgttggagatgcctgtgtcatctgatgaagactagtacgcagctggatagcagagtccgaaactcaggtggaggtgaagttatgagggaattatcacaatctagtttggattcatatttcttaaatatgtatgacaacttaccaactggaatgttctagctaatatctcaacttagaatccatctcactaccaatgggcaaacacttgtgttctaaagttacttgcaagtagtttatactgccaacttgatatatatacatgctatagtttgaacattttgtgtacttccaaaattcacattaaaatctaatccaca

SEQ ID NO: 374243 - DNA, 3143 bp, Homo sapiens
agtttcagcggtttgtagtttgtagcggacaacatggcggccttcatgctgggctcgctgctgcggacgttcaagcaggtcaggcctctacttttatccacaccgctacccctcaccgctgaatctcataacccacgggtcccccacggctctgccacctgtagtgctcgatggttccttcatcagcttcaggccaagttcgaagtcactatgtagactggagaatgtggcgcgatgtgaagagacgaaaaatggcctatgaatacgcagatgagaggctacgtattaattcactcaggaagaataccattttgccaaaaattcttcaggatgtggctgatgaagaaattgctgccctcccccgggatagctgtcctgttagaatcagaaatcggtgtgttatgacgtcccgtccgcgtggtgtgaagcggcgctggaggcttagtcgtatagtcttccgtcacttagctgaccatgggcaactttctgggatccagcgagcgacatggtaaatgagctccagaacctattgagcttgcagggaagccaagcttgcagttccagcaagcaaagattttttttaatagaccaaaccctaatctctacaggggcccagtacagttgtttggcctacctgatgctatctctaaactacttttaaaatgaagacatttgggtgtttcatgtcagtgaattatcttttctcttggacttaacaaacatactgttcccatacatagtacaaagagtagcataataaatattttctgtgaatgttttttataccctccttttaagtttaatcttttagtaacatataggggtttttgtattaagagcattatttcataaaatgctatcttatacataatccaactaattgacatgtagctcatgtatggcagtttgtaatcctggactagctttgctgacctgcagagctccccttaactattattgttagataaacagattggatagcaaggctgctgttctggattatctaatgctccacttcttcttgtgatggctgaacaaaagaaccactaagtgttttcttgtccatccttaagggactttaaaacaaattatgcctctttaagtccttgaaagtctccatctaaagaggaaaagtttgttggaacagtatatattccctatttttatgtttatttaatccataacagaaatgagtaagggtagcacaaagttctcattcagtaactcaacagtgtgatcatcagcccagtgataaaaatatacatactgaatggaagtacctacttaacatcaggaaaatattcctggagaacttaataaatcaggaggtgaggggtgagatttttttctgcacacagagggaacaaaagcacaaagaagcaaaggcactctgtagcatcagagaaccacagtcacttcagtagatcagaaatatgaagcacaagacaaggcccgtattgtggaggatctcacaaatcatgtgaaggaattaagactgacataccaggtattacagagttttaagcacaggaatgacatcatcagtttgtaatacaggtaagtgacagctgtgtggcagatggccatgagaggaaaaagctacaggcaagacaaccagttaggaggatgtcttagttgttgaggaagatgaaggcctgaactaacattgtggtattagtagaggagagaggacagatttttaaagttttaggaaagaaaattgggcaagacttacaagactgattatatctaagaggtaaagatggttctctgggttcctgataaaagtgtctagatagatggtagagggcaattccaagagggcaactccaagatagaaaatttggaaaaagaacaaatttaggggaaacagaagataagcgagttcaggttccagtcatgcggtgttggagatgcctgtgtcatctgatgaagactagtacgcagctggatagcagagtccgaaactcaggtggaggtgaagttatgagggaattatcacaatctagtttggattcatatttcttaaatatgtatgacaacttaccaactggaatgttctagctaatatctcaacttagaatccatctcactaccaatgggcaaacacttgtgttctaaagttacttgcaagtagtttatactgccaacttgatatatatacatgctatagtttgaacattttgtgtacttccaaaattcacattaaaatctaatccacaatgcgttggtattattaagaggtggggcccttaggggtgattaggccaggagggctccacactcatggatgggatcagtgcctttctaagagggcttgagggagagagtttgtcccttttacccttctgatactgcgagaaggcaccgtactggaagcagaaagcaagcccttaccaaacaccaatctgctggtgccaaatcttagacttctccagcctccagaagtgcaagaagtaaatattatttataaattcttagtctatggcattttgttacagcagcaggaatagactaagacaatgtgttgataggtttagggtcatgttttactttttcagtcatgttaaattttagatggttctaaagtcaaaactctagaaaaagttaaattcacagaatagcttccatcctcatctccttccttcccctgctaacaatttttattagctttgggtttactcgtttctttttgaaacataagcaaatacacctatgtgcatacattcacatttctcaccctttcttacacaaatgtagtgggtataccataaatgttctgcactttgcttttccacttactctatcctggagaccattttacgttatatagaactcttcattgttttgtgacttaagtactccctcatgtggatgcaccataatacattcctgttaaatagacacgagtatttttaatcttttgcatatagcattccaaatttttctaaatgtacctttcagagcccagaaagaagttaaaattctgggtcaaaggataaatgaatatgtcattctgatggttattaccaaatactctttctgagacaagagtcttactctgtcacccaggctggagttgcagtgagccgagatcgtgccattgcaccccagcctgggtgaaagagcaagactctgtctca

SEQ ID NO: 374244 - DNA, 3007 bp, Homo sapiens
agtttcagcggtttgtagtttgtagcggacaacatggcggccttcatgctgggctcgctgctgcggacgttcaagcagatggttccttcatcagcttcaggccaagttcgaagtcactatgtagactggagaatgtggcgcgatgtgaagagacgaaaaatggcctatgaatacgcagatgagaggctacgtattaattcactcaggaagaataccattttgccaaaaattcttcaggatgtggctgatgaagaaattgctgccctcccccgggatagctgtcctgttagaatcagaaatcggtgtgttatgacgtcccgtccgcgtggtgtgaagcggcgctggaggcttagtcgtatagtcttccgtcacttagctgaccatgggcaactttctgggatccagcgagcgacatggtaaatgagctccagaacctattgagcttgcagggaagccaagcttgcagttccagcaacccagtacagttgtttggcctacctgatgctatctctaaactacttttaaaatgaagacatttgggtgtttcatgtcagtgaattatcttttctcttggacttaacaaacatactgttcccatacatagtacaaagagtagcataataaatattttctgtgaatgttttttataccctccttttaagtttaatcttttagtaacatataggggtttttgtattaagagcattatttcataaaatgctatcttatacataatccaactaattgacatgtagctcatgtatggcagtttgtaatcctggactagctttgctgacctgcagagctccccttaactattattgttagataaacagattggatagcaaggctgctgttctggattatctaatgctccacttcttcttgtgatggctgaacaaaagaaccactaagtgttttcttgtccatccttaagggactttaaaacaaattatgcctctttaagtccttgaaagtctccatctaaagaggaaaagtttgttggaacagtatatattccctatttttatgtttatttaatccataacagaaatgagtaagggtagcacaaagttctcattcagtaactcaacagtgtgatcatcagcccagtgataaaaatatacatactgaatggaagtacctacttaacatcaggaaaatattcctggagaacttaataaatcaggaggtgaggggtgagatttttttctgcacacagagggaacaaaagcacaaagaagcaaaggcactctgtagcatcagagaaccacagtcacttcagtagatcagaaatatgaagcacaagacaaggcccgtattgtggaggatctcacaaatcatgtgaaggaattaagactgacataccaggtattacagagttttaagcacaggaatgacatcatcagtttgtaatacaggtaagtgacagctgtgtggcagatggccatgagaggaaaaagctacaggcaagacaaccagttaggaggatgtcttagttgttgaggaagatgaaggcctgaactaacattgtggtattagtagaggagagaggacagatttttaaagttttaggaaagaaaattgggcaagacttacaagactgattatatctaagaggtaaagatggttctctgggttcctgataaaagtgtctagatagatggtagagggcaattccaagagggcaactccaagatagaaaatttggaaaaagaacaaatttaggggaaacagaagataagcgagttcaggttccagtcatgcggtgttggagatgcctgtgtcatctgatgaagactagtacgcagctggatagcagagtccgaaactcaggtggaggtgaagttatgagggaattatcacaatctagtttggattcatatttcttaaatatgtatgacaacttaccaactggaatgttctagctaatatctcaacttagaatccatctcactaccaatgggcaaacacttgtgttctaaagttacttgcaagtagtttatactgccaacttgatatatatacatgctatagtttgaacattttgtgtacttccaaaattcacattaaaatctaatccacaatgcgttggtattattaagaggtggggcccttaggggtgattaggccaggagggctccacactcatggatgggatcagtgcctttctaagagggcttgagggagagagtttgtcccttttacccttctgatactgcgagaaggcaccgtactggaagcagaaagcaagcccttaccaaacaccaatctgctggtgccaaatcttagacttctccagcctccagaagtgcaagaagtaaatattatttataaattcttagtctatggcattttgttacagcagcaggaatagactaagacaatgtgttgataggtttagggtcatgttttactttttcagtcatgttaaattttagatggttctaaagtcaaaactctagaaaaagttaaattcacagaatagcttccatcctcatctccttccttcccctgctaacaatttttattagctttgggtttactcgtttctttttgaaacataagcaaatacacctatgtgcatacattcacatttctcaccctttcttacacaaatgtagtgggtataccataaatgttctgcactttgcttttccacttactctatcctggagaccattttacgttatatagaactcttcattgttttgtgacttaagtactccctcatgtggatgcaccataatacattcctgttaaatagacacgagtatttttaatcttttgcatatagcattccaaatttttctaaatgtacctttcagagcccagaaagaagttaaaattctgggtcaaaggataaatgaatatgtcattctgatggttattaccaaatactctttctgagacaagagtcttactctgtcacccaggctggagttgcagtgagccgagatcgtgccattgcaccccagcctgggtgaaagagcaagactctgtctca

SEQ ID NO: 374245 - DNA, 3009 bp, Homo sapiens
agtttcagcggtttgtagtttgtagcggacaacatggcggccttcatgctgggctcgctgctgcggacgttcaagcagatggttccttcatcagcttcaggccaagttcgaagtcactatgtagactggagaatgtggcgcgatgtgaagagacgaaaaatggcctatgaatacgcagatgagaggctacgtattaattcactcaggaagaataccattttgccaaaaattcttcagtgtcctgttagaatcagaaatcggtgtgttatgacgtcccgtccgcgtggtgtgaagcggcgctggaggcttagtcgtatagtcttccgtcacttagctgaccatgggcaactttctgggatccagcgagcgacatggtaaatgagctccagaacctattgagcttgcagggaagccaagcttgcagttccagcaagcaaagattttttttaatagaccaaaccctaatctctacaggggcccagtacagttgtttggcctacctgatgctatctctaaactacttttaaaatgaagacatttgggtgtttcatgtcagtgaattatcttttctcttggacttaacaaacatactgttcccatacatagtacaaagagtagcataataaatattttctgtgaatgttttttataccctccttttaagtttaatcttttagtaacatataggggtttttgtattaagagcattatttcataaaatgctatcttatacataatccaactaattgacatgtagctcatgtatggcagtttgtaatcctggactagctttgctgacctgcagagctccccttaactattattgttagataaacagattggatagcaaggctgctgttctggattatctaatgctccacttcttcttgtgatggctgaacaaaagaaccactaagtgttttcttgtccatccttaagggactttaaaacaaattatgcctctttaagtccttgaaagtctccatctaaagaggaaaagtttgttggaacagtatatattccctatttttatgtttatttaatccataacagaaatgagtaagggtagcacaaagttctcattcagtaactcaacagtgtgatcatcagcccagtgataaaaatatacatactgaatggaagtacctacttaacatcaggaaaatattcctggagaacttaataaatcaggaggtgaggggtgagatttttttctgcacacagagggaacaaaagcacaaagaagcaaaggcactctgtagcatcagagaaccacagtcacttcagtagatcagaaatatgaagcacaagacaaggcccgtattgtggaggatctcacaaatcatgtgaaggaattaagactgacataccaggtattacagagttttaagcacaggaatgacatcatcagtttgtaatacaggtaagtgacagctgtgtggcagatggccatgagaggaaaaagctacaggcaagacaaccagttaggaggatgtcttagttgttgaggaagatgaaggcctgaactaacattgtggtattagtagaggagagaggacagatttttaaagttttaggaaagaaaattgggcaagacttacaagactgattatatctaagaggtaaagatggttctctgggttcctgataaaagtgtctagatagatggtagagggcaattccaagagggcaactccaagatagaaaatttggaaaaagaacaaatttaggggaaacagaagataagcgagttcaggttccagtcatgcggtgttggagatgcctgtgtcatctgatgaagactagtacgcagctggatagcagagtccgaaactcaggtggaggtgaagttatgagggaattatcacaatctagtttggattcatatttcttaaatatgtatgacaacttaccaactggaatgttctagctaatatctcaacttagaatccatctcactaccaatgggcaaacacttgtgttctaaagttacttgcaagtagtttatactgccaacttgatatatatacatgctatagtttgaacattttgtgtacttccaaaattcacattaaaatctaatccacaatgcgttggtattattaagaggtggggcccttaggggtgattaggccaggagggctccacactcatggatgggatcagtgcctttctaagagggcttgagggagagagtttgtcccttttacccttctgatactgcgagaaggcaccgtactggaagcagaaagcaagcccttaccaaacaccaatctgctggtgccaaatcttagacttctccagcctccagaagtgcaagaagtaaatattatttataaattcttagtctatggcattttgttacagcagcaggaatagactaagacaatgtgttgataggtttagggtcatgttttactttttcagtcatgttaaattttagatggttctaaagtcaaaactctagaaaaagttaaattcacagaatagcttccatcctcatctccttccttcccctgctaacaatttttattagctttgggtttactcgtttctttttgaaacataagcaaatacacctatgtgcatacattcacatttctcaccctttcttacacaaatgtagtgggtataccataaatgttctgcactttgcttttccacttactctatcctggagaccattttacgttatatagaactcttcattgttttgtgacttaagtactccctcatgtggatgcaccataatacattcctgttaaatagacacgagtatttttaatcttttgcatatagcattccaaatttttctaaatgtacctttcagagcccagaaagaagttaaaattctgggtcaaaggataaatgaatatgtcattctgatggttattaccaaatactctttctgagacaagagtcttactctgtcacccaggctggagttgcagtgagccgagatcgtgccattgcaccccagcctgggtgaaagagcaagactctgtctca

SEQ ID NO: 374246 - DNA, 2519 bp, Homo sapiens
gcggccgcctactactactactactgctcgaattcaagcttctaacgatgtacctggacatgtcagtgaattatcttttctcttggacttaacaaacatactgttcccatacatagtacaaagagtagcataataaatattttctgtgaatgttttttataccctccttttaagtttaatcttttagtaacatataggggtttttgtattaagagcattatttcataaaatgctatcttatacataatccaactaattgacatgtagctcatgtatggcagtttgtaatcctggactagctttgctgacctgcagagctccccttaactattattgttagataaacagattggatagcaaggctgctgttctggattatctaatgctccacttcttcttgtgatggctgaacaaaagaaccactaagtgttttcttgtccatccttaagggactttaaaacaaattatgcctctttaagtccttgaaagtctccatctaaagaggaaaagtttgttggaacagtatatattccctatttttatgtttatttaatccataacagaaatgagtaagggtagcacaaagttctcattcagtaactcaacagtgtgatcatcagcccagtgataaaaatatacatactgaatggaagtacctacttaacatcaggaaaatattcctggagaacttaataaatcaggaggtgaggggtgagatttttttctgcacacagagggaacaaaagcacaaagaagcaaaggcactctgtagcatcagagaaccacagtcacttcagtagatcagaaatatgaagcacaagacaaggcccgtattgtggaggatctcacaaatcatgtgaaggaattaagactgacataccaggtattacagagttttaagcacaggaatgacatcatcagtttgtaatacaggtaagtgacagctgtgtggcagatggccatgagaggaaaaagctacaggcaagacaaccagttaggaggatgtcttagttgttgaggaagatgaaggcctgaactaacattgtggtattagtagaggagagaggacagatttttaaagttttaggaaagaaaattgggcaagacttacaagactgattatatctaagaggtaaagatggttctctgggttcctgataaaagtgtctagatagatggtagagggcaattccaagagggcaactccaagatagaaaatttggaaaaagaacaaatttaggggaaacagaagataagcgagttcaggttccagtcatgcggtgttggagatgcctgtgtcatctgatgaagactagtacgcagctggatagcagagtccgaaactcaggtggaggtgaagttatgagggaattatcacaatctagtttggattcatatttcttaaatatgtatgacaacttaccaactggaatgttctagctaatatctcaacttagaatccatctcactaccaatgggcaaacacttgtgttctaaagttacttgcaagtagtttatactgccaacttgatatatatacatgctatagtttgaacattttgtgtacttccaaaattcacattaaaatctaatccacaatgcgttggtattattaagaggtggggcccttaggggtgattaggccaggagggctccacactcatggatgggatcagtgcctttctaagagggcttgagggagagagtttgtcccttttacccttctgatactgcgagaaggcaccgtactggaagcagaaagcaagcccttaccaaacaccaatctgctggtgccaaatcttagacttctccagcctccagaagtgcaagaagtaaatattatttataaattcttagtctatggcattttgttacagcagcaggaatagactaagacaatgtgttgataggtttagggtcatgttttactttttcagtcatgttaaattttagatggttctaaagtcaaaactctagaaaaagttaaattcacagaatagcttccatcctcatctccttccttcccctgctaacaatttttattagctttgggtttactcgtttctttttgaaacataagcaaatacacctatgtgcatacattcacatttctcaccctttcttacacaaatgtagtgggtataccataaatgttctgcactttgcttttccacttactctatcctggagaccattttacgttatatagaactcttcattgttttgtgacttaagtactccctcatgtggatgcaccataatacattcctgttaaatagacacgagtatttttaatcttttgcatatagcattccaaatttttctaaatgtacctttcagagcccagaaagaagttaaaattctgggtcaaaggataaatgaatatgtcattctgatggttattaccaaatactctttctgagacaagagtcttactctgtcacccaggctggagttgcagtgagccgagatcgtgccattgcaccccagcctgggtgaaagagcaagactctgtctca

SEQ ID NO: 374247 - DNA, 583 bp, Homo sapiens
agtttcagcggtttgtagtttgtagcggacaacatggcggccttcatgctgggctcgctgctgcggacgttcaagcagatggttccttcatcagcttcaggccaagttcgaagtcactatgtagactggagaatgtggcgcgatgtgaagagacgaaaaatggcctatgaatacgcagatgagaggctacgtattaattcactcaggaagaataccattttgccaaaaattcttcaggatgtggctgatgaagaaattgctgccctcccccgggatagctgtcctgttagaatcagaaatcggtgtgttatgacgtcccgtccgcgtggtgtgaagcggcgctggaggcttagtcgtatagtcttccgtcacttagctgaccatgggcaactttctgggatccagcgagcgacatggtaaatgagctccagaacctattgagcttgcagggaagccaagcttgcagttccagcaagcaaagattttttttaatagaccaaaccctaatctctacaggggagggtttgatgaagggtttgatgacagggtttcgatgaggggtttgatgaagggtttcgaatga

SEQ ID NO: 374248 - DNA, 525 bp, Homo sapiens
agtttcagcggtttgtagtttgtagcggacaacatggcggccttcatgctgggctcgctgctgcggacgttcaagcaggtcaggcctctacttttatccacaccgctacccctcaccgctgaatctcataacccacgggtcccccacggctctgccacctgtagtgctcgatggttccttcatcagcttcaggccaagttcgaagtcactatgtagactggagaatgtggcgcgatgtgaagagacgaaaaatggcctatgaatacgcagatgagaggctacgtattaattcactcaggaagaataccattttgccaaaaattcttcagaggttagctaattaagatgagtccctttgtaccacaagatcattaactcaacatcagatcacttttgatactgtttgttgtgacttggtatcaatataatttctggagaataagatccacatcaatataaacaaatagtcttgaaactgattttgttgagtttcaaattaaagactattcactcccaaaaaactta

SEQ ID NO: 374249 - DNA, 3051 bp, Homo sapiens
agtttcagcggtttgtagtttgtagcggacaacatggcggccttcatgctgggctcgctgctgcggacgttcaagcagatggttccttcatcagcttcaggccaagttcgaagtcactatgtagactggagaatgtggcgcgatgtgaagagacgaaaaatggcctatgaatacgcagatgagaggctacgtattaattcactcaggaagaataccattttgccaaaaattcttcaggatgtggctgatgaagaaattgctgccctcccccgggatagctgtcctgttagaatcagaaatcggtgtgttatgacgtcccgtccgcgtggtgtgaagcggcgctggaggcttagtcgtatagtcttccgtcacttagctgaccatgggcaactttctgggatccagcgagcgacatggtaaatgagctccagaacctattgagcttgcagggaagccaagcttgcagttccagcaagcaaagattttttttaatagaccaaaccctaatctctacaggggcccagtacagttgtttggcctacctgatgctatctctaaactacttttaaaatgaagacatttgggtgtttcatgtcagtgaattatcttttctcttggacttaacaaacatactgttcccatacatagtacaaagagtagcataataaatattttctgtgaatgttttttataccctccttttaagtttaatcttttagtaacatataggggtttttgtattaagagcattatttcataaaatgctatcttatacataatccaactaattgacatgtagctcatgtatggcagtttgtaatcctggactagctttgctgacctgcagagctccccttaactattattgttagataaacagattggatagcaaggctgctgttctggattatctaatgctccacttcttcttgtgatggctgaacaaaagaaccactaagtgttttcttgtccatccttaagggactttaaaacaaattatgcctctttaagtccttgaaagtctccatctaaagaggaaaagtttgttggaacagtatatattccctatttttatgtttatttaatccataacagaaatgagtaagggtagcacaaagttctcattcagtaactcaacagtgtgatcatcagcccagtgataaaaatatacatactgaatggaagtacctacttaacatcaggaaaatattcctggagaacttaataaatcaggaggtgaggggtgagatttttttctgcacacagagggaacaaaagcacaaagaagcaaaggcactctgtagcatcagagaaccacagtcacttcagtagatcagaaatatgaagcacaagacaaggcccgtattgtggaggatctcacaaatcatgtgaaggaattaagactgacataccaggtattacagagttttaagcacaggaatgacatcatcagtttgtaatacaggtaagtgacagctgtgtggcagatggccatgagaggaaaaagctacaggcaagacaaccagttaggaggatgtcttagttgttgaggaagatgaaggcctgaactaacattgtggtattagtagaggagagaggacagatttttaaagttttaggaaagaaaattgggcaagacttacaagactgattatatctaagaggtaaagatggttctctgggttcctgataaaagtgtctagatagatggtagagggcaattccaagagggcaactccaagatagaaaatttggaaaaagaacaaatttaggggaaacagaagataagcgagttcaggttccagtcatgcggtgttggagatgcctgtgtcatctgatgaagactagtacgcagctggatagcagagtccgaaactcaggtggaggtgaagttatgagggaattatcacaatctagtttggattcatatttcttaaatatgtatgacaacttaccaactggaatgttctagctaatatctcaacttagaatccatctcactaccaatgggcaaacacttgtgttctaaagttacttgcaagtagtttatactgccaacttgatatatatacatgctatagtttgaacattttgtgtacttccaaaattcacattaaaatctaatccacaatgcgttggtattattaagaggtggggcccttaggggtgattaggccaggagggctccacactcatggatgggatcagtgcctttctaagagggcttgagggagagagtttgtcccttttacccttctgatactgcgagaaggcaccgtactggaagcagaaagcaagcccttaccaaacaccaatctgctggtgccaaatcttagacttctccagcctccagaagtgcaagaagtaaatattatttataaattcttagtctatggcattttgttacagcagcaggaatagactaagacaatgtgttgataggtttagggtcatgttttactttttcagtcatgttaaattttagatggttctaaagtcaaaactctagaaaaagttaaattcacagaatagcttccatcctcatctccttccttcccctgctaacaatttttattagctttgggtttactcgtttctttttgaaacataagcaaatacacctatgtgcatacattcacatttctcaccctttcttacacaaatgtagtgggtataccataaatgttctgcactttgcttttccacttactctatcctggagaccattttacgttatatagaactcttcattgttttgtgacttaagtactccctcatgtggatgcaccataatacattcctgttaaatagacacgagtatttttaatcttttgcatatagcattccaaatttttctaaatgtacctttcagagcccagaaagaagttaaaattctgggtcaaaggataaatgaatatgtcattctgatggttattaccaaatactctttctgagacaagagtcttactctgtcacccaggctggagttgcagtgagccgagatcgtgccattgcaccccagcctgggtgaaagagcaagactctgtctca

SEQ ID NO: 374250 - DNA, 1670 bp, Homo sapiens
agtttcagcggtttgtagtttgtagcggacaacatggcggccttcatgctgggctcgctgctgcggacgttcaagcagatggttccttcatcagcttcaggccaagttcgaagtcactatgtagactggagaatgtggcgcgatgtgaagagacgaaaaatggcctatgaatacgcagatgagaggctacgtattaattcactcaggaagaataccattttgccaaaaattcttcaggatgtggctgatgaagaaattgctgccctcccccgggatagctgtcctgttagaatcagaaatcggtgtgttatgacgtcccgtccgcgtggtgtgaagcggcgctggaggcttagtcgtatagtcttccgtcacttagctgaccatgggcaactttctgggatccagcgagcgacatggtaaatgagctccagaacctattgagcttgcagggaagccaagcttgcagttccagcaagcaaagattttttttaatagaccaaaccctaatctctacaggggcccagtacagttgtttggcctacctgatgctatctctaaactacttttaaaatgaagacatttgggtgtttcatgtcagtgaattatcttttctcttggacttaacaaacatactgttcccatacatagtacaaagagtagcataataaatattttctgtgaatgttttttataccctccttttaagtttaatcttttagtaacatataggggtttttgtattaagagcattatttcataaaatgctatcttatacataatccaactaattgacatgtagctcatgtatggcagtttgtaatcctggactagctttgctgacctgcagagctccccttaactattattgttagataaacagattggatagcaaggctgctgttctggattatctaatgctccacttcttcttgtgatggctgaacaaaagaaccactaagtgttttcttgtccatccttaagggactttaaaacaaattatgcctctttaagtccttgaaagtctccatctaaagaggaaaagtttgttggaacagtatatattccctatttttatgtttatttaatccataacagaaatgagtaagggtagcacaaagttctcattcagtaactcaacagtgtgatcatcagcccagtgataaaaatatacatactgaatggaagtacctacttaacatcaggaaaatattcctggagaacttaataaatcaggaggtgaggggtgagatttttttctgcacacagagggaacaaaagcacaaagaagcaaaggcactctgtagcatcagagaaccacagtcacttcagtagatcagaaatatgaagcacaagacaaggcccgtattgtggaggatctcacaaatcatgtgaaggaattaagactgacataccaggtattacagagttttaagcacaggaatgacatcatcagtttgtaatacaggtaagtgacagctgtgtggcagatggccatgagatggaatgttctagctaatatctcaacttagaatccatctcactaccaatgggcaaacacttgtgttctaaagttacttgcaagtagtttatactgccaacttgatatatatacatgctatagtttgaacattttgtgtacttccaaaattcacattaaaatctaatccaca

SEQ ID NO: 374251 - DNA, 2998 bp, Homo sapiens
agtttcagcggtttgtagtttgtagcggacaacatggcggccttcatgctgggctcgctgctgcggacgttcaagcagatggttccttcatcagcttcaggccaagttcgaagtcactatgtagactggagaatgtggcgcgatgtgaagagacgaaaaatggcctatgaatacgcagatgagaggctacgtattaattcactcaggaagaataccattttgccaaaaattcttcaggatgtggctgatgaagaaattgctgccctcccccgggatagctgtcctgttagaatcagaaatcggtgtgttatgacgtcccgtccgcgtggtgtgaagcggcgctggaggcttagtcgtatagtcttccgtcacttagctgaccatgggcaactttctgggatccagcgagcgacatggtaaatgagctccagaacctattgagcttgcagggaagccaagcttgcagttccagcaagcaaagattttttttaatagaccaaaccctaatctctacaggggcccagtacagttgtttggcctacctgatgctatctctaaactacttttttaacaaacatactgttcccatacatagtacaaagagtagcataataaatattttctgtgaatgttttttataccctccttttaagtttaatcttttagtaacatataggggtttttgtattaagagcattatttcataaaatgctatcttatacataatccaactaattgacatgtagctcatgtatggcagtttgtaatcctggactagctttgctgacctgcagagctccccttaactattattgttagataaacagattggatagcaaggctgctgttctggattatctaatgctccacttcttcttgtgatggctgaacaaaagaaccactaagtgttttcttgtccatccttaagggactttaaaacaaattatgcctctttaagtccttgaaagtctccatctaaagaggaaaagtttgttggaacagtatatattccctatttttatgtttatttaatccataacagaaatgagtaagggtagcacaaagttctcattcagtaactcaacagtgtgatcatcagcccagtgataaaaatatacatactgaatggaagtacctacttaacatcaggaaaatattcctggagaacttaataaatcaggaggtgaggggtgagatttttttctgcacacagagggaacaaaagcacaaagaagcaaaggcactctgtagcatcagagaaccacagtcacttcagtagatcagaaatatgaagcacaagacaaggcccgtattgtggaggatctcacaaatcatgtgaaggaattaagactgacataccaggtattacagagttttaagcacaggaatgacatcatcagtttgtaatacaggtaagtgacagctgtgtggcagatggccatgagaggaaaaagctacaggcaagacaaccagttaggaggatgtcttagttgttgaggaagatgaaggcctgaactaacattgtggtattagtagaggagagaggacagatttttaaagttttaggaaagaaaattgggcaagacttacaagactgattatatctaagaggtaaagatggttctctgggttcctgataaaagtgtctagatagatggtagagggcaattccaagagggcaactccaagatagaaaatttggaaaaagaacaaatttaggggaaacagaagataagcgagttcaggttccagtcatgcggtgttggagatgcctgtgtcatctgatgaagactagtacgcagctggatagcagagtccgaaactcaggtggaggtgaagttatgagggaattatcacaatctagtttggattcatatttcttaaatatgtatgacaacttaccaactggaatgttctagctaatatctcaacttagaatccatctcactaccaatgggcaaacacttgtgttctaaagttacttgcaagtagtttatactgccaacttgatatatatacatgctatagtttgaacattttgtgtacttccaaaattcacattaaaatctaatccacaatgcgttggtattattaagaggtggggcccttaggggtgattaggccaggagggctccacactcatggatgggatcagtgcctttctaagagggcttgagggagagagtttgtcccttttacccttctgatactgcgagaaggcaccgtactggaagcagaaagcaagcccttaccaaacaccaatctgctggtgccaaatcttagacttctccagcctccagaagtgcaagaagtaaatattatttataaattcttagtctatggcattttgttacagcagcaggaatagactaagacaatgtgttgataggtttagggtcatgttttactttttcagtcatgttaaattttagatggttctaaagtcaaaactctagaaaaagttaaattcacagaatagcttccatcctcatctccttccttcccctgctaacaatttttattagctttgggtttactcgtttctttttgaaacataagcaaatacacctatgtgcatacattcacatttctcaccctttcttacacaaatgtagtgggtataccataaatgttctgcactttgcttttccacttactctatcctggagaccattttacgttatatagaactcttcattgttttgtgacttaagtactccctcatgtggatgcaccataatacattcctgttaaatagacacgagtatttttaatcttttgcatatagcattccaaatttttctaaatgtacctttcagagcccagaaagaagttaaaattctgggtcaaaggataaatgaatatgtcattctgatggttattaccaaatactctttctgagacaagagtcttactctgtcacccaggctggagttgcagtgagccgagatcgtgccattgcaccccagcctgggtgaaagagcaagactctgtctca

SEQ ID NO: 374252 - DNA, 607 bp, Homo sapiens
  misc_feature (505)..(505): n is a, c, g, or t
  misc_feature (571)..(571): n is a, c, g, or t
  misc_feature (577)..(577): n is a, c, g, or t
agtttcagcggtttgtagtttgtagcggacaacatggcggccttcatgctgggctcgctgctgcggacgttcaagcagatggttccttcatcagcttcaggccaagttcgaagtcactatgtagactggagaatgtggcgcgatgtgaagagacgaaaaatggcctatgaatacgcagatgagaggctacgtattaattcactcaggaagaataccattttgccaaaaattcttcaggatgtggctgatgaagaaattgctgccctcccccgggatagctgtcctgttagaatcagaaatcggtgtgttatgacgtcccgtccgcgtggtgtgaagcggcgctggaggcttagtcgtatagtcttccgtcacttagctgaccatgggcaactttctgggatccagcgagcgacatggtaaatgagctccagaacctattgagcttgcagggaagccaagcttgcagttccagcaagcaaagattttttttaatagaccaaagtgnaagatgctttctacaaaggtgaactcaggctgaatgaggaaaaattatggaaagagcaggacggtnagtggnagatacattggatcttctcattggagaggt

SEQ ID NO: 374253 - DNA, 796 bp, Homo sapiens
agtttcagcggtttgtagtttgtagcggacaacatggcggccttcatgctgggctcgctgctgcggacgttcaagcagatggttccttcatcagcttcaggccaagttcgaagtcactatgtagactggagaatgtggcgcgatgtgaagagacgaaaaatggcctatgaatacgcagatgagaggctacgtattaattcactcaggaagaataccattttgccaaaaattcttcaggatgtggctgatgaagaaattgctgccctcccccgggatagctgtcctgttagaatcagaaatcggtgtgttatgacgtcccgtccgcgtggtgtgaagcggcgctggaggcttagtcgtatagtcttccgtcacttagctgaccatgggcaactttctgggatccagcgagcgacatgcctcaactcaatacagttgtttttatacttctttttcaagtgaaaggtaaaaacactggtttattctcttctgaacaaggttctcaatctgttacccaagctgcagtacagtggcatcatcatagctcactgcagccttaaactcctgggctgaagtgatcctccagccttagtagctgggattacgggcgccagccttcatgcctggcttcaattgctttctctgatctaactgtgttggctaatacctccaggaaaataaagtaatggagatcacaggcactggtcctgacttcagggggaataggagtaattcctactaaaagcctgatttttctgacatactcctagacaaataaatcataaaactgttctaatga

SEQ ID NO: 374254 - DNA, 1871 bp, Homo sapiens
gtccgagaccaggagtaaggggacaggagcgaggactgatgccactgtagaaggcgaggtctctagacccctctcacctgtggggtgcacaggtgcctgcaaccaggatggtaacccagaccaggcagaagcaagctaagagaaaacgttgggtccctgggcctggcctcgccctcccagttggaggctaacggtgcggaggttccctccagcactcgctccttacagccctccccacctagcccagcccagcccagcccagcccagctgaatttgctcttgggtctttaaggggcgggaactgccaccaacgcgcatggctgcgtcattaacttgcgcctctggcctgcgcctccacgtggatttggtagagaaaccccggactgggatcatggcagccgagactcggaacgtggccggagcagaggccccaccgccccagaagcgctactaccggcaacgtgctcactccaaccccatggcggaccacacgctgcgctaagcacaaacacaaagtaggatcccagtgcattaggcagccagtctcgggagaaggggaacttgtgccccagaaagggcagttacccggccagggtcacatcaaccgccagaagtggagttgggcagccctgtgaagccagaggagatggactggtctgagctatacccagagttcttcgctccactcactcaaaatcagagccacgatgacccaaaggataagaaagaaaagagagctcaggcccaagtggagtttgcagacataggctgtggctatggtggcctgttagtggaactgtcaccgctgttcccagacacacttattctgggtctggagatccgggtgaaggtctcagactatgtacaagaccggattcgggccctacgcgcagctcctgcaggtggcttccagaacatcgcctgtctccgtagcaatgccatgaagcaccttcctaacttcttctacaagggccagctgacaaagatgttcttcctcttccccgacccacatttcaagcggacaaagcacaagtggcgaatcatcagtcccaccctgctagcagaatatgcctacgtgctaagagttggggggctggtgtataccataaccgatgtgctggagctacacgactggatgtgcactcatttcgaagagcacccactgtttgagcgtgtgcctctggaggacctgagtgaagaccccgttgtgggacatctaggcacctcaactgaggaggggaagaaagttctacgtaatggagggaagaatttcccagccatcttccgaagaatacaagatcccgtcctccaggcagtgacctcccaaaccagcctgcctggtcactgactgcttactctaccttagctggacctcgtctcccagggattagagaaaagagcaggagtcctgggtcttcccagttgagactgctggagctgagacacagtactctcttaaagaaggtggggagctgcccagggcagaacccactggtgttcatgactacccctggctcctctcaccttgtccctccactgccaacagaaaacaaagcagctgactgagatggtcaaaggactttggaccataggggatctttggaaggctgtggggtcttgctcttccttagcactcctttctccttgtgagatctctcctcagctggaatgaggaatgtagtccatctaaactgcttgctaggctcaattaccacttctgtttgctttgtggatcctgggataacatgtatatgtgtacacatgcctattctgccatttctcaggaaagggtggagtatgtatcatatgccttctaccatcctcctgtcctctccctgcgtaagacttgacctggggaatctgtgttccct

SEQ ID NO: 374255 - DNA, 1426 bp, Homo sapiens
ggacgcgtgggtcgcggacgcgtgggtccggacgcgtgggtcgacccacgcgtcggaccccggactgggatcatggcagccgagactcggaacgtggccggagcagaggccccaccgccccagaagcgctactaccggcaacgtgctcactccaaccccatggcggaccacacgctgcgctaccctgtgaagccagaggagatggactggtctgagctatacccagagttcttcgctccactcactcaaaatcagagccacgatgacccaaaggataagaaagaaaagagagctcaggcccaagtggagtttgcagacataggctgtggctatggtggcctgttagtggaactgtcaccgctgttcccagacacacttattctgggtctggagatccgggtgaaggtctcagactatgtacaagaccggattcgggccctacgcgcagctcctgcaggtggcttccagaacatcgcctgtctccgtagcaatgccatgaagcaccttcctaacttcttctacaagggccagctgacaaagatgttcttcctcttccccgacccacatttcaagcggacaaagcacaagtggcgaatcatcagtcccaccctgctagcagaatatgcctacgtgctaagagttggggggctggtgtataccataaccgatgtgctggagctacacgactggatgtgcactcatttcgaagagcacccactgtttgagcgtgtgcctctggaggacctgagtgaagaccccgttgtgggacatctaggcacctcaactgaggaggggaagaaagttctacgtaatggagggaagaatttcccagccatcttccgaagaatacaagatcccgtcctccaggcagtgacctcccaaaccagcctgcctggtcactgactgcttactctaccttagctggacctcgtctcccagggattagagaaaagagcaggagtcctgggtcttcccagttgagactgctggagctgagacacagtactctcttaaagaaggtggggagctgcccagggcagaacccactggtgttcatgactacccctggctcctctcaccttgtccctccactgccaacagaaaacaaagcagctgactgagatggtcaaaggactttggaccataggggatctttggaaggctgtggggtcttgctcttccttagcactcctttctccttgtgagatctctcctcagctggaatgaggaatgtagtccatctaaactgcttgctaggctcaattaccacttctgtttgctttgtggatcctgggataacatgtatatgtgtacacatgcctattctgccatttctcaggaaagggtggagtatgtatcatatgccttctaccatcctcctgtcctctccctgcgtaagacttgacctggggaatctgtgttccct

SEQ ID NO: 374256 - DNA, 1764 bp, Homo sapiens
gtccgagaccaggagtaaggggacaggagcgaggactgatgccactgtagaaggcgaggtctctagacccctctcacctgtggggtgcacaggtgcctgcaaccaggatggtaacccagaccaggcagaagcaagctaagagaaaacgttgggtccctgggcctggcctcgccctcccagttggaggctaacggtgcggaggttccctccagcactcgctccttacagccctccccacctagcccagcccagcccagcccagcccagctgaatttgctcttgggtctttaaggggcgggaactgccaccaacgcgcatggctgcgtcattaacttgcgcctctggcctgcgcctccacgtggatttggtagagaaaccccggactgggatcatggcagccgagactcggaacgtggccggagcagaggccccaccgccccagaagcgctactaccggcaacgtgctcactccaaccccatggcggaccacacgctgcgctaccctgtgaagccagaggagatggactggtctgagctatacccagagttcttcgctccactcactcaaaatcagagccacgatgacccaaaggataagaaagaaaagagagctcaggcccaagtggagtttgcagacataggctgtggctatggtggcctgttagtggaactgtcaccgctgttcccagacacacttattctgggtctggagatccgggtgaaggtctcagactatgtacaagaccggattcgggccctacgcgcagctcctgcaggtggcttccagaacatcgcctgtctccgtagcaatgccatgaagcaccttcctaacttcttctacaagggccagctgacaaagatgttcttcctcttccccgacccacatttcaagcggacaaagcacaagtggcgaatcatcagtcccaccctgctagcagaatatgcctacgtgctaagagttgggggtgattttgcctatgcaggggctggtgtataccataaccgatgtgctggagctacacgactggatgtgcactcatttcgaagagcacccactgtttgagcgtgtgcctctggaggacctgagtgaagaccccgttgtgggacatctaggcacctcaactgaggaggggaagaaagttctacgtaatggagggaagaatttcccagccatcttccgaagaatacaagatcccgtcctccaggcagtgacctcccaaaccagcctgcctggtcactgactgcttactctaccttagctggacctcgtctcccagggattagagaaaagagcaggagtcctgggtcttcccagttgagactgctggagctgagacacagtactctcttaaagaaggtggggagctgcccagggcagaacccactggtgttcatgactacccctggctcctctcaccttgtccctccactgccaacagaaaacaaagcagctgactgagatggtcaaaggactttggaccataggggatctttggaaggctgtggggtcttgctcttccttagcactcctttctccttgtgagatctctcctcagctggaatgaggaatgtagtccatctaaactgcttgctaggctcaattaccacttctgtttgctttgtggatcctgggataacatgtatatgtgtacacatgcctattctgccatttctcaggaaagggtggagtatgtatcatatgccttctaccatcctcctgtcctctccctgcgtaagacttgacctggggaatctgtgttccct

SEQ ID NO: 374257 - DNA, 1703 bp, Homo sapiens
gtccgagaccaggagtaaggggacaggagcgaggactgatgccactgtagaaggcgaggtctctagacccctctcacctgtggggtgcacaggtgcctgcaaccaggatggtaacccagaccaggcagaagcaagctaagagaaaacgttgggtccctgggcctggcctcgccctcccagttggaggctaacggtgcggaggttccctccagcactcgctccttacagccctccccacctagcccagcccagcccagcccagcccagctgaatttgctcttgggtctttaaggggcgggaactgccaccaacgcgcatggctgcgtcattaacttgcgcctctggcctgcgcctccacgtggatttggtagagaaaccccggactgggatcatggcagccgagactcggaacgtggccggagcagaggccccaccgccccagaagcgctactaccggcaacgtgctcactccaaccccatggcggaccacacgctgcgctaccctgtgaagccagaggagatggactggtctgagctatacccagagttcttcgctccactcactcaaaatcagagccacgatgacccaaaggataagaaagaaaagagagctcaggcccaagtggagtttgcagacataggctgtggctatggtggcctgttagtggaactgtcaccgctgttcccagacacacttattctgggtctggagatccgggtgaaggtctcagactatgtacaagaccggattcgggccctacgcgcagctcctgcaggtggcttccagaacatcgcctgtctccgtagcaatgccatgaagcaccttcctaacttcttctacaagggccagcggacaaagcacaagtggcgaatcatcagtcccaccctgctagcagaatatgcctacgtgctaagagttggggggctggtgtataccataaccgatgtgctggagctacacgactggatgtgcactcatttcgaagagcacccactgtttgagcgtgtgcctctggaggacctgagtgaagaccccgttgtgggacatctaggcacctcaactgaggaggggaagaaagttctacgtaatggagggaagaatttcccagccatcttccgaagaatacaagatcccgtcctccaggcagtgacctcccaaaccagcctgcctggtcactgactgcttactctaccttagctggacctcgtctcccagggattagagaaaagagcaggagtcctgggtcttcccagttgagactgctggagctgagacacagtactctcttaaagaaggtggggagctgcccagggcagaacccactggtgttcatgactacccctggctcctctcaccttgtccctccactgccaacagaaaacaaagcagctgactgagatggtcaaaggactttggaccataggggatctttggaaggctgtggggtcttgctcttccttagcactcctttctccttgtgagatctctcctcagctggaatgaggaatgtagtccatctaaactgcttgctaggctcaattaccacttctgtttgctttgtggatcctgggataacatgtatatgtgtacacatgcctattctgccatttctcaggaaagggtggagtatgtatcatatgccttctaccatcctcctgtcctctccctgcgtaagacttgacctggggaatctgtgttccct

SEQ ID NO: 374258 - DNA, 1890 bp, Homo sapiens
gtccgagaccaggagtaaggggacaggagcgaggactgatgccactgtagaaggcgaggtctctagacccctctcacctgtggggtgcacaggtgcctgcaaccaggatggtaacccagaccaggcagaagcaagctaagagaaaacgttgggtccctgggcctggcctcgccctcccagttggaggctaacggtgcggaggttccctccagcactcgctccttacagccctccccacctagcccagcccagcccagcccagcccagctgaatttgctcttgggtctttaaggggcgggaactgccaccaacgcgcatggctgcgtcattaacttgcgcctctggcctgcgcctccacgtggatttggtagagaaaccccggactgggatcatggcagccgagactcggaacgtggccggagcagaggccccaccgccccagaagcgctactaccggcaacgtgctcactccaaccccatggcggaccacacgctgcgctaagcacaaacacaaagtaggatcccagtgcattaggcagccagtctcgggagaaggggaacttgtgccccagaaagggcagttacccggccagggtcacatcaaccgccagaagtggagttgggcagccctgtgaagccagaggagatggactggtctgagctatacccagagttcttcgctccactcactcaaaatcagagccacgatgacccaaaggataagaaagaaaagagagctcaggcccaagtggagtttgcagacataggctgtggctatggtggcctgttagtggaactgtcaccgctgttcccagacacacttattctgggtctggagatccgggtgaaggtctcagactatgtacaagaccggattcgggccctacgcgcagctcctgcaggtggcttccagaacatcgcctgtctccgtagcaatgccatgaagcaccttcctaacttcttctacaagggccagctgacaaagatgttcttcctcttccccgacccacatttcaagcggacaaagcacaagtggcgaatcatcagtcccaccctgctagcagaatatgcctacgtgctaagagttgggggtgattttgcctatgcaggggctggtgtataccataaccgatgtgctggagctacacgactggatgtgcactcatttcgaagagcacccactgtttgagcgtgtgcctctggaggacctgagtgaagaccccgttgtgggacatctaggcacctcaactgaggaggggaagaaagttctacgtaatggagggaagaatttcccagccatcttccgaagaatacaagatcccgtcctccaggcagtgacctcccaaaccagcctgcctggtcactgactgcttactctaccttagctggacctcgtctcccagggattagagaaaagagcaggagtcctgggtcttcccagttgagactgctggagctgagacacagtactctcttaaagaaggtggggagctgcccagggcagaacccactggtgttcatgactacccctggctcctctcaccttgtccctccactgccaacagaaaacaaagcagctgactgagatggtcaaaggactttggaccataggggatctttggaaggctgtggggtcttgctcttccttagcactcctttctccttgtgagatctctcctcagctggaatgaggaatgtagtccatctaaactgcttgctaggctcaattaccacttctgtttgctttgtggatcctgggataacatgtatatgtgtacacatgcctattctgccatttctcaggaaagggtggagtatgtatcatatgccttctaccatcctcctgtcctctccctgcgtaagacttgacctggggaatctgtgttccct

SEQ ID NO: 374259 - DNA, 1745 bp, Homo sapiens
gtccgagaccaggagtaaggggacaggagcgaggactgatgccactgtagaaggcgaggtctctagacccctctcacctgtggggtgcacaggtgcctgcaaccaggatggtaacccagaccaggcagaagcaagctaagagaaaacgttgggtccctgggcctggcctcgccctcccagttggaggctaacggtgcggaggttccctccagcactcgctccttacagccctccccacctagcccagcccagcccagcccagcccagctgaatttgctcttgggtctttaaggggcgggaactgccaccaacgcgcatggctgcgtcattaacttgcgcctctggcctgcgcctccacgtggatttggtagagaaaccccggactgggatcatggcagccgagactcggaacgtggccggagcagaggccccaccgccccagaagcgctactaccggcaacgtgctcactccaaccccatggcggaccacacgctgcgctaccctgtgaagccagaggagatggactggtctgagctatacccagagttcttcgctccactcactcaaaatcagagccacgatgacccaaaggataagaaagaaaagagagctcaggcccaagtggagtttgcagacataggctgtggctatggtggcctgttagtggaactgtcaccgctgttcccagacacacttattctgggtctggagatccgggtgaaggtctcagactatgtacaagaccggattcgggccctacgcgcagctcctgcaggtggcttccagaacatcgcctgtctccgtagcaatgccatgaagcaccttcctaacttcttctacaagggccagctgacaaagatgttcttcctcttccccgacccacatttcaagcggacaaagcacaagtggcgaatcatcagtcccaccctgctagcagaatatgcctacgtgctaagagttggggggctggtgtataccataaccgatgtgctggagctacacgactggatgtgcactcatttcgaagagcacccactgtttgagcgtgtgcctctggaggacctgagtgaagaccccgttgtgggacatctaggcacctcaactgaggaggggaagaaagttctacgtaatggagggaagaatttcccagccatcttccgaagaatacaagatcccgtcctccaggcagtgacctcccaaaccagcctgcctggtcactgactgcttactctaccttagctggacctcgtctcccagggattagagaaaagagcaggagtcctgggtcttcccagttgagactgctggagctgagacacagtactctcttaaagaaggtggggagctgcccagggcagaacccactggtgttcatgactacccctggctcctctcaccttgtccctccactgccaacagaaaacaaagcagctgactgagatggtcaaaggactttggaccataggggatctttggaaggctgtggggtcttgctcttccttagcactcctttctccttgtgagatctctcctcagctggaatgaggaatgtagtccatctaaactgcttgctaggctcaattaccacttctgtttgctttgtggatcctgggataacatgtatatgtgtacacatgcctattctgccatttctcaggaaagggtggagtatgtatcatatgccttctaccatcctcctgtcctctccctgcgtaagacttgacctggggaatctgtgttccct

SEQ ID NO: 374260 - DNA, 1560 bp, Homo sapiens
gtccgagaccaggagtaaggggacaggagcgaggactgatgccactgtagaaggcgaggtctctagacccctctcacctgtggggtgcacaggtgcctgcaaccaggatggtaacccagaccaggcagaagcaagctaagagaaaacgttgggtccctgggcctggcctcgccctcccagttggaggctaacggtgcggaggttccctccagcactcgctccttacagccctccccacctagcccagcccagcccagcccagcccagctgaatttgctcttgggtctttaaggggcgggaactgccaccaacgcgcatggctgcgtcattaacttgcgcctctggcctgcgcctccacgtggatttggtagagaaaccccggactgggatcatggcagccgagactcggaacgtggccggagcagaggccccaccgccccagaagcgctactaccggcaacgtgctcactccaaccccatggcggaccacacgctgcgctaccctgtgaagccagaggagatggactggtctgagctatacccagagttcttcgctccactcactcaaaatcagagccacgatgacccaaaggataagaaagaaaagagagctcaggcccaagtggagtttgcagacataggctgtggctatggtggcctgttagctgacaaagatgttcttcctcttccccgacccacatttcaagcggacaaagcacaagtggcgaatcatcagtcccaccctgctagcagaatatgcctacgtgctaagagttggggggctggtgtataccataaccgatgtgctggagctacacgactggatgtgcactcatttcgaagagcacccactgtttgagcgtgtgcctctggaggacctgagtgaagaccccgttgtgggacatctaggcacctcaactgaggaggggaagaaagttctacgtaatggagggaagaatttcccagccatcttccgaagaatacaagatcccgtcctccaggcagtgacctcccaaaccagcctgcctggtcactgactgcttactctaccttagctggacctcgtctcccagggattagagaaaagagcaggagtcctgggtcttcccagttgagactgctggagctgagacacagtactctcttaaagaaggtggggagctgcccagggcagaacccactggtgttcatgactacccctggctcctctcaccttgtccctccactgccaacagaaaacaaagcagctgactgagatggtcaaaggactttggaccataggggatctttggaaggctgtggggtcttgctcttccttagcactcctttctccttgtgagatctctcctcagctggaatgaggaatgtagtccatctaaactgcttgctaggctcaattaccacttctgtttgctttgtggatcctgggataacatgtatatgtgtacacatgcctattctgccatttctcaggaaagggtggagtatgtatcatatgccttctaccatcctcctgtcctctccctgcgtaagacttgacctggggaatctgtgttccct

SEQ ID NO: 374261 - DNA, 1691 bp, Homo sapiens
gtccgagaccaggagtaaggggacaggagcgaggactgatgccactgtagaaggcgaggtctctagacccctctcacctgtggggtgcacaggtgcctgcaaccaggatggtaacccagaccaggcagaagcaagctaagagaaaacgttgggtccctgggcctggcctcgccctcccagttggaggctaacggtgcggaggttccctccagcactcgctccttacagccctccccacctagcccagcccagcccagcccagcccagctgaatttgctcttgggtctttaaggggcgggaactgccaccaacgcgcatggctgcgtcattaacttgcgcctctggcctgcgcctccacgtggatttggtagagaaaccccggactgggatcatggcagccgagactcggaacgtggccggagcagaggccccaccgccccagaagcgctactaccggcaacgtgctcactccaaccccatggcggaccacacgctgcgctaccctgtgaagccagaggagatggactggtctgagctatacccagagttcttcgctccactcactcaaaatcagagccacgatgacccaaaggataagaaagaaaagagagctcaggcccaagtggagtttgcagacataggctgtggctatggtggcctgttagtggaactgtcaccgctgttcccagacacacttattctgggtctggagatccgggtgaaggtctcagactatgtacaagaccggattcgggccctacgcgcagctcctgcaggtggcttccagaacatcgcctgtctccgtagcaatgccatgaagcaccttcctaacttcttctacaagggccagctgacaaagatgttcttcctcttccccgacccacatttcaagcggacaaagcacaagtggcgaatcatcagtcccaccctgctagcagaatatgcctacgtgctaagagttggggggctggtgtataccataaccgatgtgctggagctacacgactggatgtgcactcatttcgaagagcacccactgtttgagcgtgtgcctctggaggacctgagtgaagaccccgttgtgggacatctaggcacctcaactgaggaggggaagaaagttctacgtaatggagggaagaatttcccagccatcttccgaagaatacaagatcccgtcctccaggcagtgacctcccaaaccagcctgcctggtcactgactgcttactctaccttagctggacctcgtctcccagggattagagaaaagagcaggagtcctgggtcttcccagttgagactgctggagctgagacacagtactctcttaaagaaggtggggagctgcccagggcagaacccactggtgttcatgactacccctggctcctctcaccttgtccctccactgccaacagtggaaggctgtggggtcttgctcttccttagcactcctttctccttgtgagatctctcctcagctggaatgaggaatgtagtccatctaaactgcttgctaggctcaattaccacttctgtttgctttgtggatcctgggataacatgtatatgtgtacacatgcctattctgccatttctcaggaaagggtggagtatgtatcatatgccttctaccatcctcctgtcctctccctgcgtaagacttgacctggggaatctgtgttccct

SEQ ID NO: 374262 - DNA, 1262 bp, Homo sapiens
ggacgcgtgggtcgcggacgcgtgggtccggacgcgtgggtcgacccacgcgtcggaccccggactgggatcatggcagccgagactcggaacgtggccggagcagaggccccaccgccccagaagcgctactaccggcaacgtgctcactccaaccccatggcggaccacacgctgcgctatggaactgtcaccgctgttcccagacacacttattctgggtctggagatccgggtgaaggtctcagactatgtacaagaccggattcgggccctacgcgcagctcctgcaggtggcttccagaacatcgcctgtctccgtagcaatgccatgaagcaccttcctaacttcttctacaagggccagctgacaaagatgttcttcctcttccccgacccacatttcaagcggacaaagcacaagtggcgaatcatcagtcccaccctgctagcagaatatgcctacgtgctaagagttggggggctggtgtataccataaccgatgtgctggagctacacgactggatgtgcactcatttcgaagagcacccactgtttgagcgtgtgcctctggaggacctgagtgaagaccccgttgtgggacatctaggcacctcaactgaggaggggaagaaagttctacgtaatggagggaagaatttcccagccatcttccgaagaatacaagatcccgtcctccaggcagtgacctcccaaaccagcctgcctggtcactgactgcttactctaccttagctggacctcgtctcccagggattagagaaaagagcaggagtcctgggtcttcccagttgagactgctggagctgagacacagtactctcttaaagaaggtggggagctgcccagggcagaacccactggtgttcatgactacccctggctcctctcaccttgtccctccactgccaacagaaaacaaagcagctgactgagatggtcaaaggactttggaccataggggatctttggaaggctgtggggtcttgctcttccttagcactcctttctccttgtgagatctctcctcagctggaatgaggaatgtagtccatctaaactgcttgctaggctcaattaccacttctgtttgctttgtggatcctgggataacatgtatatgtgtacacatgcctattctgccatttctcaggaaagggtggagtatgtatcatatgccttctaccatcctcctgtcctctccctgcgtaagacttgacctggggaatctgtgttccct

SEQ ID NO: 374263 - DNA, 986 bp, Homo sapiens
ggacgcgtgggtcgcggacgcgtgggtccggacgcgtgggtcgacccacgcgtcggaccccggactgggatcatggcagccgagactcggaacgtggccggagcagaggccccaccgccccagaagcgctactaccggcaacgtgctcactccaaccccatggcggaccacacgctgcgctaccctgtgaagccagaggagatggactggtctgagctatacccagagttcttcgctccactcactcaaaatcagagccacgatgacccaaaggataagaaagaaaagagagctcaggcccaagtggagtttgcagacataggctgtggctatggtggcctgttagacactggtgacatcagcatggagaggctccacctaccctctactctgggtctgtgacctttgccctggagagtggagggggctgcctcaaatgcttcttaaaacctgggttgtcctttctggcgtcaatccctacatgagccatttcatctgccaggttccgggtcagtgagctggtcagcacaagcatcagagattagccgttgtggccagtgatcctgaactgtcttttctcagagattctaccatctcccctcccctttgcccctccctcgccagatctcattccttctgccccactctcctgttttttgggattacaggcatgagcctgaactcgagttgaatagaatatggggagcttggactgggggtgtcactgtgtgaaggtcgcctccaggagctgatggggagaggttgtacttaccgtgttgttctgtttcaggtattttgcacttggactgctctatcattataataaccaagatgctgctgcagttcaggtgagtctagaagggtttccacatgatttaaaaatcagcaccatgtaagtaatacttagtgttacttaaaaaaaattcacaagttgatagagaccacttttgcctgatctacacccttttaatacagaataaaaatga

SEQ ID NO: 374264 - DNA, 562 bp, Homo sapiens
ggacgcgtgggtcgcggacgcgtgggtccggacgcgtgggtcgacccacgcgtcggaccccggactgggatcatggcagccgagactcggaacgtggccggagcagaggccccaccgccccagaagcgctactaccggcaacgtgctcactccaaccccatggcggaccacacgctgcgctattgcccctccctcgccagatctcattccttctgccccactctcctgttttttgggattacaggcatgagcctgaactcgagttgaatagaatatggggagcttggactgggggtgtcactgtgtgaaggtcgcctccaggagctgatggggagaggttgtacttaccgtgttgttctgtttcaggtattttgcacttggactgctctatcattataataaccaagatgctgctgcagttcaggtgagtctagaagggtttccacatgatttaaaaatcagcaccatgtaagtaatacttagtgttacttaaaaaaaattcacaagttgatagagaccacttttgcctgatctacacccttttaatacagaataaaaatga

SEQ ID NO: 374265 - DNA, 906 bp, Homo sapiens
gttccttcatgtctttttgatggcttgatagctcatatctttttatcgccaataatattccattgtgtggctgtactctagtttgtctatccatgcatgaagcttactgttttacacaaatgataggacatttcagcacatagcagttgtttgataaatagtcattaaatgacctagttagatggactgcttaatttttctgccagatatgtagtgccaagggagagttgtgatggaaaaggcaattatgttgttaggcactgacttctgttaatgtacagttaatgtttaagtggcttagcccagcaaaggtaggtggctttgatgtgtccaggcttccaacagcagtttcttaaattctctttagagctgcactgtccagtatggtagccactagaaaagtctggaaaaatagccacatgtgtctatttgaacttaaattgattgaaaagtaaataagatgaaaaattcagtaccttggttgtactagccacatatcagcgactcaatagccatatgtggctatttgctgttatttcggacagtgcagatgtagaacatttccatcatcacagattttattagacagccctaatgcaaataaaagcattcagagagaaggatgggattgaaattagttgaccaggctgattctggtttctctttaatgcttagctcttttgtgccacaattttacaatggaagagatgaagctcagaggtctgtttgctgaagaacagttgcttaagatgactttggggataaaaaggctgccaggccagtgaagctgtgaaatgccccctgtgtgacagccccaggcggcatggcttgacaatggtttaggcccttgatcagctagtgttaaggagttttacagaactctcagctcttgcttatttagtttgg

SEQ ID NO: 374266 - DNA, 1138 bp, Homo sapiens
actggctcccccaacagtggactgaccccggagtcaggggccgaggagcccttcctgtccaatgccagctccctgctgtccctgcacgtggacctggggccttccatcctggatgatgtcctgcagatcatggatcaggacctggacagcatgcagatccccacataggacacgaggctgcctaggctggggtcccaggtggggcccagccaggaggtggggtgtggacccggccctggcggcggagtcagggtcccaagatcccacctgtatggtcgctggccagtgattctccttctgagccgtgtttcccctctccctccctctccacgtgggcagggcaggccccatcgctttcctctgataaccacatggacacatcctgaagtcagcccaggcgccctgagcatcttggggcacctggaccccatcacaatactccttcttccttcaggtccctgggtgaaggctttgctgaaaccgaccccccttttcacgtcccttctgcctctgccccgttggatgccctgactgggggcaggggaagagacagggcacagctggccacagggctcagccactgagcaggctgttccgggcctttggctttgcatcctggacggggagtgtcctgtcagggaccagatgtgtcctgcctcatccctagctccaatcccttccccacgtgaccggggattctggttgcaataaaacatgctgctgctggtggcggagctccctgtccctttgccccaggtttcctcccggaggcagacagtctcccagagctgagggcttgcctctggagaccccagccccagagggctttgtggaggacaggccttgccctcaagaacgtcgtacctgacgctgagcctgtcatgagaatgcaacaggagcaaaccaagtgttgctgtgacattgattcagatgtttggcaagaggtggctgagcactcgggtgggcttggcactgtgccaagcctggggccaatccctgcccagtcagctggggtctggtgggggacacccaagaataaaagaataacccacaaagtgtgcaagggaccaacagcttctccagcttaagagcaccgagggagcatgcaggagggatgcttggagctgggagggtctaa

SEQ ID NO: 374267 - DNA, 545 bp, Homo sapiens
taaacatatacctgacatatgaaatgaaagaatatgtctatgaaagactggtacacaaatgtgtaacagctgtctttgtaatagctaaaaagctggtctcgaactcctgaccttgtgatccacccgcctcggcctcccaaagtgctgggattataggcgtgagcccctgcacccggccaaaagttgatttttaattacataaaaatcgtaaaaacttctagtaaaaacttgatttggtgaatacagttatattttaaaaccttaaggtgacaagcattttctatgcctaaatcttcattggtttgcctggaaagagtctctgttaaaagattttccatattcaaagtaaaaggaaagatttcttgctttctaattgtcttttggacacatgcctattttctttgaggtataaacctttagatgtgaaaaatgtaatttcattctgctattgtgtgtgcttgtgtgtgtgtaattgaaaaaactgggaaatcctgctttgttggtaataaatcaatatttttatattcttttggtgtatgttattt

SEQ ID NO: 374268 - DNA, 475 bp, Homo sapiens
tatttaattcatccaaaagactgttgcaaaatttattttctttgcatgttcctaccccattcaagaatattcattatgagttataggcgtgagcccctgcacccggccaaaagttgatttttaattacataaaaatcgtaaaaacttctagtaaaaacttgatttggtgaatacagttatattttaaaaccttaaggtgacaagcattttctatgcctaaatcttcattggtttgcctggaaagagtctctgttaaaagattttccatattcaaagtaaaaggaaagatttcttgctttctaattgtcttttggacacatgcctattttctttgaggtataaacctttagatgtgaaaaatgtaatttcattctgctattgtgtgtgcttgtgtgtgtgtaattgaaaaaactgggaaatcctgctttgttggtaataaatcaatatttttatattcttttggtgtatgttattt

SEQ ID NO: 374269 - DNA, 415 bp, Homo sapiens
tatcctgtagggttgtttttaggatcagatgaaataagacaggaagataaatgtaaagagaaaaaacatgcatgcgtattactgcaactgtttattaatatcattaggaataaccttttatagacttgcaaataactgttggtattttgttgataattatggattttgcttgatgtaaattgttgtgggttaactcgatatttgaatgggcagggccatataatttgcttgcatgagtttttaactagctgtccccccctctccccggtttaattttacaggcaacagatattaaggaggcatctcaaaaatgcaaacagaagcaagatgttatagaaaggaaagataaacatagttttaaatatttaaaaatgtgcaagttgctttgctataataaaactaaatgcatacatac

SEQ ID NO: 374270 - DNA, 407 bp, Homo sapiens
ataagctattacaagctgtattatttccttttaagatctcttaagtcgaatataaggaaaaatttaggcacaggaccatgatatagttagcacacagtgagtgtgatgcgatgtgatgtttcaagtctgcagaataatattgaactatttaataaaagatgctaaagtagtgggttagttattgggaaaatgaaatgataaattatcccttcataatgcagaaacaatttccaaaaggactaaatgtaaaaaatgttaattataaaataattataagtaaatatcttaatttggaatataagtaagcattctaaacataatagaagaaatttaaaaagagtagtttgtaatcataaaaagcttaagcttttctggtaagtgaataagtcatatgtgattttaaaata

SEQ ID NO: 374271 - DNA, 5972 bp, Homo sapiens
gcggcagttcgcgcgggagcggggcgcctgggtggatgggcgcttgggcgcctgggctgccggacggtgggaacggaagtcgctgtgggacgctgaggaagccaggatggcgactccgagcaagaagacgtcaactccaagcccccagccttccaagagagctctcccgagagacccttcgtcggaggtcccgagcaagaggaagaattcggccccgcagctgccgctgttgcagtcgtccgggcctttcgtggaaggctctatcgtccgcatctcgatggagaacttcctaacatatgatatttgtgaagtatctcctggaccccacttgaatatgatcgttggagccaatggaacagggaagtcgagcattgtgtgtgccatttgccttggtttagctggaaaacctgctttcatgggacgagcagataaggttgggttttttgtgaagagaggatgttctagaggcatggttgaaattgaattgttcagggcttctggaaatcttgtaatcacccgtgagattgatgtggcaaaaaatcagtccttttggttcatcaacaaaaaatctacaacccagaaaatagtggaagagaaagttgcagccttaaatattcaagtggggaatctttgccagtttctccctcaggacaaagttggagaatttgctaaactcagcaaaattgaactcctcgaagccactgaaaagtcaattggtcccccagaaatgcacaaatatcactgtgaactcaaaaacttaagggagaaagaaaaacagctcgagacctcatgcaaagagaaaactgagtatctacagaaaatggttcagaggaatgaaagatataaacaagatgtggagaggttctatgaacggaagcgacatttagatttaattgagatgcttgaagcaaaaaggccatgggtggaatatgaaaatgttcgtcaggaatatgaagaagtaaaactagttcgtgaccgagtgaaggaagaggtcagaaaacttaaagaagggcagattcctataacatgtcgaattgaagaaatggaaaacgagcgtcacaatttggaggctcgaatcaaagaaaaggcaacagatattaaggaggcatctcaaaaatgcaaacagaagcaagatgttatagaaaggaaagataaacatattgaggaacttcagcaggctttaatagtaaagcaaaatgaagagcttgaccgacagaggagaataggtaatacccgcaaaatgatagaggatttgcaaaatgaactaaagaccacggaaaactgcgagaatcttcagccccagattgatgccattacaaatgatctgagacggattcaggatgaaaaggcattatgtgaaggcgaaataattgataagcgaagagagagggaaactctagagaaggagaaaaagagtgtggacgatcatattgtacgttttgacaatcttatgaatcagaaggaagataagctaagacagagattccgtgacacgtatgatgctgttttatggctaagaaataacagagacaaatttaaacaaagagtctgtgagcccataatgctcacgatcaatatgaaagataataaaaatgccaaatatattgaaaatcatattccatcaaatgacttaagagcctttgtatttgaaagtcaagaagatatggaggttttcctcaaagaggttcgtgacaataaaaaattaagagtaaatgctgttattgctcccaagagttcatatgcagacaaagcaccttcaagatctttgaatgaacttaaacaatacggatttttctcttatttgagagaattatttgatgcacctgatcctgtaatgagttacctttgctgtcagtatcatattcatgaagttcctgtaggaactgaaaagaccagagaaagaattgaacgggtaatacaagaaacccgattaaaacagatttatacagcagaagaaaagtatgtggtgaaaacttctttttattcaaacaaagttatttctagtaacacatctctaaaagtagcgcagtttctcactgtcactgtggacctagagcagagaagacacttagaagaacagctaaaggaaattcatagaaaattgcaagcagtggattcagggttgattgccttacgtgaaacaagcaaacatctggagcacaaagacaatgaacttagacaaaagaagaaggagcttcttgagagaaaaaccaagaaaagacaactggaacaaaaaatcagttccaaactaggaagtttaaagctgatggaacaggatacttgcaatcttgaagaggaagagcgaaaagcaagtaccaaaatcaaagaaataaatgttcaaaaagcgaaacttgttaccgaattaacaaacctaataaagatttgtacttctttgcatatacaaaaagtagatttaattctccaaaatactacagtgatctctgagaagaacaaattagaatcagattatatggccgcatcttcacaactccgtcttacagagcaacatttcattgaattggatgaaaatagacagagattattgcagaaatgcaaggaacttatgaaaagagctaggcaagtatgtaacctgggtgcagagcagactcttcctcaagaataccagacacaagtacccaccattccaaatggacacaactcctcactccccatggttttccaagaccttccaaacacattggatgaaattgatgctttattaactgaagaaagatcaagagcttcctgcttcacgggactgaatcctacaattgttcaggaatatacaaaaagagaagaagaaatagaacagttaactgaggaactaaagggaaagaaagttgaactagatcaatacagggaaaacatttcacaggtaaaagaaaggtggcttaatcctttaaaagagctggtagaaaaaattaatgaaaaattcagcaatttttttagttccatgcagtgtgctggtgaagttgatctccatacagaaaatgaggaagattatgataaatatggaattcgaattagagtcaaatttcgaagtagtactcaactgcatgaattaactcctcatcatcaaagtggaggtgaaagaagtgtttctaccatgttatacttgatggcacttcaggagctaaatagatgtccattcagagtagttgatgaaatcaatcagggaatggacccaatcaatgaacggagagtgtttgaaatggttgtaaatactgcctgtaaagaaaatacatctcaatactttttcataacaccaaagctcctgcaaaatcttccttattctgaaaagatgacagttttgtttgtctacaatggccctcatatgctggaaccaaacacatggaatttaaaggctttccaaaggcggcggcgccgtattacattcactcaaccttcttaataaaagtaaagagagggaacttgggaattttttttgttaaattctgtttataagtatggctcaactgaataaaaggagattcactaaaacgaaaagcagttatttttggaaacctgcttttaaatacaaataggttgataatggaaactataatgacctttccaaaatagcagctggtagtaaaagttaagtcttcttcagtcttggttgaacttgagttcttggcactctgaccatgagtcattcagttctcatgttaaaatgtacttaatattacaaatcaaaggtacagtggaagaagggttaatcacaagaagttacttatatggtagccctgagctttaattgcagagtaactttaattacttttagagcctaaagatgactctagagcctaagtcctagtttctcccaatgttatatttaattttaaaaaattgatatgaaaatgtctaatgtatagtaataatttatgacagatctagtcatttcttcctattaaaaaagattaccttatctccagtaggaaatggaattttatgggcctttaaaagaaagttttatgaaacttgatgctataattttattggtatttcaaggggaaaaaagcactggggttcaaaaatggtagcagaactgctttgaaatgctgcaaggtggccactagatgatgcaaaatacaaccaaaagattgactgagaataaaattaggtgacaagggtttttaaagaataaccttttaaagtgtgggggcaggggttgcttttttttattttatttaaagtcaattatattttacatcttacatttctaaaagcattttataattatttttagtaagatttttcttaaaatttcatatactggtttctacaatttatatttgaaatttctcagtgttatgtaaagagtgatggaaaagcattgatttctttaaaaccgtaatgtttttagaacttaagcctatagggcctttcttacaatgttgatgtacccattatcttagaaaatctagtttaaactgttttctttcaccgcaaaagaattaaatgggaaaatcatttgtttatctctaagttatactaattagtagaaccaaacaaattatcttcttttaaaaaataaatcttataggaaaatagacagtccaaagtcatgtctttgaacagtggattggatctgtgccagtaatgacaaaattatttttttgacttgcttgcctgaataaattgaagaattgctttcagtttgggttttgtatattcttaagtagccattgaaatttatattcttaactaggtcaaaaaataatgagccataagtttatgtcctctcacttagacattttctctttaaaaaggtattttcttctttataaacattttaaaagagccttcccttcttaaactaactccagtgcatgaagtgtgaaaatattttaaaatgacatttttactaatatgagcaagtcatgtaaacattgaagaacttggtaacatattagtaaatggatattaccaaatgttttcatcgttaattactttgcgttccaccaaaatatctttactaaaatgtgcttggtgtagtttgtttattgtctaaattagtaccagtcatcttatttctgcaaaatgagtatcaatgtgaaaaagacacgtgaagattaagcatgtttgaaaataaaatggtcaattacatttcaatttacataggccaacaactgttccatactttgtttgtaaacatttaatttctctactggacaaaattaatatttggctttacattgaattttgagctgtgaagaataaattatgtatcattttagcatattaaacagtagtaagtctagcacatagtctcagccacttaaaacaaaagtttttttgtttgtttgtttgtttgtttttttgagatggagtctcactctgttgcccaggctggagtgcagtggcgtgatctcggcttactgcaacctccgcctcccgggttcaagcgattctcctgcctcagcctcccaagtaactgggacaacaggcgcgtcccaccacacccagctaattttttatacttttagtagagatggggtttcagcatattggccaggctggtctcgaactcctgaccttgtgatccacccgcctcggcctcccaaagtgctgggattataggcgtgagcccctgcacccggccaaaagttgatttttaattacataaaaatcgtaaaaacttctagtaaaaacttgatttggtgaatacagttatattttaaaaccttaaggtgacaagcattttctatgcctaaatcttcattggtttgcctggaaagagtctctgttaaaagattttccatattcaaagtaaaaggaaagatttcttgctttctaattgtcttttggacacatgcctattttctttgaggtataaacctttagatgtgaaaaatgtaatttcattctgctattgtgtgtgcttgtgtgtgtgtaattgaaaaaactgggaaatcctgctttgttggtaataaatcaatatttttatattcttttggtgtatgttattt

SEQ ID NO: 374272 - DNA, 5927 bp, Homo sapiens
gcggcagttcgcgcgggagcggggcgcctgggtggatgggcgcttgggcgcctgggctgccggacggtgggaacggaagtcgctgtgggacgctgaggaagccaggatggcgactccgagcaagaagacgtcaactccaagcccccagccttccaagagagctctcccgagagacccttcgtcggaggtcccgagcaagaggaagaattcggccccgcagctgccgctgttgcagtcgtccgggcctttcgtggaaggctctatcgtccgcatctcgatggagaacttcctaacatatgatatttgtgaagtatctcctggaccccacttgaatatgatcgttggagccaatggaacagggaagtcgagcattgtgtgtgccatttgccttggtttagctggaaaacctgctttcatgggacgagcagataaggttgggttttttgtgaagagaggatgttctagaggcatggttgaaattgaattgttcagggcttctggaaatcttgtaatcacccgtgagattgatgtggcaaaaaatcagtccttttggttcatcaacaaaaaatctacaacccagaaaatagtggaagagaaagttgcagccttaaatattcaagtggggaatctttgccagtttctccctcaggacaaagttggagaatttgctaaactcagcaaaattgaactcctcgaagccactgaaaagtcaattggtcccccagaaatgcacaaatatcactgtgaactcaaaaacttaagggagaaagaaaaacagctcgagacctcatgcaaagagaaaactgagtatctacagaaaatggttcagaggaatgaaagatataaacaagatgtggagaggttctatgaacggaagcgacatttagatttaattgagatgcttgaagcaaaaaggccatgggtggaatatgaaaatgttcgtcaggaatatgaagaagtaaaactagttcgtgaccgagtgaaggaagaggtcagaaaacttaaagaagggcagattcctataacatgtcgaattgaagaaatggaaaacgagcgtcacaatttggaggctcgaatcaaagaaaaggcaacagatattaaggaggcatctcaaaaatgcaaacagaagcaagatgttatagaaaggaaagataaacatattgaggaacttcagcaggctttaatagtaaagcaaaatgaagagcttgaccgacagaggagaataggtaatacccgcaaaatgatagaggatttgcaaaatgaactaaagaccacggaaaactgcgagaatcttcagccccagattgatgccattacaaatgatctgagacggattcaggatgaaaaggcattatgtgaaggcgaaataattgataagcgaagagagagggaaactctagagaaggagaaaaagagtgtggacgatcatattgtacgttttgacaatcttatgaatcagaaggaagataagctaagacagagattccgtgacacgtatgatgctgttttatggctaagaaataacagagacaaatttaaacaaagagtctgtgagcccataatgctcacgatcaatatgaaagataataaaaatgccaaatatattgaaaatcatattccatcaaatgacttaagagcctttgtatttgaaagtcaagaagatatggaggttttcctcaaagaggttcgtgacaataaaaaattaagagtaaatgctgttattgctcccaagagttcatatgcagacaaagcaccttcaagatctttgaatgaacttaaacaatacggatttttctcttatttgagagaattatttgatgcacctgatcctgtaatgagttacctttgctgtcagtatcatattcatgaagttcctgtaggaactgaaaagaccagagaaagaattgaacgggtaatacaagaaacccgattaaaacagatttatacagcagaagaaaagtatgtggtgaaaacttctttttattcaaacaaagttatttctagtaacacatctctaaaagtagcgcagtttctcactgtcactgtggacctagagcagagaagacacttagaagaacagctaaaggaaattcatagaaaattgcaagcagtggattcagggttgattgccttacgtgaaacaagcaaacatctggagcacaaagacaatgaacttagacaaaagaagaaggagcttcttgagagaaaaaccaagaaaagacaactggaacaaaaaatcagttccaaactaggaagtttaaagctgatggaacaggatacttgcaatcttgaagaggaagagcgaaaagcaagtaccaaaatcaaagaaataaatgttcaaaaagcgaaacttgttaccgaattaacaaacctaataaagatttgtacttctttgcatatacaaaaagtagatttaattctccaaaatactacagtgatctctgagaagaacaaattagaatcagattatatggccgcatcttcacaactccgtcttacagagcaacatttcattgaattggatgaaaatagacagagattattgcagaaatgcaaggaacttatgaaaagagctaggcaagtatgtaacctgggtgcagagcagactcttcctcaagaataccagacagttttccaagaccttccaaacacattggatgaaattgatgctttattaactgaagaaagatcaagagcttcctgcttcacgggactgaatcctacaattgttcaggaatatacaaaaagagaagaagaaatagaacagttaactgaggaactaaagggaaagaaagttgaactagatcaatacagggaaaacatttcacaggtaaaagaaaggtggcttaatcctttaaaagagctggtagaaaaaattaatgaaaaattcagcaatttttttagttccatgcagtgtgctggtgaagttgatctccatacagaaaatgaggaagattatgataaatatggaattcgaattagagtcaaatttcgaagtagtactcaactgcatgaattaactcctcatcatcaaagtggaggtgaaagaagtgtttctaccatgttatacttgatggcacttcaggagctaaatagatgtccattcagagtagttgatgaaatcaatcagggaatggacccaatcaatgaacggagagtgtttgaaatggttgtaaatactgcctgtaaagaaaatacatctcaatactttttcataacaccaaagctcctgcaaaatcttccttattctgaaaagatgacagttttgtttgtctacaatggccctcatatgctggaaccaaacacatggaatttaaaggctttccaaaggcggcggcgccgtattacattcactcaaccttcttaataaaagtaaagagagggaacttgggaattttttttgttaaattctgtttataagtatggctcaactgaataaaaggagattcactaaaacgaaaagcagttatttttggaaacctgcttttaaatacaaataggttgataatggaaactataatgacctttccaaaatagcagctggtagtaaaagttaagtcttcttcagtcttggttgaacttgagttcttggcactctgaccatgagtcattcagttctcatgttaaaatgtacttaatattacaaatcaaaggtacagtggaagaagggttaatcacaagaagttacttatatggtagccctgagctttaattgcagagtaactttaattacttttagagcctaaagatgactctagagcctaagtcctagtttctcccaatgttatatttaattttaaaaaattgatatgaaaatgtctaatgtatagtaataatttatgacagatctagtcatttcttcctattaaaaaagattaccttatctccagtaggaaatggaattttatgggcctttaaaagaaagttttatgaaacttgatgctataattttattggtatttcaaggggaaaaaagcactggggttcaaaaatggtagcagaactgctttgaaatgctgcaaggtggccactagatgatgcaaaatacaaccaaaagattgactgagaataaaattaggtgacaagggtttttaaagaataaccttttaaagtgtgggggcaggggttgcttttttttattttatttaaagtcaattatattttacatcttacatttctaaaagcattttataattatttttagtaagatttttcttaaaatttcatatactggtttctacaatttatatttgaaatttctcagtgttatgtaaagagtgatggaaaagcattgatttctttaaaaccgtaatgtttttagaacttaagcctatagggcctttcttacaatgttgatgtacccattatcttagaaaatctagtttaaactgttttctttcaccgcaaaagaattaaatgggaaaatcatttgtttatctctaagttatactaattagtagaaccaaacaaattatcttcttttaaaaaataaatcttataggaaaatagacagtccaaagtcatgtctttgaacagtggattggatctgtgccagtaatgacaaaattatttttttgacttgcttgcctgaataaattgaagaattgctttcagtttgggttttgtatattcttaagtagccattgaaatttatattcttaactaggtcaaaaaataatgagccataagtttatgtcctctcacttagacattttctctttaaaaaggtattttcttctttataaacattttaaaagagccttcccttcttaaactaactccagtgcatgaagtgtgaaaatattttaaaatgacatttttactaatatgagcaagtcatgtaaacattgaagaacttggtaacatattagtaaatggatattaccaaatgttttcatcgttaattactttgcgttccaccaaaatatctttactaaaatgtgcttggtgtagtttgtttattgtctaaattagtaccagtcatcttatttctgcaaaatgagtatcaatgtgaaaaagacacgtgaagattaagcatgtttgaaaataaaatggtcaattacatttcaatttacataggccaacaactgttccatactttgtttgtaaacatttaatttctctactggacaaaattaatatttggctttacattgaattttgagctgtgaagaataaattatgtatcattttagcatattaaacagtagtaagtctagcacatagtctcagccacttaaaacaaaagtttttttgtttgtttgtttgtttgtttttttgagatggagtctcactctgttgcccaggctggagtgcagtggcgtgatctcggcttactgcaacctccgcctcccgggttcaagcgattctcctgcctcagcctcccaagtaactgggacaacaggcgcgtcccaccacacccagctaattttttatacttttagtagagatggggtttcagcatattggccaggctggtctcgaactcctgaccttgtgatccacccgcctcggcctcccaaagtgctgggattataggcgtgagcccctgcacccggccaaaagttgatttttaattacataaaaatcgtaaaaacttctagtaaaaacttgatttggtgaatacagttatattttaaaaccttaaggtgacaagcattttctatgcctaaatcttcattggtttgcctggaaagagtctctgttaaaagattttccatattcaaagtaaaaggaaagatttcttgctttctaattgtcttttggacacatgcctattttctttgaggtataaacctttagatgtgaaaaatgtaatttcattctgctattgtgtgtgcttgtgtgtgtgtaattgaaaaaactgggaaatcctgctttgttggtaataaatcaatatttttatattcttttggtgtatgttattt

SEQ ID NO: 374273 - DNA, 5256 bp, Homo sapiens
  misc_feature (15)..(15): n is a, c, g, or t
tgatgccattacaantgatctgagacggattcaggatgaaaaggcattatgtgaaggcgaaataattgacctcatgcaaagagaaaactgagtatctacagaaaatggttcagaggaatgaaagatataaacaagatgtggagaggttctatgaacggaagcgacatttagatttaattgagatgcttgaagcaaaaaggccatgggtggaatatgaaaatgttcgtcaggaatatgaagaagtaaaactagttcgtgaccgagtgaaggaagaggtcagaaaacttaaagaagggcagattcctataacatgtcgaattgaagaaatggaaaacgagcgtcacaatttggaggctcgaatcaaagaaaaggcaacagatattaaggaggcatctcaaaaatgcaaacagaagcaagatgttatagaaaggaaagataaacatattgaggaacttcagcaggctttaatagtaaagcaaaatgaagagcttgaccgacagaggagaataggtaatacccgcaaaatgatagaggatttgcaaaatgaactaaagaccacggaaaactgcgagaatcttcagccccagattgatgccattacaaatgatctgagacggattcaggatgaaaaggcattatgtgaaggcgaaataattgataagcgaagagagagggaaactctagagaaggagaaaaagagtgtggacgatcatattgtacgttttgacaatcttatgaatcagaaggaagataagctaagacagagattccgtgacacgtatgatgctgttttatggctaagaaataacagagacaaatttaaacaaagagtctgtgagcccataatgctcacgatcaatatgaaagataataaaaatgccaaatatattgaaaatcatattccatcaaatgacttaagagcctttgtatttgaaagtcaagaagatatggaggttttcctcaaagaggttcgtgacaataaaaaattaagagtaaatgctgttattgctcccaagagttcatatgcagacaaagcaccttcaagatctttgaatgaacttaaacaatacggatttttctcttatttgagagaattatttgatgcacctgatcctgtaatgagttacctttgctgtcagtatcatattcatgaagttcctgtaggaactgaaaagaccagagaaagaattgaacgggtaatacaagaaacccgattaaaacagatttatacagcagaagaaaagtatgtggtgaaaacttctttttattcaaacaaagttatttctagtaacacatctctaaaagtagcgcagtttctcactgtcactgtggacctagagcagagaagacacttagaagaacagctaaaggaaattcatagaaaattgcaagcagtggattcagggttgattgccttacgtgaaacaagcaaacatctggagcacaaagacaatgaacttagacaaaagaagaaggagcttcttgagagaaaaaccaagaaaagacaactggaacaaaaaatcagttccaaactaggaagtttaaagctgatggaacaggatacttgcaatcttgaagaggaagagcgaaaagcaagtaccaaaatcaaagaaataaatgttcaaaaagcgaaacttgttaccgaattaacaaacctaataaagatttgtacttctttgcatatacaaaaagtagatttaattctccaaaatactacagtgatctctgagaagaacaaattagaatcagattatatggccgcatcttcacaactccgtcttacagagcaacatttcattgaattggatgaaaatagacagagattattgcagaaatgcaaggaacttatgaaaagagctaggcaagtatgtaacctgggtgcagagcagactcttcctcaagaataccagacacaagtacccaccattccaaatggacacaactcctcactccccatggttttccaagaccttccaaacacattggatgaaattgatgctttattaactgaagaaagatcaagagcttcctgcttcacgggactgaatcctacaattgttcaggaatatacaaaaagagaagaagaaatagaacagttaactgaggaactaaagggaaagaaagttgaactagatcaatacagggaaaacatttcacaggtaaaagaaaggtggcttaatcctttaaaagagctggtagaaaaaattaatgaaaaattcagcaatttttttagttccatgcagtgtgctggtgaagttgatctccatacagaaaatgaggaagattatgataaatatggaattcgaattagagtcaaatttcgaagtagtactcaactgcatgaattaactcctcatcatcaaagtggaggtgaaagaagtgtttctaccatgttatacttgatggcacttcaggagctaaatagatgtccattcagagtagttgatgaaatcaatcagggaatggacccaatcaatgaacggagagtgtttgaaatggttgtaaatactgcctgtaaagaaaatacatctcaatactttttcataacaccaaagctcctgcaaaatcttccttattctgaaaagatgacagttttgtttgtctacaatggccctcatatgctggaaccaaacacatggaatttaaaggctttccaaaggcggcggcgccgtattacattcactcaaccttcttaataaaagtaaagagagggaacttgggaattttttttgttaaattctgtttataagtatggctcaactgaataaaaggagattcactaaaacgaaaagcagttatttttggaaacctgcttttaaatacaaataggttgataatggaaactataatgacctttccaaaatagcagctggtagtaaaagttaagtcttcttcagtcttggttgaacttgagttcttggcactctgaccatgagtcattcagttctcatgttaaaatgtacttaatattacaaatcaaaggtacagtggaagaagggttaatcacaagaagttacttatatggtagccctgagctttaattgcagagtaactttaattacttttagagcctaaagatgactctagagcctaagtcctagtttctcccaatgttatatttaattttaaaaaattgatatgaaaatgtctaatgtatagtaataatttatgacagatctagtcatttcttcctattaaaaaagattaccttatctccagtaggaaatggaattttatgggcctttaaaagaaagttttatgaaacttgatgctataattttattggtatttcaaggggaaaaaagcactggggttcaaaaatggtagcagaactgctttgaaatgctgcaaggtggccactagatgatgcaaaatacaaccaaaagattgactgagaataaaattaggtgacaagggtttttaaagaataaccttttaaagtgtgggggcaggggttgcttttttttattttatttaaagtcaattatattttacatcttacatttctaaaagcattttataattatttttagtaagatttttcttaaaatttcatatactggtttctacaatttatatttgaaatttctcagtgttatgtaaagagtgatggaaaagcattgatttctttaaaaccgtaatgtttttagaacttaagcctatagggcctttcttacaatgttgatgtacccattatcttagaaaatctagtttaaactgttttctttcaccgcaaaagaattaaatgggaaaatcatttgtttatctctaagttatactaattagtagaaccaaacaaattatcttcttttaaaaaataaatcttataggaaaatagacagtccaaagtcatgtctttgaacagtggattggatctgtgccagtaatgacaaaattatttttttgacttgcttgcctgaataaattgaagaattgctttcagtttgggttttgtatattcttaagtagccattgaaatttatattcttaactaggtcaaaaaataatgagccataagtttatgtcctctcacttagacattttctctttaaaaaggtattttcttctttataaacattttaaaagagccttcccttcttaaactaactccagtgcatgaagtgtgaaaatattttaaaatgacatttttactaatatgagcaagtcatgtaaacattgaagaacttggtaacatattagtaaatggatattaccaaatgttttcatcgttaattactttgcgttccaccaaaatatctttactaaaatgtgcttggtgtagtttgtttattgtctaaattagtaccagtcatcttatttctgcaaaatgagtatcaatgtgaaaaagacacgtgaagattaagcatgtttgaaaataaaatggtcaattacatttcaatttacataggccaacaactgttccatactttgtttgtaaacatttaatttctctactggacaaaattaatatttggctttacattgaattttgagctgtgaagaataaattatgtatcattttagcatattaaacagtagtaagtctagcacatagtctcagccacttaaaacaaaagtttttttgtttgtttgtttgtttgtttttttgagatggagtctcactctgttgcccaggctggagtgcagtggcgtgatctcggcttactgcaacctccgcctcccgggttcaagcgattctcctgcctcagcctcccaagtaactgggacaacaggcgcgtcccaccacacccagctaattttttatacttttagtagagatggggtttcagcatattggccaggctggtctcgaactcctgaccttgtgatccacccgcctcggcctcccaaagtgctgggattataggcgtgagcccctgcacccggccaaaagttgatttttaattacataaaaatcgtaaaaacttctagtaaaaacttgatttggtgaatacagttatattttaaaaccttaaggtgacaagcattttctatgcctaaatcttcattggtttgcctggaaagagtctctgttaaaagattttccatattcaaagtaaaaggaaagatttcttgctttctaattgtcttttggacacatgcctattttctttgaggtataaacctttagatgtgaaaaatgtaatttcattctgctattgtgtgtgcttgtgtgtgtgtaattgaaaaaactgggaaatcctgctttgttggtaataaatcaatatttttatattcttttggtgtatgttattt

SEQ ID NO: 374274 - DNA, 3556 bp, Homo sapiens
atgtactgattgcctcccctcaaaaaaaaaagtatatgttctaatttgtccccatggcatggactcagaagatagtactgtggtgaaattcaactgtcaaagtaattagattctcaggatgcttttttagttcttcataagtgcagtataaagttctaacttcttgctctctttcaatgccccacatattctggacccattctaccaattcagcaagtacccaccattccaaatggacacaactcctcactccccatggttttccaagaccttccaaacacattggatgaaattgatgctttattaactgaagaaagatcaagagcttcctgcttcacgggactgaatcctacaattgttcaggaatatacaaaaagagaagaagaaatagaacagttaactgaggaactaaagggaaagaaagttgaactagatcaatacagggaaaacatttcacaggtaaaagaaaggtggcttaatcctttaaaagagctggtagaaaaaattaatgaaaaattcagcaatttttttagttccatgcagtgtgctggtgaagttgatctccatacagaaaatgaggaagattatgataaatatggaattcgaattagagtcaaatttcgaagtagtactcaactgcatgaattaactcctcatcatcaaagtggaggtgaaagaagtgtttctaccatgttatacttgatggcacttcaggagctaaatagatgtccattcagagtagttgatgaaatcaatcagggaatggacccaatcaatgaacggagagtgtttgaaatggttgtaaatactgcctgtaaagaaaatacatctcaatactttttcataacaccaaagctcctgcaaaatcttccttattctgaaaagatgacagttttgtttgtctacaatggccctcatatgctggaaccaaacacatggaatttaaaggctttccaaaggcggcggcgccgtattacattcactcaaccttcttaataaaagtaaagagagggaacttgggaattttttttgttaaattctgtttataagtatggctcaactgaataaaaggagattcactaaaacgaaaagcagttatttttggaaacctgcttttaaatacaaataggttgataatggaaactataatgacctttccaaaatagcagctggtagtaaaagttaagtcttcttcagtcttggttgaacttgagttcttggcactctgaccatgagtcattcagttctcatgttaaaatgtacttaatattacaaatcaaaggtacagtggaagaagggttaatcacaagaagttacttatatggtagccctgagctttaattgcagagtaactttaattacttttagagcctaaagatgactctagagcctaagtcctagtttctcccaatgttatatttaattttaaaaaattgatatgaaaatgtctaatgtatagtaataatttatgacagatctagtcatttcttcctattaaaaaagattaccttatctccagtaggaaatggaattttatgggcctttaaaagaaagttttatgaaacttgatgctataattttattggtatttcaaggggaaaaaagcactggggttcaaaaatggtagcagaactgctttgaaatgctgcaaggtggccactagatgatgcaaaatacaaccaaaagattgactgagaataaaattaggtgacaagggtttttaaagaataaccttttaaagtgtgggggcaggggttgcttttttttattttatttaaagtcaattatattttacatcttacatttctaaaagcattttataattatttttagtaagatttttcttaaaatttcatatactggtttctacaatttatatttgaaatttctcagtgttatgtaaagagtgatggaaaagcattgatttctttaaaaccgtaatgtttttagaacttaagcctatagggcctttcttacaatgttgatgtacccattatcttagaaaatctagtttaaactgttttctttcaccgcaaaagaattaaatgggaaaatcatttgtttatctctaagttatactaattagtagaaccaaacaaattatcttcttttaaaaaataaatcttataggaaaatagacagtccaaagtcatgtctttgaacagtggattggatctgtgccagtaatgacaaaattatttttttgacttgcttgcctgaataaattgaagaattgctttcagtttgggttttgtatattcttaagtagccattgaaatttatattcttaactaggtcaaaaaataatgagccataagtttatgtcctctcacttagacattttctctttaaaaaggtattttcttctttataaacattttaaaagagccttcccttcttaaactaactccagtgcatgaagtgtgaaaatattttaaaatgacatttttactaatatgagcaagtcatgtaaacattgaagaacttggtaacatattagtaaatggatattaccaaatgttttcatcgttaattactttgcgttccaccaaaatatctttactaaaatgtgcttggtgtagtttgtttattgtctaaattagtaccagtcatcttatttctgcaaaatgagtatcaatgtgaaaaagacacgtgaagattaagcatgtttgaaaataaaatggtcaattacatttcaatttacataggccaacaactgttccatactttgtttgtaaacatttaatttctctactggacaaaattaatatttggctttacattgaattttgagctgtgaagaataaattatgtatcattttagcatattaaacagtagtaagtctagcacatagtctcagccacttaaaacaaaagtttttttgtttgtttgtttgtttgtttttttgagatggagtctcactctgttgcccaggctggagtgcagtggcgtgatctcggcttactgcaacctccgcctcccgggttcaagcgattctcctgcctcagcctcccaagtaactgggacaacaggcgcgtcccaccacacccagctaattttttatacttttagtagagatggggtttcagcatattggccaggctggtctcgaactcctgaccttgtgatccacccgcctcggcctcccaaagtgctgggattataggcgtgagcccctgcacccggccaaaagttgatttttaattacataaaaatcgtaaaaacttctagtaaaaacttgatttggtgaatacagttatattttaaaaccttaaggtgacaagcattttctatgcctaaatcttcattggtttgcctggaaagagtctctgttaaaagattttccatattcaaagtaaaaggaaagatttcttgctttctaattgtcttttggacacatgcctattttctttgaggtataaacctttagatgtgaaaaatgtaatttcattctgctattgtgtgtgcttgtgtgtgtgtaattgaaaaaactgggaaatcctgctttgttggtaataaatcaatatttttatattcttttggtgtatgttattt

SEQ ID NO: 374275 - DNA, 3433 bp, Homo sapiens
gcggcagttcgcgcgggagcggggcgcctgggtggatgggcgcttgggcgcctgggctgccggacggtgggaacggaagtcgctgtgggacgctgaggaagccaggatggcgactccgagcaagaagacgtcaactccaagcccccagccttccaagagagctctcccgagagacccttcgtcggaggtcccgagcaagaggaagaattcggccccgcagctgccgctgttgcagtcgtccgggcctttcgtggaaggctctatcgtccgcatctcgatggagaacttcctaacatatgatatttgtgaagtatctcctggaccccacttgaatatgatcgttggagccaatggaacagggaagtcgagcattgtgtgtgccatttgccttggtttagctggaaaacctgctttcatgggacgagcagataaggttgggttttttgtgaagagaggatgttctagaggcatggttgaaattgaattgttcagggcttctggaaatcttgtaatcacccgtgagattgatgtggcaaaaaatcagtccttttggttcatcaacaaaaaatctacaacccagaaaatagtggaagagaaagttgcagccttaaatattcaagtggggaatctttgccagtttctccctcaggacaaagttggagaatttgctaaactcagcaaaattgaactcctcgaagccactgaaaagtcaattggtcccccagaaatgcacaaatatcactgtgaactcaaaaacttaagggagaaagaaaaacagctcgagacctcatgcaaagagaaaactgagtatctacagaaaatggttcagaggaatgaaagatataaacaagatgtggagaggttctatgaacggaagcgacatttagatttaattgagatgcttgaagcaaaaaggccatgggtggaatatgaaaatgttcgtcaggaatatgaagaagtaaaactagttcgtgaccgagtgaaggaagaggtcagaaaacttaaagaagggcagattcctataacatgtcgaattgaagaaatggaaaacgagcgtcacaatttggaggctcgaatcaaagaaaaggcaacagatattaaggaggcatctcaaaaatgcaaacagaagcaagatgttatagaaaggaaagataaacatattgaggaacttcagcaggctttaatagtaaagcaaaatgaagagcttgaccgacagaggagaataggtaatacccgcaaaatgatagaggatttgcaaaatgaactaaagaccacggaaaactgcgagaatcttcagccccagattgatgccattacaaatgatctgagacggattcaggatgaaaaggcattatgtgaaggcgaaataattgataagcgaagagagagggaaactctagagaaggagaaaaagagtgtggacgatcatattgtacgttttgacaatcttatgaatcagaaggaagataagctaagacagagattccgtgacacgtatgatgctgttttatggctaagaaataacagagacaaatttaaacaaagagtctgtgagcccataatgctcacgatcaatatgaaagataataaaaatgccaaatatattgaaaatcatattccatcaaatgacttaagagcctttgtatttgaaagtcaagaagatatggaggttttcctcaaagaggttcgtgacaataaaaaattaagagtaaatgctgttattgctcccaagagttcatatgcagacaaagcaccttcaagatctttgaatgaacttaaacaatacggatttttctcttatttgagagaattatttgatgcacctgatcctgtaatgagttacctttgctgtcagtatcatattcatgaagttcctgtaggaactgaaaagaccagagaaagaattgaacgggtaatacaagaaacccgattaaaacagatttatacagcagaagaaaagtatgtggtgaaaacttctttttattcaaacaaagttatttctagtaacacatctctaaaagtagcgcagtttctcactgtcactgtggacctagagcagagaagacacttagaagaacagctaaaggaaattcatagaaaattgcaagcagtggattcagggttgattgccttacgtgaaacaagcaaacatctggagcacaaagacaatgaacttagacaaaagaagaaggagcttcttgagagaaaaaccaagaaaagacaactggaacaaaaaatcagttccaaactaggaagtttaaagctgatggaacaggatacttgcaatcttgaagaggaagagcgaaaagcaagtaccaaaatcaaagaaataaatgttcaaaaagcgaaacttgttaccgaattaacaaacctaataaagatttgtacttctttgcatatacaaaaagtagatttaattctccaaaatactacagtgatctctgagaagaacaaattagaatcagattatatggccgcatcttcacaactccgtcttacagagcaacatttcattgaattggatgaaaatagacagagattattgcagaaatgcaaggaacttatgaaaagagctaggcaagtatgtaacctgggtgcagagcagactcttcctcaagaataccagacacaagtacccaccattccaaatggacacaactcctcactccccatggttttccaagaccttccaaacacattggatgaaattgatgctttattaactgaagaaagatcaagagcttcctgcttcacgggactgaatcctacaattgttcaggaatatacaaaaagagaagaagaaatagaacagttaactgaggaactaaagggaaagaaagttgaactagatcaatacagggaaaacatttcacaggtaaaagaaaggtggcttaatcctttaaaagagctggtagaaaaaattaatgaaaaattcagcaatttttttagttccatgcagtgtgctggtgaagttgatctccatacagaaaatgagacaggcaaaggccaggtgctgtggcttatgcctaatcccacttttataggcgtgagcccctgcacccggccaaaagttgatttttaattacataaaaatcgtaaaaacttctagtaaaaacttgatttggtgaatacagttatattttaaaaccttaaggtgacaagcattttctatgcctaaatcttcattggtttgcctggaaagagtctctgttaaaagattttccatattcaaagtaaaaggaaagatttcttgctttctaattgtcttttggacacatgcctattttctttgaggtataaacctttagatgtgaaaaatgtaatttcattctgctattgtgtgtgcttgtgtgtgtgtaattgaaaaaactgggaaatcctgctttgttggtaataaatcaatatttttatattcttttggtgtatgttattt

SEQ ID NO: 374276 - DNA, 3034 bp, Homo sapiens
gcggcagttcgcgcgggagcggggcgcctgggtggatgggcgcttgggcgcctgggctgccggacggtgggaacggaagtcgctgtgggacgctgaggaagccaggatggcgactccgagcaagaagacgtcaactccaagcccccagccttccaagagagctctcccgagagacccttcgtcggaggtcccgagcaagaggaagaattcggccccgcagctgccgctgttgcagtcgtccgggcctttcgtggaaggctctatcgtccgcatctcgatggagaacttcctaacatatgatatttgtgaagtatctcctggaccccacttgaatatgatcgttggagccaatggaacagggaagtcgagcattgtgtgtgccatttgccttggtttagctggaaaacctgctttcatgggacgagcagataaggttgggttttttgtgaagagaggatgttctagaggcatggttgaaattgaattgttcagggcttctggaaatcttgtaatcacccgtgagattgatgtggcaaaaaatcagtccttttggttcatcaacaaaaaatctacaacccagaaaatagtggaagagaaagttgcagccttaaatattcaagtggggaatctttgccagtttctccctcaggacaaagttggagaatttgctaaactcagcaaaattgaactcctcgaagccactgaaaagtcaattggtcccccagaaatgcacaaatatcactgtgaactcaaaaacttaagggagaaagaaaaacagctcgagacctcatgcaaagagaaaactgagtatctacagaaaatggttcagaggaatgaaagatataaacaagatgtggagaggttctatgaacggaagcgacatttagatttaattgagatgcttgaagcaaaaaggccatgggtggaatatgaaaatgttcgtcaggaatatgaagaagtaaaactagttcgtgaccgagtgaaggaagaggtcagaaaacttaaagaagggcagattcctataacatgtcgaattgaagaaatggaaaacgagcgtcacaatttggaggctcgaatcaaagaaaaggcaacagatattaaggaggcatctcaaaaatgcaaacagaagcaagatgttatagaaaggaaagataaacatattgaggaacttcagcaggctttaatagtaaagcaaaatgaagagcttgaccgacagaggagaataggtaatacccgcaaaatgatagaggatttgcaaaatgaactaaagaccacggaaaactgcgagaatcttcagccccagattgatgccattacaaatgatctgagacggattcaggatgaaaaggcattatgtgaaggcgaaataattgataagcgaagagagagggaaactctagagaaggagaaaaagagtgtggacgatcatattgtacgttttgacaatcttatgaatcagaaggaagataagctaagacagagattccgtgacacgtatgatgctgttttatggctaagaaataacagagacaaatttaaacaaagagtctgtgagcccataatgctcacgatcaatatgaaagataataaaaatgccaaatatattgaaaatcatattccatcaaatgacttaagagcctttgtatttgaaagtcaagaagatatggaggttttcctcaaagaggttcgtgacaataaaaaattaagagtaaatgctgttattgctcccaagagttcatatgcagacaaagcaccttcaagatctttgaatgaacttaaacaatacggatttttctcttatttgagagaattatttgatgcacctgatcctgtaatgagttacctttgctgtcagtatcatattcatgaagttcctgtaggaactgaaaagaccagagaaagaattgaacgggtaatacaagaaacccgattaaaacagatttatacagcagaagaaaagtatgtggtgaaaacttctttttattcaaacaaagttatttctagtaacacatctctaaaagtagcgcagtttctcactgtcactgtggacctagagcagagaagacacttagaagaacagctaaaggaaattcatagaaaattgcaagcagtggattcagggttgattgccttacgtgaaacaagcaaacatctggagcacaaagacaatgaacttagacaaaagaagaaggagcttcttgagagaaaaaccaagaaaagacaactggaacaaaaaatcagttccaaactaggaagtttaaagctgatggaacaggatacttgcaatcttgaagaggaagagcgaaaagcaagtaccaaaatcaaagaaataaatgttcaaaaagcgaaacttgttaccgaattaacaaacctaataaagatttgtacttctttgcatatacaaaaagtagatttaattctccaaaatactacagtgatctctgagaagaacaaattagaatcagattatatggccgcatcttcacaactccgtcttacagagcaacatttcattgaattggatgaaaatagacagagattattgcagaaatgcaaggaacttatgaaaagagctaggcaagtatgtaacctgggtgcagagcagactcttcctcaagaataccagacagtaagtataaaaagtatataatgctacaattgccatatttaacatttttaagattatggaatcttagccattgtaacaggccgtgaaaaacatgatgtgtcgtaaaaaatagggagtttttccacatttttaaactgaatatatatatatatataaaataatgttgcttaagagatcaatggtattggtactataacatttattcttccaatacaaatgccttttaatgggtacagttggaacatatatagtttttcatggaaacattgtaccagtaattggtatatcagaaataataaatagaatattttaaaaataaagggaaaatgaaaatgtttccctggaaattggggtgtttaattagggttcaatgagagctgaatatttaaggctaacatctgccaa

SEQ ID NO: 374277 - DNA, 1618 bp, Homo sapiens
gcggcagttcgcgcgggagcggggcgcctgggtggatgggcgcttgggcgcctgggctgccggacggtgggaacggaagtcgctgtgggacgctgaggaagccaggatggcgactccgagcaagaagacgtcaactccaagcccccagccttccaagagagctctcccgagagacccttcgtcggaggtcccgagcaagaggaagaattcggccccgcagctgccgctgttgcagtcgtccgggcctttcgtggaaggctctatcgtccgcatctcgatggagaacttcctaacatatgatatttgtgaagtatctcctggaccccacttgaatatgatcgttggagccaatggaacagggaagtcgagcattgtgtgtgccatttgccttggtttagctggaaaacctgctttcatgggacgagcagataaggttgggttttttgtgaagagaggatgttctagaggcatggttgaaattgaattgttcagggcttctggaaatcttgtaatcacccgtgagattgatgtggcaaaaaatcagtccttttggttcatcaacaaaaaatctacaacccagaaaatagtggaagagaaagttgcagccttaaatattcaagtggggaatctttgccagtttctccctcaggacaaagttggagaatttgctaaactcagcaaaattgaactcctcgaagccactgaaaagtcaattggtcccccagaaatgcacaaatatcactgtgaactcaaaaacttaagggagaaagaaaaacagctcgagacctcatgcaaagagaaaactgagtatctacagaaaatggttcagaggaatgaaagatataaacaagatgtggagaggttctatgaacggaagcgacatttagatttaattgagatgcttgaagcaaaaaggccatgggtggaatatgaaaatgttcgtcaggaatatgaagaagtaaaactagttcgtgaccgagtgaaggaagaggtcagaaaacttaaagaagggcagattcctataacatgtcgaattgaagaaatggaaaacgagcgtcacaatttggaggctcgaatcaaagaaaaggcaacagatattaaggaggcatctcaaaaatgcaaacagaagcaagatgttatagaaaggaaagataaacatattgaggaacttcagcaggctttaatagtaaagcaaaatgaagagcttgaccgacagaggagaataggtaatacccgcaaaatgatagaggatttgcaaaatgaactaaagaccacggaaaactgcgagaatcttcagccccagattgatgccattacaaatgatctgagacggattcaggatgaaaaggcattatgtgaaggcgaaataattgataagcgaagagagagggaaactctagagaaggagaaaaagagtgtggacgatcatattgtacgttttgacaatcttatgaatcagaaggaagataagctaagacagagattccgtgacacgtatgatgctgttttatggctaagaaataacagagacaaatttaaacaaagagtctgtgagcccataatgctcacggtaagaaactttgttcatcttggtagtattggttttattattgtaatc

SEQ ID NO: 374278 - DNA, 632 bp, Homo sapiens
tgtttttaaaattttggccagagtttacaatcattgtttgtagaaaagttagtccaatacaagataatctgccaataatgtaagcataactatctcccttctgtatcattttgaagtaattcccagacattctgtttcacctgaaaatattttggtatgtatctctaaaagaagtggactctttttataaaaacacataactacagtattatcacagtaaaaaaatttatactaagtaacatctaatatgccgtgttcgagtttcttatccatcccacgaatgccagtaggagtatggtaactataaatcatttcagtagagaatatatggtaattaaaataatattttcttttccctatattcaggttcgtgacaataaaaaattaagagtaaatgctgttattgctcccaagagttcatatgcagacaaagcaccttcaagatctttgaatgaacttaagtaagtcttgaaaatactaagatttatttaaatattgaattattcaacatttattgttacataaataagctattacaagctgtattatttccttttaagatctcttaagtcgaatataaggaaaaatttaggcacaggaccatgatatagttagcacacagtgagtgtgat

SEQ ID NO: 374279 - DNA, 3497 bp, Homo sapiens
gcggcagttcgcgcgggagcggggcgcctgggtggatgggcgcttgggcgcctgggctgccggacggtgggaacggaagtcgctgtgggacgctgaggaagccaggatggcgactccgagcaagaagacgtcaactccaagcccccagccttccaagagagctctcccgagagacccttcgtcggaggtcccgagcaagaggaagaattcggccccgcagctgccgctgttgcagtcgtccgggcctttcgtggaaggctctatcgtccgcatctcgatggagaacttcctaacatatgatatttgtgaagtatctcctggaccccacttgaatatgatcgttggagccaatggaacagggaagtcgagcattgtgtgtgccatttgccttggtttagctggaaaacctgctttcatgggacgagcagataaggttgggttttttgtgaagagaggatgttctagaggcatggttgaaattgaattgttcagggcttctggaaatcttgtaatcacccgtgagattgatgtggcaaaaaatcagtccttttggttcatcaacaaaaaatctacaacccagaaaatagtggaagagaaagttgcagccttaaatattcaagtggggaatctttgccagtttctccctcaggacaaagttggagaatttgctaaactcagcaaaattgaactcctcgaagccactgaaaagtcaattggtcccccagaaatgcacaaatatcactgtgaactcaaaaacttaagggagaaagaaaaacagctcgagacctcatgcaaagagaaaactgagtatctacagaaaatggttcagaggaatgaaagatataaacaagatgtggagaggttctatgaacggaagcgacatttagatttaattgagatgcttgaagcaaaaaggccatgggtggaatatgaaaatgttcgtcaggaatatgaagaagtaaaactagttcgtgaccgagtgaaggaagaggtcagaaaacttaaagaagggcagattcctataacatgtcgaattgaagaaatggaaaacgagcgtcacaatttggaggctcgaatcaaagaaaaggcaacagatattaaggaggcatctcaaaaatgcaaacagaagcaagatgttatagaaaggaaagataaacatattgaggaacttcagcaggctttaatagtaaagcaaaatgaagagcttgaccgacagaggagaataggtaatacccgcaaaatgatagaggatttgcaaaatgaactaaagaccacggaaaactgcgagaatcttcagccccagattgatgccattacaaatgatctgagacggattcaggatgaaaaggcattatgtgaaggcgaaataattgataagcgaagagagagggaaactctagagaaggagaaaaagagtgtggacgatcatattgtacgttttgacaatcttatgaatcagaaggaagataagctaagacagagattccgtgacacgtatgatgctgttttatggctaagaaataacagagacaaatttaaacaaagagtctgtgagcccataatgctcacgatcaatatgaaagataataaaaatgccaaatatattgaaaatcatattccatcaaatgacttaagagcctttgtatttgaaagtcaagaagatatggaggttttcctcaaagaggttcgtgacaataaaaaattaagagtaaatgctgttattgctcccaagagttcatatgcagacaaagcaccttcaagatctttgaatgaacttaaacaatacggatttttctcttatttgagagaattatttgatgcacctgatcctgtaatgagttacctttgctgtcagtatcatattcatgaagttcctgtaggaactgaaaagaccagagaaagaattgaacgggtaatacaagaaacccgattaaaacagatttatacagcagaagaaaagtatgtggtgaaaacttctttttattcaaacaaagttatttctagtaacacatctctaaaagtagcgcagtttctcactgtcactgtggacctagagcagagaagacacttagaagaacagctaaaggaaattcatagaaaattgcaagcagtggattcagggttgattgccttacgtgaaacaagcaaacatctggagcacaaagacaatgaacttagacaaaagaagaaggagcttcttgagagaaaaaccaagaaaagacaactggaacaaaaaatcagttccaaactaggaagtttaaagctgatggaacaggatacttgcaatcttgaagaggaagagcgaaaagcaagtaccaaaatcaaagaaataaatgttcaaaaagcgaaacttgttaccgaattaacaaacctaataaagatttgtacttctttgcatatacaaaaagtagatttaattctccaaaatactacagtgatctctgagaagaacaaattagaatcagattatatggccgcatcttcacaactccgtcttacagagcaacatttcattgaattggatgaaaatagacagagattattgcagaaatgcaaggaacttatgaaaagagctaggcaagtatgtaacctgggtgcagagcagactcttcctcaagaataccagacacaagtacccaccattccaaatggacacaactcctcactccccatggttttccaagaccttccaaacacattggatgaaattgatgctttattaactgaagaaagatcaagagcttcctgcttcacgggactgaatcctacaattgttcaggaatatacaaaaagagaagaagaaatagaacagttaactgaggaactaaagggaaagaaagttgaactagatcaatacagggaaaacatttcacaggtaaaagaaaggtggcttaatcctttaaaagagctggtagaaaaaattaatgaaaaattcagcaatttttttagttccatgcagtgtgctggtgaagttgatctccatacagaaaatgaggaagattatgataaatatggaattcgaattagagtcaaatttcgaagtagtactcaactgcatgaattaactcctcatcatcaaagtggaggtgaaagaagtgtttctaccatgttatacttgatggcacttcaggagctaaatagatgtccattcagagtagttgatgaaatcaatcagggaatggacccaatcaatgaacggagagtgtttgaaatggttgtaaatactgcctgtaaagaaaatacatctcaatactttttcataacaccaaagctcctgcaaaatcttccttattctgaaaagatgacagttttgtttgtctacaatggccctcatatgctggaaccaaacacatggaatttaaaggctttccaaaggcggcggcgccgtattacattcactcaaccttcttaataaaagtaaagagagggaacttgggaattttttttgttaaattctgtttataagtatggctcaactgaataaaaggagattcact

SEQ ID NO: 374280 - DNA, 6388 bp, Homo sapiens
gcggcagttcgcgcgggagcggggcgcctgggtggatgggcgcttgggcgcctgggctgccggacggtgggaacggaagtcgctgtgggacgctgaggaagccaggatggcgactccgagcaagaagacgtcaactccaagcccccagccttccaagagagctctcccgagagacccttcgtcggaggtcccgagcaagaggaagaattcggccccgcagctgccgctgttgcagtcgtccgggcctttcgtggaaggctctatcgtccgcatctcgatggagaacttcctaacatatgatatttgtgaagtatctcctggaccccacttgaatatgatcgttggagccaatggaacagggaagtcgagcattgtgtgtgccatttgccttggtttagctggaaaacctgctttcatgggacgagcagataaggttgggttttttgtgaagagaggatgttctagaggcatggttgaaattgaattgttcagggcttctggaaatcttgtaatcacccgtgagattgatgtggcaaaaaatcagtccttttggttcatcaacaaaaaatctacaacccagaaaatagtggaagagaaagttgcagccttaaatattcaagtggggaatctttgccagtttctccctcaggacaaagttggagaatttgctaaactcagcaaaattgaactcctcgaagccactgaaaagtcaattggtcccccagaaatgcacaaatatcactgtgaactcaaaaacttaagggagaaagaaaaacagctcgagacctcatgcaaagagaaaactgagtatctacagaaaatggttcagaggaatgaaagatataaacaagatgtggagaggttctatgaacggaagcgacatttagatttaattgagatgcttgaagcaaaaaggccatgggtggaatatgaaaatgttcgtcaggaatatgaagaagtaaaactagttcgtgaccgagtgaaggaagaggtcagaaaacttaaagaagggcagattcctataacatgtcgaattgaagaaatggaaaacgagcgtcacaatttggaggctcgaatcaaagaaaaggcaacagatattaaggaggcatctcaaaaatgcaaacagaagcaagatgttatagaaaggaaagataaacatattgaggaacttcagcaggctttaatagtaaagcaaaatgaagagcttgaccgacagaggagaataggtaatacccgcaaaatgatagaggatttgcaaaatgaactaaagaccacggaaaactgcgagaatcttcagccccagattgatgccattacaaatgatctgagacggattcaggatgaaaaggcattatgtgaaggcgaaataattgataagcgaagagagagggaaactctagagaaggagaaaaagagtgtggacgatcatattgtacgttttgacaatcttatgaatcagaaggaagataagctaagacagagattccgtgacacgtatgatgctgttttatggctaagaaataacagagacaaatttaaacaaagagtctgtgagcccataatgctcacgatcaatatgaaagataataaaaatgccaaatatattgaaaatcatattccatcaaatgacttaagagcctttgtatttgaaagtcaagaagatatggaggttttcctcaaagaggttcgtgacaataaaaaattaagagtaaatgctgttattgctcccaagagttcatatgcagacaaagcaccttcaagatctttgaatgaacttaaacaatacggatttttctcttatttgagagaattatttgatgcacctgatcctgtaatgagttacctttgctgtcagtatcatattcatgaagttcctgtaggaactgaaaagaccagagaaagaattgaacgggtaatacaagaaacccgattaaaacagatttatacagcagaagaaaagtatgtggtgaaaacttctttttattcaaacaaagttatttctagtaacacatctctaaaagtagcgcagtttctcactgtcactgtggacctagagcagagaagacacttagaagaacagctaaaggaaattcatagaaaattgcaagcagtggattcagggttgattgccttacgtgaaacaagcaaacatctggagcacaaagacaatgaacttagacaaaagaagaaggagcttcttgagagaaaaaccaagaaaagacaactggaacaaaaaatcagttccaaactaggaagtttaaagctgatggaacaggatacttgcaatcttgaagaggaagagcgaaaagcaagtaccaaaatcaaagaaataaatgttcaaaaagcgaaacttgttaccgaattaacaaacctaataaagatttgtacttctttgcatatacaaaaagtagatttaattctccaaaatactacagtgatctctgagaagaacaaattagaatcagattatatggccgcatcttcacaactccgtcttacagagcaacatttcattgaattggatgaaaatagacagagattattgcagaaatgcaaggaacttatgaaaagagctaggcaagtatgtaacctgggtgcagagcagactcttcctcaagaataccagacacaagtacccaccattccaaatggacacaactcctcactccccatggtatgcagtactcattcttttttcccaagctcctgttttccctctgccttgctcctccctagccatttgctttaaggcccggagatgaattctaggcctttgaattctcttaactctcctgtagcatgaactgatacttcttttctctaaattcctagcctatatgatatgtactgcttgttttaatactcaacatcaatacattgccttaaagtgttatccagtacatacattttgttttctttaaagtacaagcttttgaaggcaaatgaccctgtttattattcctttgtattcttgtgtgccagcatgctgttgaacagatagataacttattcagcagattatttttcttttaactatttgaatggaactgttttcattgtatctataatgacgggcaatttttttcttaggttttccaagaccttccaaacacattggatgaaattgatgctttattaactgaagaaagatcaagagcttcctgcttcacgggactgaatcctacaattgttcaggaatatacaaaaagagaagaagaaatagaacagttaactgaggaactaaagggaaagaaagttgaactagatcaatacagggaaaacatttcacaggtaaaagaaaggtggcttaatcctttaaaagagctggtagaaaaaattaatgaaaaattcagcaatttttttagttccatgcagtgtgctggtgaagttgatctccatacagaaaatgaggaagattatgataaatatggaattcgaattagagtcaaatttcgaagtagtactcaactgcatgaattaactcctcatcatcaaagtggaggtgaaagaagtgtttctaccatgttatacttgatggcacttcaggagctaaatagatgtccattcagagtagttgatgaaatcaatcagggaatggacccaatcaatgaacggagagtgtttgaaatggttgtaaatactgcctgtaaagaaaatacatctcaatactttttcataacaccaaagctcctgcaaaatcttccttattctgaaaagatgacagttttgtttgtctacaatggccctcatatgctggaaccaaacacatggaatttaaaggctttccaaaggcggcggcgccgtattacattcactcaaccttcttaataaaagtaaagagagggaacttgggaattttttttgttaaattctgtttataagtatggctcaactgaataaaaggagattcactaaaacgaaaagcagttatttttggaaacctgcttttaaatacaaataggttgataatggaaactataatgacctttccaaaatagcagctggtagtaaaagttaagtcttcttcagtcttggttgaacttgagttcttggcactctgaccatgagtcattcagttctcatgttaaaatgtacttaatattacaaatcaaaggtacagtggaagaagggttaatcacaagaagttacttatatggtagccctgagctttaattgcagagtaactttaattacttttagagcctaaagatgactctagagcctaagtcctagtttctcccaatgttatatttaattttaaaaaattgatatgaaaatgtctaatgtatagtaataatttatgacagatctagtcatttcttcctattaaaaaagattaccttatctccagtaggaaatggaattttatgggcctttaaaagaaagttttatgaaacttgatgctataattttattggtatttcaaggggaaaaaagcactggggttcaaaaatggtagcagaactgctttgaaatgctgcaaggtggccactagatgatgcaaaatacaaccaaaagattgactgagaataaaattaggtgacaagggtttttaaagaataaccttttaaagtgtgggggcaggggttgcttttttttattttatttaaagtcaattatattttacatcttacatttctaaaagcattttataattatttttagtaagatttttcttaaaatttcatatactggtttctacaatttatatttgaaatttctcagtgttatgtaaagagtgatggaaaagcattgatttctttaaaaccgtaatgtttttagaacttaagcctatagggcctttcttacaatgttgatgtacccattatcttagaaaatctagtttaaactgttttctttcaccgcaaaagaattaaatgggaaaatcatttgtttatctctaagttatactaattagtagaaccaaacaaattatcttcttttaaaaaataaatcttataggaaaatagacagtccaaagtcatgtctttgaacagtggattggatctgtgccagtaatgacaaaattatttttttgacttgcttgcctgaataaattgaagaattgctttcagtttgggttttgtatattcttaagtagccattgaaatttatattcttaactaggtcaaaaaataatgagccataagtttatgtcctctcacttagacattttctctttaaaaaggtattttcttctttataaacattttaaaagagccttcccttcttaaactaactccagtgcatgaagtgtgaaaatattttaaaatgacatttttactaatatgagcaagtcatgtaaacattgaagaacttggtaacatattagtaaatggatattaccaaatgttttcatcgttaattactttgcgttccaccaaaatatctttactaaaatgtgcttggtgtagtttgtttattgtctaaattagtaccagtcatcttatttctgcaaaatgagtatcaatgtgaaaaagacacgtgaagattaagcatgtttgaaaataaaatggtcaattacatttcaatttacataggccaacaactgttccatactttgtttgtaaacatttaatttctctactggacaaaattaatatttggctttacattgaattttgagctgtgaagaataaattatgtatcattttagcatattaaacagtagtaagtctagcacatagtctcagccacttaaaacaaaagtttttttgtttgtttgtttgtttgtttttttgagatggagtctcactctgttgcccaggctggagtgcagtggcgtgatctcggcttactgcaacctccgcctcccgggttcaagcgattctcctgcctcagcctcccaagtaactgggacaacaggcgcgtcccaccacacccagctaattttttatacttttagtagagatggggtttcagcatattggccaggctggtctcgaactcctgaccttgtgatccacccgcctcggcctcccaaagtgctgggattataggcgtgagcccctgcacccggccaaaagttgatttttaattacataaaaatcgtaaaaacttctagtaaaaacttgatttggtgaatacagttatattttaaaaccttaaggtgacaagcattttctatgcctaaatcttcattggtttgcctggaaagagtctctgttaaaagattttccatattcaaagtaaaaggaaagatttcttgctttctaattgtcttttggacacatgcctattttctttgaggtataaacctttagatgtgaaaaatgtaatttcattctgctattgtgtgtgcttgtgtgtgtgtaattgaaaaaactgggaaatcctgctttgttggtaataaatcaatatttttatattcttttggtgtatgttattt

SEQ ID NO: 374281 - DNA, 4126 bp, Homo sapiens
aacatggtgtagtggaaagaacatggactttggtaccaaacacatcttaacacttaatatctgtgattttaggcaatttacttcacttacctgagccttagtttcttcatctttaaaattgagaacatactattaacttttaggattattgtgttgtgttttttgtttgttcgtttctggtttttagctattaactctccccactttagctccttaagggaagtgactgttttataaacaatattaatagcaacagaaacaacttatattgattgatcggttatgggccaggcactatatatctgaaaagtattgctaaatatatcccagaaaactgggggggacctaagaatttgggatcaattcttatgtttaacactgatttcttcattattatatgtgtcatacagtttaaagctgatggaacaggatacttgcaatcttgaagaggaagagcgaaaagcaagtaccaaaatcaaagaaataaatgttcaaaaagcgaaacttgttaccgaattaacaaacctaataaagatttgtacttctttgcatatacaaaaagtagatttaattctccaaaatactacagtgatctctgagaagaacaaattagaatcagattatatggccgcatcttcacaactccgtcttacagagcaacatttcattgaattggatgaaaatagacagagattattgcagaaatgcaaggaacttatgaaaagagctaggcaagtatgtaacctgggtgcagagcagactcttcctcaagaataccagacacaagtacccaccattccaaatggacacaactcctcactccccatggttttccaagaccttccaaacacattggatgaaattgatgctttattaactgaagaaagatcaagagcttcctgcttcacgggactgaatcctacaattgttcaggaatatacaaaaagagaagaagaaatagaacagttaactgaggaactaaagggaaagaaagttgaactagatcaatacagggaaaacatttcacaggtaaaagaaaggtggcttaatcctttaaaagagctggtagaaaaaattaatgaaaaattcagcaatttttttagttccatgcagtgtgctggtgaagttgatctccatacagaaaatgaggaagattatgataaatatggaattcgaattagagtcaaatttcgaagtagtactcaactgcatgaattaactcctcatcatcaaagtggaggtgaaagaagtgtttctaccatgttatacttgatggcacttcaggagctaaatagatgtccattcagagtagttgatgaaatcaatcagggaatggacccaatcaatgaacggagagtgtttgaaatggttgtaaatactgcctgtaaagaaaatacatctcaatactttttcataacaccaaagctcctgcaaaatcttccttattctgaaaagatgacagttttgtttgtctacaatggccctcatatgctggaaccaaacacatggaatttaaaggctttccaaaggcggcggcgccgtattacattcactcaaccttcttaataaaagtaaagagagggaacttgggaattttttttgttaaattctgtttataagtatggctcaactgaataaaaggagattcactaaaacgaaaagcagttatttttggaaacctgcttttaaatacaaataggttgataatggaaactataatgacctttccaaaatagcagctggtagtaaaagttaagtcttcttcagtcttggttgaacttgagttcttggcactctgaccatgagtcattcagttctcatgttaaaatgtacttaatattacaaatcaaaggtacagtggaagaagggttaatcacaagaagttacttatatggtagccctgagctttaattgcagagtaactttaattacttttagagcctaaagatgactctagagcctaagtcctagtttctcccaatgttatatttaattttaaaaaattgatatgaaaatgtctaatgtatagtaataatttatgacagatctagtcatttcttcctattaaaaaagattaccttatctccagtaggaaatggaattttatgggcctttaaaagaaagttttatgaaacttgatgctataattttattggtatttcaaggggaaaaaagcactggggttcaaaaatggtagcagaactgctttgaaatgctgcaaggtggccactagatgatgcaaaatacaaccaaaagattgactgagaataaaattaggtgacaagggtttttaaagaataaccttttaaagtgtgggggcaggggttgcttttttttattttatttaaagtcaattatattttacatcttacatttctaaaagcattttataattatttttagtaagatttttcttaaaatttcatatactggtttctacaatttatatttgaaatttctcagtgttatgtaaagagtgatggaaaagcattgatttctttaaaaccgtaatgtttttagaacttaagcctatagggcctttcttacaatgttgatgtacccattatcttagaaaatctagtttaaactgttttctttcaccgcaaaagaattaaatgggaaaatcatttgtttatctctaagttatactaattagtagaaccaaacaaattatcttcttttaaaaaataaatcttataggaaaatagacagtccaaagtcatgtctttgaacagtggattggatctgtgccagtaatgacaaaattatttttttgacttgcttgcctgaataaattgaagaattgctttcagtttgggttttgtatattcttaagtagccattgaaatttatattcttaactaggtcaaaaaataatgagccataagtttatgtcctctcacttagacattttctctttaaaaaggtattttcttctttataaacattttaaaagagccttcccttcttaaactaactccagtgcatgaagtgtgaaaatattttaaaatgacatttttactaatatgagcaagtcatgtaaacattgaagaacttggtaacatattagtaaatggatattaccaaatgttttcatcgttaattactttgcgttccaccaaaatatctttactaaaatgtgcttggtgtagtttgtttattgtctaaattagtaccagtcatcttatttctgcaaaatgagtatcaatgtgaaaaagacacgtgaagattaagcatgtttgaaaataaaatggtcaattacatttcaatttacataggccaacaactgttccatactttgtttgtaaacatttaatttctctactggacaaaattaatatttggctttacattgaattttgagctgtgaagaataaattatgtatcattttagcatattaaacagtagtaagtctagcacatagtctcagccacttaaaacaaaagtttttttgtttgtttgtttgtttgtttttttgagatggagtctcactctgttgcccaggctggagtgcagtggcgtgatctcggcttactgcaacctccgcctcccgggttcaagcgattctcctgcctcagcctcccaagtaactgggacaacaggcgcgtcccaccacacccagctaattttttatacttttagtagagatggggtttcagcatattggccaggctggtctcgaactcctgaccttgtgatccacccgcctcggcctcccaaagtgctgggattataggcgtgagcccctgcacccggccaaaagttgatttttaattacataaaaatcgtaaaaacttctagtaaaaacttgatttggtgaatacagttatattttaaaaccttaaggtgacaagcattttctatgcctaaatcttcattggtttgcctggaaagagtctctgttaaaagattttccatattcaaagtaaaaggaaagatttcttgctttctaattgtcttttggacacatgcctattttctttgaggtataaacctttagatgtgaaaaatgtaatttcattctgctattgtgtgtgcttgtgtgtgtgtaattgaaaaaactgggaaatcctgctttgttggtaataaatcaatatttttatattcttttggtgtatgttattt

SEQ ID NO: 374282 - DNA, 5314 bp, Homo sapiens
gcggcagttcgcgcgggagcggggcgcctgggtggatgggcgcttgggcgcctgggctgccggacggtgggaacggaagtcgctgtgggacgctgaggaagccaggatggcgactccgagcaagaagacgtcaactccaagcccccagccttccaagagagctctcccgagagacccttcgtcggaggtcccgagcaagaggaagaattcggccccgcagctgccgctgttgcagtcgtccgggcctttcgtggaaggctctatcgtccgcatctcgatggagaacttcctaacatatgatatttgtgaagtatctcctggaccccacttgaatatgatcgttggagccaatggaacagggaagtcgagcattgtgtgtgccatttgccttggtttagctggaaaacctgctttcatgggacgagcagataaggttgggttttttgtgaagagaggatgttctagaggcatggttgaaattgaattgttcagggcttctggaaatcttgtaatcacccgtgagattgatgtggcaaaaaatcagtccttttggttcatcaacaaaaaatctacaacccagaaaatagtggaagagaaagttgcagccttaaatattcaagtggggaatctttgccagtttctccctcaggacaaagttggagaatttgctaaactcagcaaaattgaactcctcgaagccactgaaaagtcaattggtcccccagaaatgcacaaatatcactgtgaactcaaaaacttaagggagaaagaaaaacagctcgagacctcatgcaaagagaaaactgagtatctacagaaaatggttcagaggaatgaaagatataaacaagatgtggagaggttctatgaacggaagcgacatttagatttaattgagatgcttgaagcaaaaaggccatgggtggaatatgaaaatgttcgtcaggaatatgaagaagtaaaactagttcgtgaccgagtgaaggaagaggtcagaaaacttaaagaagggcagattcctataacatgtcgaattgaagaaatggaaaacgagcgtcacaatttggaggctcgaatcaaagaaaaggcaacagatattaaggaggcatctcaaaaatgcaaacagaagcaagatgttatagaaaggaaagataaacatattgaggaacttcagcaggctttaatagtaaagcaaaatgaagagcttgaccgacagaggagaataggtaatacccgcaaaatgatagaggatttgcaaaatgaactaaagaccacggaaaactgcgagaatcttcagccccagattgatgccattacaaatgatctgagacggattcaggatgaaaaggcattatgtgaaggcgaaataattgataagcgaagagagagggaaactctagagaaggagaaaaagagtgtggacgatcatattgtacgttttgacaatcttatgaatcagaaggaagataagctaagacagagattccgtgacacgtatgatgctgttttatggctaagaaataacagagacaaatttaaacaaagagtctgtgagcccataatgctcacgatcaatatgaaagataataaaaatgccaaatatattgaaaatcatattccatcaaatgacttaagagcctttgtatttgaaagtcaagaagatatggaggttttcctcaaagaggttcgtgacaataaaaaattaagagtaaatgctgttattgctcccaagagttcatatgcagacaaagcaccttcaagatctttgaatgaacttaaacaatacggatttttctcttatttgagagaattatttgatgcacctgatcctgtaatgagttacctttgctgtcagtatcatattcatgaagttcctgtaggaactgaaaagaccagagaaagaattgaacgggtaatacaagaaacccgattaaaacagatttatacagcagaagaaaagtatgtggtgaaaacttctttttattcaaacaaagttatttctagtaacacatctctaaaagtagcgcagtttctcactgtcactgtggacctagagcagagaagacacttagaagaacagctaaaggaaattcatagaaaattgcaagcagtggattcagggttgattgccttacgtgaaacaagcaaacatctggagcacaaagacaatgaacttagacaaaagaagaaggagcttcttgagagaaaaaccaagaaaagacaactggaacaaaaaatcagttccaaactaggaagtttaaagctgatggaacaggatacttgcaatcttgaagaggaagagcgaaaagcaagtaccaaaatcaaagaaataaatgttcaaaaagcgaaacttgttaccgaattaacaaacctaataaagatttgtacttctttgcatatacaaaaagtagatttaattctccaaaatactacagtgatctctgagaagaacaaattagaatcagattatatggccgcatcttcacaactccgtcttacagagcaacatttcattgaattggatgaaaatagacagagattattgcagaaatgcaaggaacttatgaaaagagctaggcaagtatgtaacctgggtgcagagcagactcttcctcaagaataccagacacaagtacccaccattccaaatggacacaactcctcactccccatggttttccaagaccttccaaacacattggatgaaattgatgctttattaactgaagaaagatcaagagcttcctgcttcacgggactgaatcctacaattgttcaggaatatacaaaaagagaagaagaaatagaacagttaactgaggaactaaagggaaagaaagttgaactagatcaatacagggaaaacatttcacaggtaaaagaaaggtggcttaatcctttaaaagagctggtagaaaaaattaatgaaaaattcagcaatttttttagttccatgcagtgtgctggtgaagttgatctccatacagaaaatgaggaagattatgataaatatggaattcgaattagagtcaaatttcgaagtagtactcaactgcatgaattaactcctcatcatcaaagtggaggtgaaagaagtgtttctaccatgttatacttgatggcacttcaggagctaaatagatgtccattcagagtagttgatgaaatcaatcagggaatggacccaatcaatgaacggagagtgtttgaaatggttgtaaatactgcctgtaaagaaaatacatctcaatactttttcataacaccaaagctcctgcaaaatcttccttattctgaaaagatgacagttttgtttgtctacaatggccctcatatgctggaaccaaacacatggaatttaaaggctttccaaaggcggcggcgccgtattacattcactcaaccttcttaataaaagtaaagagagggaacttgggaattttttttgttaaattctgtttataagtatggctcaactgaataaaaggagattcactaaaacgaaaagcagttatttttggaaacctgcttttaaatacaaataggttgataatggaaactataatgacctttccaaaatagcagctggtagtaaaagttaagtcttcttcagtcttggttgaacttgagttcttggcactctgaccatgagtcattcagttctcatgttaaaatgtacttaatattacaaatcaaaggtacagtggaagaagggttaatcacaagaagttacttatatggtagccctgagctttaattgcagagtaactttaattacttttagagcctaaagatgactctagagcctaagtcctagtttctcccaatgttatatttaattttaaaaaattgatatgaaaatgtctaatgtatagtaataatttatgacagatctagtcatttcttcctattaaaaaagattaccttatctccagtaggaaatggaattttatgggcctttaaaagaaagttttatgaaacttgatgctataattttattggtatttcaaggggaaaaaagcactggggttcaaaaatggtagcagaactgctttgaaatgctgcaaggtggccactagatgatgcaaaatacaaccaaaagattgactgagaataaaattaggtgacaagggtttttaaagaataaccttttaaagtgtgggggcaggggttgcttttttttattttatttaaagtcaattatattttacatcttacatttctaaaagcattttataattatttttagtaagatttttcttaaaatttcatatactggtttctacaatttatatttgaaatttctcagtgttatgtaaagagtgatggaaaagcattgatttctttaaaaccgtaatgtttttagaacttaagcctatagggcctttcttacaatgttgatgtacccattatcttagaaaatctagtttaaactgttttctttcaccgcaaaagaattaaatgggaaaatcatttgtttatctctaagttatactaattagtagaaccaaacaaattatcttcttttaaaaaataaatcttataggaaaatagacagtccaaagtcatgtctttgaacagtggattggatctgtgccagtaatgacaaaattatttttttgacttgcttgcctgaataaattgaagaattgctttcagtttgggttttgtatattcttaagtagccattgaaatttatattcttaactaggtcaaaaaataatgagccataagtttatgtcctctcacttagacattttctctttaaaaaggtattttcttctttataaacattttaaaagagccttcccttcttaaactaactccagtgcatgaagtgtgaaaatattttaaaatgacatttttactaatatgagcaagtcatgtaaacattgaagaacttggtaacatattagtaaatggatattaccaaatgttttcatcgttaattactttgcgttccaccaaaatatctttactaaaatgtgcttggtgtagtttgtttattgtctaaattagtaccagtcatcttatttctgcaaaatgagtatcaatgtgaaaaagacacgtgaagattaagcatgtttgaaaataaaatggtcaattacatttcaatttacataggccaacaactgttccatactttgtttgtaaacatttaatttctctactggacaaaattaatatttggctttacattgaattttgagctgtgaagaataaattatgtatcattttagcatattaaacagtagtaagtctagcacatagtctcagcctgggcaacaagagtggaactctgtttaaaaaaaaa

SEQ ID NO: 374283 - DNA, 3849 bp, Homo sapiens
gcggcagttcgcgcgggagcggggcgcctgggtggatgggcgcttgggcgcctgggctgccggacggtgggaacggaagtcgctgtgggacgctgaggaagccaggatggcgactccgagcaagaagacgtcaactccaagcccccagccttccaagagagctctcccgagagacccttcgtcggaggtcccgagcaagaggaagaattcggccccgcagctgccgctgttgcagtcgtccgggcctttcgtggaaggctctatcgtccgcatctcgatggagaacttcctaacatatgatatttgtgaagtatctcctggaccccacttgaatatgatcgttggagccaatggaacagggaagtcgagcattgtgtgtgccatttgccttggtttagctggaaaacctgctttcatgggacgagcagataaggttgggttttttgtgaagagaggatgttctagaggcatggttgaaattgaattgttcagggcttctggaaatcttgtaatcacccgtgagattgatgtggcaaaaaatcagtccttttggttcatcaacaaaaaatctacaacccagaaaatagtggaagagaaagttgcagccttaaatattcaagtggggaatctttgccagtttctccctcaggacaaagttggagaatttgctaaactcagcaaaattgaactcctcgaagccactgaaaagtcaattggtcccccagaaatgcacaaatatcactgtgaactcaaaaacttaagggagaaagaaaaacagctcgagacctcatgcaaagagaaaactgagtatctacagaaaatggttcagaggaatgaaagatataaacaagatgtggagaggttctatgaacggaagcgacatttagatttaattgagatgcttgaagcaaaaaggccatgggtggaatatgaaaatgttcgtcaggaatatgaagaagtaaaactagttcgtgaccgagtgaaggaagaggtcagaaaacttaaagaagggcagattcctataacatgtcgaattgaagaaatggaaaacgagcgtcacaatttggaggctcgaatcaaagaaaaggcaacagatattaaggaggcatctcaaaaatgcaaacagaagcaagatgttatagaaaggaaagataaacatattgaggaacttcagcaggctttaatagtaaagcaaaatgaagagcttgaccgacagaggagaataggtaatacccgcaaaatgatagaggatttgcaaaatgaactaaagaccacggaaaactgcgagaatcttcagccccagattgatgccattacaaatgatctgagacggattcaggatgaaaaggcattatgtgaaggcgaaataattgataagcgaagagagagggaaactctagagaaggagaaaaagagtgtggacgatcatattgtacgttttgacaatcttatgaatcagaaggaagataagctaagacagagattccgtgacacgtatgatgctgttttatggctaagaaataacagagacaaatttaaacaaagagtctgtgagcccataatgctcacgatcaatatgaaagataataaaaatgccaaatatattgaaaatcatattccatcaaatgacttaagagcctttgtatttgaaagtcaagaagatatggaggttttcctcaaagaggttcgtgacaataaaaaattaagagtaaatgctgttattgctcccaagagttcatatgcagacaaagcaccttcaagatctttgaatgaacttaaacaatacggatttttctcttatttgagagaattatttgatgcacctgatcctgtaatgagttacctttgctgtcagtatcatattcatgaagttcctgtaggaactgaaaagaccagagaaagaattgaacgggtaatacaagaaacccgattaaaacagatttatacagcagaagaaaagtatgtggtgaaaacttctttttattcaaacaaagttatttctagtaacacatctctaaaagtagcgcagtttctcactgtcactgtggacctagagcagagaagacacttagaagaacagctaaaggaaattcatagaaaattgcaagcagtggattcagggttgattgccttacgtgaaacaagcaaacatctggagcacaaagacaatgaacttagacaaaagaagaaggagcttcttgagagaaaaaccaagaaaagacaactggaacaaaaaatcagttccaaactaggaagtttaaagctgatggaacaggatacttgcaatcttgaagaggaagagcgaaaagcaagtaccaaaatcaaagaaataaatgttcaaaaagcgaaacttgttaccgaattaacaaacctaataaagatttgtacttctttgcatatacaaaaagtagatttaattctccaaaatactacagtgatctctgagaagaacaaattagaatcagattatatggccgcatcttcacaactccgtcttacagagcaacatttcattgaattggatgaaaatagacagagattattgcagaaatgcaaggaacttatgaaaagagctaggcaagtatgtaacctgggtgcagagcagactcttcctcaagaataccagacacaagtacccaccattccaaatggacacaactcctcactccccatggtatgcagtactcattcttttttcccaagctcctgttttccctctgccttgctcctccctagccatttgctttaaggcccggagatgaattctaggcctttgaattctcttaactctcctgtagcatgaactgatacttcttttctctaaattcctagcctatatgatatgtactgcttgttttaatactcaacatcaatacattgccttaaagtgttatccagtacatacattttgttttctttaaagtacaagcttttgaaggcaaatgaccctgtttattattcctttgtattcttgtgtgccagcatgctgttgaacagatagataacttattcagcagattatttttcttttaactatttgaatggaactgttttcattgtatctataatgacgggcaatttttttcttaggttttccaagaccttccaaacacattggatgaaattgatgctttattaactgaagaaagatcaagagcttcctgcttcacgggactgaatcctacaattgttcaggaatatacaaaaagagaagaagaaatagaacagttaactgaggaactaaagggaaagaaagttgaactagatcaatacagggaaaacatttcacaggtaaaagaaaggtggcttaatcctttaaaagagctggtagaaaaaattaatgaaaaattcagcaatttttttagttccatgcagtgtgctggtgaagttgatctccatacagaaaatgagacaggcaaaggccaggtgctgtggcttatgcctaatcccacttttataggcgtgagcccctgcacccggccaaaagttgatttttaattacataaaaatcgtaaaaacttctagtaaaaacttgatttggtgaatacagttatattttaaaaccttaaggtgacaagcattttctatgcctaaatcttcattggtttgcctggaaagagtctctgttaaaagattttccatattcaaagtaaaaggaaagatttcttgctttctaattgtcttttggacacatgcctattttctttgaggtataaacctttagatgtgaaaaatgtaatttcattctgctattgtgtgtgcttgtgtgtgtgtaattgaaaaaactgggaaatcctgctttgttggtaataaatcaatatttttatattcttttggtgtatgttattt

SEQ ID NO: 374284 - DNA, 3224 bp, Homo sapiens
gtgctaggcagtttcctggctgaacacgccagcccaatacttaaagagagcaactcctgactccgatagagactggatggacccacaagggtgacagcccaggcggaccgatcttcccatcccacatcctccggcgcgatgccaaaaagaggctgacggcaactgggccttctgcagagaaagacctccgcttcactgccccggctggtcccaagggtcaggaagatggattcatacctgctgatgtggggactgctcacgttcatcatggtgcctggctgccaggcagagctctgtgacgatgacccgccagagatcccacacgccacattcaaagccatggcctacaaggaaggaaccatgttgaactgtgaatgcaagagaggtttccgcagaataaaaagcgggtcactctatatgctctgtacaggaaactctagccactcgtcctgggacaaccaatgtcaatgcacaagctctgccactcggaacacaacgaaacaagtgacacctcaacctgaagaacagaaagaaaggaaaaccacagaaatgcaaagtccaatgcagccagtggaccaagcgagccttccaggtcactgcagggaacctccaccatgggaaaatgaagccacagagagaatttatcatttcgtggtggggcagatggtttattatcagtgcgtccagggatacagggctctacacagaggtcctgctgagagcgtctgcaaaatgacccacgggaagacaaggtggacccagccccagctcatatgcacaggtgaaatggagaccagtcagtttccaggtgaagagaagcctcaggcaagccccgaaggccgtcctgagagtgagacttcctgcctcgtcacaacaacagattttcaaatacagacagaaatggctgcaaccatggagacgtccatatttacaacagagtaccaggtagcagtggccggctgtgttttcctgctgatcagcgtcctcctcctgagtgggctcacctggcagcggagacagaggaagagtagaagaacaatctagaaaaccaaaagaacaagaatttcttggtaagaagccgggaacagacaacagaagtcatgaagcccaagtgaaatcaaaggtgctaaatggtcgcccaggagacatccgttgtgcttgcctgcgttttggaagctctgaagtcacatcacaggacacggggcagtggcaaccttgtctctatgccagctcagtcccatcagagagcgagcgctacccacttctaaatagcaatttcgccgttgaagaggaagggcaaaaccactagaactctccatcttattttcatgtatatgtgttcattaaagcatgaatggtatggaactctctccaccctatatgtagtataaagaaaagtaggtttacattcatctcattccaacttcccagttcaggagtcccaaggaaagccccagcactaacgtaaatacacaacacacacactctaccctatacaactggacattgtctgcgtggttcctttctcagccgcttctgactgctgattctcccgttcacgttgcctaataaacatccttcaagaactctgggctgctacccagaaatcattttacccttggctcaatcctctaagctaacccccttctactgagccttcagtcttgaatttctaaaaaacagaggccatggcagaataatctttgggtaacttcaaaacggggcagccaaacccatgaggcaatgtcaggaacagaaggatgaatgaggtcccaggcagagaatcatacttagcaaagttttacctgtgcgttactaattggcctctttaagagttagtttctttgggattgctatgaatgataccctgaatttggcctgcactaatttgatgtttacaggtggacacacaaggtgcaaatcaatgcgtacgtttcctgagaagtgtctaaaaacaccaaaaagggatccgtacattcaatgtttatgcaaggaaggaaagaaagaaggaagtgaagagggagaagggatggaggtcacactggtagaacgtaaccacggaaaagagcgcatcaggcctggcacggtggctcaggcctataaccccagctccctaggagaccaaggcgggagcatctcttgaggccaggagtttgagaccagcctgggcagcatagcaagacacatccctacaaaaaattagaaattggctggatgtggtggcatacgcctgtagtcctagccactcaggaggctgaggcaggaggattgcttgagcccaggagttcgaggctgcagtcagtcatgatggcaccactgcactccagcctgggcaacagagcaagatcctgtctttaaggaaaaaaagacaagatgagcataccagcagtccttgaacattatcaaaaagttcagcatattagaatcaccgggaggccttgttaaaagagttcgctgggcccatcttcagagtctctgagttgttggtctggaatagagccaaatgttttgtgtgtctaacaattcccaggtgctgttgctgctgctactattccaggaacacactttgagaaccattgtgttattgctctgcacgcccacccactctcaactcccacgaaaaaaatcaacttccagagctaagatttcggtggaagtcctggttccatatctggtgcaagatctcccctcacgaatcagttgagtcaacattctagctcaacaacatcacacgattaacattaacgaaaattattcatttgggaaactatcagccagttttcacttctgaaggggcaggagagtgttatgagaaatcacggcagttttcagcagggtccagattcagattaaataactattttctgtcatttctgtgaccaaccacatacaaacagactcatctgtgcactctccccctcccccttcaggtatatgttttctgagtaaagttgaaaagaatctcagaccagaaaatatagatatatatttaaatcttacttgagtagaactgattacgacttttgggtgttgaggggtctataagatcaaaacttttccatgataatactaagatgttatcgaccatttatctgtccttctctcaaaagtgtatggtggaattttccagaagctatgtgatacgtgatgatgtcatcactctgctgttaacatataataaatttattgctattgtttataaaagaataaatgatattttttaa

SEQ ID NO: 374285 - DNA, 1138 bp, Homo sapiens
gtgctaggcagtttcctggctgaacacgccagcccaatacttaaagagagcaactcctgactccgatagagactggatggacccacaagggtgacagcccaggcggaccgatcttcccatcccacatcctccggcgcgatgccaaaaagaggctgacggcaactgggccttctgcaggaggattgcttgagcccaggagttcgaggctgcagtcagtcatgatggcaccactgcactccagcctgggcaacagagcaagatcctgtctttaaggaaaaaaagacaagatgagcataccagcagtccttgaacattatcaaaaagttcagcatattagaatcaccgggaggccttgttaaaagagttcgctgggcccatcttcagagtctctgagttgttggtctggaatagagccaaatgttttgtgtgtctaacaattcccaggtgctgttgctgctgctactattccaggaacacactttgagaaccattgtgttattgctctgcacgcccacccactctcaactcccacgaaaaaaatcaacttccagagctaagatttcggtggaagtcctggttccatatctggtgcaagatctcccctcacgaatcagttgagtcaacattctagctcaacaacatcacacgattaacattaacgaaaattattcatttgggaaactatcagccagttttcacttctgaaggggcaggagagtgttatgagaaatcacggcagttttcagcagggtccagattcagattaaataactattttctgtcatttctgtgaccaaccacatacaaacagactcatctgtgcactctccccctcccccttcaggtatatgttttctgagtaaagttgaaaagaatctcagaccagaaaatatagatatatatttaaatcttacttgagtagaactgattacgacttttgggtgttgaggggtctataagatcaaaacttttccatgataatactaagatgttatcgaccatttatctgtccttctctcaaaagtgtatggtggaattttccagaagctatgtgatacgtgatgatgtcatcactctgctgttaacatataataaatttattgctattgtttataaaagaataaatgatattttttaa

SEQ ID NO: 374286 - DNA, 3293 bp, Homo sapiens
gtgctaggcagtttcctggctgaacacgccagcccaatacttaaagagagcaactcctgactccgatagagactggatggacccacaagggtgacagcccaggcggaccgatcttcccatcccacatcctccggcgcgatgccaaaaagaggctgacggcaactgggccttctgcagagaaagacctccgcttcactgccccggctggtcccaagggtcaggaagatggattcatacctgctgatgtggggactgctcacgttcatcatggtgcctggctgccaggcagagctctgtgacgatgacccgccagagatcccacacgccacattcatcatggtgcctggctgccaggcagagctctgtgacgatgacccgccagagatcccacacgccacattcaaagccatggcctacaaggaaggaaccatgttgaactgtgaatgcaagagaggtttccgcagaataaaaagcgggtcactctatatgctctgtacaggaaactctagccactcgtcctgggacaaccaatgtcaatgcacaagctctgccactcggaacacaacgaaacaagtgacacctcaacctgaagaacagaaagaaaggaaaaccacagaaatgcaaagtccaatgcagccagtggaccaagcgagccttccaggtcactgcagggaacctccaccatgggaaaatgaagccacagagagaatttatcatttcgtggtggggcagatggtttattatcagtgcgtccagggatacagggctctacacagaggtcctgctgagagcgtctgcaaaatgacccacgggaagacaaggtggacccagccccagctcatatgcacaggtgaaatggagaccagtcagtttccaggtgaagagaagcctcaggcaagccccgaaggccgtcctgagagtgagacttcctgcctcgtcacaacaacagattttcaaatacagacagaaatggctgcaaccatggagacgtccatatttacaacagagtaccaggtagcagtggccggctgtgttttcctgctgatcagcgtcctcctcctgagtgggctcacctggcagcggagacagaggaagagtagaagaacaatctagaaaaccaaaagaacaagaatttcttggtaagaagccgggaacagacaacagaagtcatgaagcccaagtgaaatcaaaggtgctaaatggtcgcccaggagacatccgttgtgcttgcctgcgttttggaagctctgaagtcacatcacaggacacggggcagtggcaaccttgtctctatgccagctcagtcccatcagagagcgagcgctacccacttctaaatagcaatttcgccgttgaagaggaagggcaaaaccactagaactctccatcttattttcatgtatatgtgttcattaaagcatgaatggtatggaactctctccaccctatatgtagtataaagaaaagtaggtttacattcatctcattccaacttcccagttcaggagtcccaaggaaagccccagcactaacgtaaatacacaacacacacactctaccctatacaactggacattgtctgcgtggttcctttctcagccgcttctgactgctgattctcccgttcacgttgcctaataaacatccttcaagaactctgggctgctacccagaaatcattttacccttggctcaatcctctaagctaacccccttctactgagccttcagtcttgaatttctaaaaaacagaggccatggcagaataatctttgggtaacttcaaaacggggcagccaaacccatgaggcaatgtcaggaacagaaggatgaatgaggtcccaggcagagaatcatacttagcaaagttttacctgtgcgttactaattggcctctttaagagttagtttctttgggattgctatgaatgataccctgaatttggcctgcactaatttgatgtttacaggtggacacacaaggtgcaaatcaatgcgtacgtttcctgagaagtgtctaaaaacaccaaaaagggatccgtacattcaatgtttatgcaaggaaggaaagaaagaaggaagtgaagagggagaagggatggaggtcacactggtagaacgtaaccacggaaaagagcgcatcaggcctggcacggtggctcaggcctataaccccagctccctaggagaccaaggcgggagcatctcttgaggccaggagtttgagaccagcctgggcagcatagcaagacacatccctacaaaaaattagaaattggctggatgtggtggcatacgcctgtagtcctagccactcaggaggctgaggcaggaggattgcttgagcccaggagttcgaggctgcagtcagtcatgatggcaccactgcactccagcctgggcaacagagcaagatcctgtctttaaggaaaaaaagacaagatgagcataccagcagtccttgaacattatcaaaaagttcagcatattagaatcaccgggaggccttgttaaaagagttcgctgggcccatcttcagagtctctgagttgttggtctggaatagagccaaatgttttgtgtgtctaacaattcccaggtgctgttgctgctgctactattccaggaacacactttgagaaccattgtgttattgctctgcacgcccacccactctcaactcccacgaaaaaaatcaacttccagagctaagatttcggtggaagtcctggttccatatctggtgcaagatctcccctcacgaatcagttgagtcaacattctagctcaacaacatcacacgattaacattaacgaaaattattcatttgggaaactatcagccagttttcacttctgaaggggcaggagagtgttatgagaaatcacggcagttttcagcagggtccagattcagattaaataactattttctgtcatttctgtgaccaaccacatacaaacagactcatctgtgcactctccccctcccccttcaggtatatgttttctgagtaaagttgaaaagaatctcagaccagaaaatatagatatatatttaaatcttacttgagtagaactgattacgacttttgggtgttgaggggtctataagatcaaaacttttccatgataatactaagatgttatcgaccatttatctgtccttctctcaaaagtgtatggtggaattttccagaagctatgtgatacgtgatgatgtcatcactctgctgttaacatataataaatttattgctattgtttataaaagaataaatgatattttttaa

SEQ ID NO: 374287 - DNA, 1725 bp, Homo sapiens
  misc_feature (1402)..(1402): n is a, c, g, or t
  misc_feature (1408)..(1409): n is a, c, g, or t
  misc_feature (1487)..(1487): n is a, c, g, or t
gtgctaggcagtttcctggctgaacacgccagcccaatacttaaagagagcaactcctgactccgatagagactggatggacccacaagggtgacagcccaggcggaccgatcttcccatcccacatcctccggcgcgatgccaaaaagaggctgacggcaactgggccttctgcagagaaagacctccgcttcactgccccggctggtcccaagggtcaggaagatggattcatacctgctgatgtggggactgctcacgttcatcatggtgcctggctgccaggcagagctctgtgacgatgacccgccagagatcccacacgccacattcaaagccatggcctacaaggaaggaaccatgttgaactgtgaatgcaagagaggtttccgcagaataaaaagcgggtcactctatatgctctgtacaggaaactctagccactcgtcctgggacaaccaatgtcaatgcacaagctctgccactcggaacacaacgaaacaagtgacacctcaacctgaagaacagaaagaaaggaaaaccacagaaatgcaaagtccaatgcagccagtggaccaagcgagccttccaggtcactgcagggaacctccaccatgggaaaatgaagccacagagagaatttatcatttcgtggtggggcagatggtttattatcagtgcgtccagggatacagggctctacacagaggtcctgctgagagcgtctgcaaaatgacccacgggaagacaaggtggacccagccccagctcatatgcacaggtgaaatggagaccagtcagtttccaggtgaagagaagcctcaggcaagccccgaaggccgtcctgagagtgagacttcctgcctcgtcacaacaacagattttcaaatacagacagaaatggctgcaaccatggagacgtccatatttacaacagagtaccaggtagcagtggccggctgtgttttcctgctgatcagcgtcctcctcctgagtgggctcacctggcagcggagacagaggaagagtagaagaacaatctagaaaaccaaaagaacaagaatttcttggtaagaagccgggaacagacaacagaagtcatgaagcccaagtgaaatcaaaggtgctaaatggtcgcccaggagacatccgttgtgcttgcctgcgttttggaagctctgaagtcacatcacaggacacggggcagtggcaaccttgtctctatgccagctcagtcccatcagagagcgagcgctacccacttctaaatagcaatttcgccgttgaagaggaagggcaaaaccactagaactctccatcttattttcatgtatatgtgttcattaaagcatgaatggtaaaaaaaaaaaaaaaaaaaaaaaaaaaaaaaaaaaaaaaaaanaaaaannaaaaaaaaaaaccaactccaaaattaacctcaaacacaatcccataacaaaatattccttttacatttacactttccnttttattaaacccctttttataacaaaactttttgttaataccaatttattctcctatttaaaatctttatcttttctttacaaccacttttttaaccttaattcttcaatgacatattttttaccttaaatttaattaaattttttctttaaccatttattctctaaaccaatttctcaatcatatttataaacttttaatttcacctttttatcctccttttaatcttagtatcca

SEQ ID NO: 374288 - DNA, 3008 bp, Homo sapiens
gtgctaggcagtttcctggctgaacacgccagcccaatacttaaagagagcaactcctgactccgatagagactggatggacccacaagggtgacagcccaggcggaccgatcttcccatcccacatcctccggcgcgatgccaaaaagaggctgacggcaactgggccttctgcagagaaagacctccgcttcactgccccggctggtcccaagggtcaggaagatggattcatacctgctgatgtggggactgctcacgttcatcatggtgcctggctgccaggcagagctctgtgacgatgacccgccagagatcccacacgccacattcaaagccatggcctacaaggaaggaaccatgttgaactgtgaatgcaagagaggtttccgcagaataaaaagcgggtcactctatatgctctgtacaggaaactctagccactcgtcctgggacaaccaatgtcaatgcacaagctctgccactcggaacacaacgaaacaagtgacacctcaacctgaagaacagaaagaaaggaaaaccacagaaatgcaaagtccaatgcagccagtggaccaagcgagccttccaggtgaagagaagcctcaggcaagccccgaaggccgtcctgagagtgagacttcctgcctcgtcacaacaacagattttcaaatacagacagaaatggctgcaaccatggagacgtccatatttacaacagagtaccaggtagcagtggccggctgtgttttcctgctgatcagcgtcctcctcctgagtgggctcacctggcagcggagacagaggaagagtagaagaacaatctagaaaaccaaaagaacaagaatttcttggtaagaagccgggaacagacaacagaagtcatgaagcccaagtgaaatcaaaggtgctaaatggtcgcccaggagacatccgttgtgcttgcctgcgttttggaagctctgaagtcacatcacaggacacggggcagtggcaaccttgtctctatgccagctcagtcccatcagagagcgagcgctacccacttctaaatagcaatttcgccgttgaagaggaagggcaaaaccactagaactctccatcttattttcatgtatatgtgttcattaaagcatgaatggtatggaactctctccaccctatatgtagtataaagaaaagtaggtttacattcatctcattccaacttcccagttcaggagtcccaaggaaagccccagcactaacgtaaatacacaacacacacactctaccctatacaactggacattgtctgcgtggttcctttctcagccgcttctgactgctgattctcccgttcacgttgcctaataaacatccttcaagaactctgggctgctacccagaaatcattttacccttggctcaatcctctaagctaacccccttctactgagccttcagtcttgaatttctaaaaaacagaggccatggcagaataatctttgggtaacttcaaaacggggcagccaaacccatgaggcaatgtcaggaacagaaggatgaatgaggtcccaggcagagaatcatacttagcaaagttttacctgtgcgttactaattggcctctttaagagttagtttctttgggattgctatgaatgataccctgaatttggcctgcactaatttgatgtttacaggtggacacacaaggtgcaaatcaatgcgtacgtttcctgagaagtgtctaaaaacaccaaaaagggatccgtacattcaatgtttatgcaaggaaggaaagaaagaaggaagtgaagagggagaagggatggaggtcacactggtagaacgtaaccacggaaaagagcgcatcaggcctggcacggtggctcaggcctataaccccagctccctaggagaccaaggcgggagcatctcttgaggccaggagtttgagaccagcctgggcagcatagcaagacacatccctacaaaaaattagaaattggctggatgtggtggcatacgcctgtagtcctagccactcaggaggctgaggcaggaggattgcttgagcccaggagttcgaggctgcagtcagtcatgatggcaccactgcactccagcctgggcaacagagcaagatcctgtctttaaggaaaaaaagacaagatgagcataccagcagtccttgaacattatcaaaaagttcagcatattagaatcaccgggaggccttgttaaaagagttcgctgggcccatcttcagagtctctgagttgttggtctggaatagagccaaatgttttgtgtgtctaacaattcccaggtgctgttgctgctgctactattccaggaacacactttgagaaccattgtgttattgctctgcacgcccacccactctcaactcccacgaaaaaaatcaacttccagagctaagatttcggtggaagtcctggttccatatctggtgcaagatctcccctcacgaatcagttgagtcaacattctagctcaacaacatcacacgattaacattaacgaaaattattcatttgggaaactatcagccagttttcacttctgaaggggcaggagagtgttatgagaaatcacggcagttttcagcagggtccagattcagattaaataactattttctgtcatttctgtgaccaaccacatacaaacagactcatctgtgcactctccccctcccccttcaggtatatgttttctgagtaaagttgaaaagaatctcagaccagaaaatatagatatatatttaaatcttacttgagtagaactgattacgacttttgggtgttgaggggtctataagatcaaaacttttccatgataatactaagatgttatcgaccatttatctgtccttctctcaaaagtgtatggtggaattttccagaagctatgtgatacgtgatgatgtcatcactctgctgttaacatataataaatttattgctattgtttataaaagaataaatgatattttttaa

SEQ ID NO: 374289 - DNA, 3005 bp, Homo sapiens
gtgctaggcagtttcctggctgaacacgccagcccaatacttaaagagagcaactcctgactccgatagagactggatggacccacaagggtgacagcccaggcggaccgatcttcccatcccacatcctccggcgcgatgccaaaaagaggctgacggcaactgggccttctgcagagaaagacctccgcttcactgccccggctggtcccaagggtcaggaagatggattcatacctgctgatgtggggactgctcacgttcatcatggtgcctggctgccaggcagagctctgtgacgatgacccgccagagatcccacacgccacattcatcatggtgcctggctgccaggcagagctctgtgacgatgacccgccagagatcccacacgccacattcaaagccatggcctacaaggaaggaaccatgttgaactgtgaatgcaagagaggtttccgcagaataaaaagcgggtcactctatatgctctgtacaggaaactctagccactcgtcctgggacaaccaatgtcaatgcacaagctctgccactcggaacacaacgaaacaagtgacacctcaacctgaagaacagaaagaaaggaaaaccacagaaatgcaaagtccaatgcagccagtggaccaagcgagccttccagattttcaaatacagacagaaatggctgcaaccatggagacgtccatatttacaacagagtaccaggtagcagtggccggctgtgttttcctgctgatcagcgtcctcctcctgagtgggctcacctggcagcggagacagaggaagagtagaagaacaatctagaaaaccaaaagaacaagaatttcttggtaagaagccgggaacagacaacagaagtcatgaagcccaagtgaaatcaaaggtgctaaatggtcgcccaggagacatccgttgtgcttgcctgcgttttggaagctctgaagtcacatcacaggacacggggcagtggcaaccttgtctctatgccagctcagtcccatcagagagcgagcgctacccacttctaaatagcaatttcgccgttgaagaggaagggcaaaaccactagaactctccatcttattttcatgtatatgtgttcattaaagcatgaatggtatggaactctctccaccctatatgtagtataaagaaaagtaggtttacattcatctcattccaacttcccagttcaggagtcccaaggaaagccccagcactaacgtaaatacacaacacacacactctaccctatacaactggacattgtctgcgtggttcctttctcagccgcttctgactgctgattctcccgttcacgttgcctaataaacatccttcaagaactctgggctgctacccagaaatcattttacccttggctcaatcctctaagctaacccccttctactgagccttcagtcttgaatttctaaaaaacagaggccatggcagaataatctttgggtaacttcaaaacggggcagccaaacccatgaggcaatgtcaggaacagaaggatgaatgaggtcccaggcagagaatcatacttagcaaagttttacctgtgcgttactaattggcctctttaagagttagtttctttgggattgctatgaatgataccctgaatttggcctgcactaatttgatgtttacaggtggacacacaaggtgcaaatcaatgcgtacgtttcctgagaagtgtctaaaaacaccaaaaagggatccgtacattcaatgtttatgcaaggaaggaaagaaagaaggaagtgaagagggagaagggatggaggtcacactggtagaacgtaaccacggaaaagagcgcatcaggcctggcacggtggctcaggcctataaccccagctccctaggagaccaaggcgggagcatctcttgaggccaggagtttgagaccagcctgggcagcatagcaagacacatccctacaaaaaattagaaattggctggatgtggtggcatacgcctgtagtcctagccactcaggaggctgaggcaggaggattgcttgagcccaggagttcgaggctgcagtcagtcatgatggcaccactgcactccagcctgggcaacagagcaagatcctgtctttaaggaaaaaaagacaagatgagcataccagcagtccttgaacattatcaaaaagttcagcatattagaatcaccgggaggccttgttaaaagagttcgctgggcccatcttcagagtctctgagttgttggtctggaatagagccaaatgttttgtgtgtctaacaattcccaggtgctgttgctgctgctactattccaggaacacactttgagaaccattgtgttattgctctgcacgcccacccactctcaactcccacgaaaaaaatcaacttccagagctaagatttcggtggaagtcctggttccatatctggtgcaagatctcccctcacgaatcagttgagtcaacattctagctcaacaacatcacacgattaacattaacgaaaattattcatttgggaaactatcagccagttttcacttctgaaggggcaggagagtgttatgagaaatcacggcagttttcagcagggtccagattcagattaaataactattttctgtcatttctgtgaccaaccacatacaaacagactcatctgtgcactctccccctcccccttcaggtatatgttttctgagtaaagttgaaaagaatctcagaccagaaaatatagatatatatttaaatcttacttgagtagaactgattacgacttttgggtgttgaggggtctataagatcaaaacttttccatgataatactaagatgttatcgaccatttatctgtccttctctcaaaagtgtatggtggaattttccagaagctatgtgatacgtgatgatgtcatcactctgctgttaacatataataaatttattgctattgtttataaaagaataaatgatattttttaa

SEQ ID NO: 374290 - DNA, 1657 bp, Homo sapiens
  misc_feature (1402)..(1402): n is a, c, g, or t
  misc_feature (1408)..(1409): n is a, c, g, or t
gtgctaggcagtttcctggctgaacacgccagcccaatacttaaagagagcaactcctgactccgatagagactggatggacccacaagggtgacagcccaggcggaccgatcttcccatcccacatcctccggcgcgatgccaaaaagaggctgacggcaactgggccttctgcagagaaagacctccgcttcactgccccggctggtcccaagggtcaggaagatggattcatacctgctgatgtggggactgctcacgttcatcatggtgcctggctgccaggcagagctctgtgacgatgacccgccagagatcccacacgccacattcaaagccatggcctacaaggaaggaaccatgttgaactgtgaatgcaagagaggtttccgcagaataaaaagcgggtcactctatatgctctgtacaggaaactctagccactcgtcctgggacaaccaatgtcaatgcacaagctctgccactcggaacacaacgaaacaagtgacacctcaacctgaagaacagaaagaaaggaaaaccacagaaatgcaaagtccaatgcagccagtggaccaagcgagccttccaggtcactgcagggaacctccaccatgggaaaatgaagccacagagagaatttatcatttcgtggtggggcagatggtttattatcagtgcgtccagggatacagggctctacacagaggtcctgctgagagcgtctgcaaaatgacccacgggaagacaaggtggacccagccccagctcatatgcacaggtgaaatggagaccagtcagtttccaggtgaagagaagcctcaggcaagccccgaaggccgtcctgagagtgagacttcctgcctcgtcacaacaacagattttcaaatacagacagaaatggctgcaaccatggagacgtccatatttacaacagagtaccaggtagcagtggccggctgtgttttcctgctgatcagcgtcctcctcctgagtgggctcacctggcagcggagacagaggaagagtagaagaacaatctagaaaaccaaaagaacaagaatttcttggtaagaagccgggaacagacaacagaagtcatgaagcccaagtgaaatcaaaggtgctaaatggtcgcccaggagacatccgttgtgcttgcctgcgttttggaagctctgaagtcacatcacaggacacggggcagtggcaaccttgtctctatgccagctcagtcccatcagagagcgagcgctacccacttctaaatagcaatttcgccgttgaagaggaagggcaaaaccactagaactctccatcttattttcatgtatatgtgttcattaaagcatgaatggtaaaaaaaaaaaaaaaaaaaaaaaaaaaaaaaaaaaaaaaaaanaaaaannaaaaaaaaaaaaaaaaaaaaaaaaaaaaaaaaaaaaaaaaaaaaaaaaaaaaaaaaaaaaaatttcaggggggggcccggaaccaaattggccttatggggggtcgtttaaaaattaaagtggccggggttataaaaagttttgatggggaaaaccttggggttacccaattaaatccgttggggaaaaaatcccttttggccagttggcgtaatagcgaaagggcccctcccgatcgctctttccaa

SEQ ID NO: 374291 - DNA, 500 bp, Homo sapiens
ttaaggttacagtggaaagtgagagcacacagaggagctctaccagaacctgacccgggaacaagccgactactgcgtctcccacatgaagccctacgtggacggcaagggccgcgagctccccaccgcgttcgactacgtggagttcacccgctcgcttttcgtgaactgagccactccctgggtcacccacccctcgctgcttgccctgcgtcgccttgctgcatgtccgctcctctgtgtgctctcactttccactgtaaccttaagcctgcttagcttggaataagacttaggagaaaatggtgcttcactaacccgcttccggtccagtcacaatcatcatgtcactgtggggacccagatctgtgtcttgaagcagctgccctcattccgacttcagaaaatcgaagcagctggctcctccccttgttctctctcccaccctcccccaaatctgttttcatgtaaaagacaaataaatgatgacttcccccaaa

SEQ ID NO: 374292 - DNA, 837 bp, Homo sapiens
ttaaggttacagtggaaagtgagagcacacagaggagctctaccagaacctgacccgggaacaagccgactactgcgtctcccacatgaagccctacgtggacggcaagggccgcgagctccccaccgcgttcgactacgtggagttcacccgctcgcttttcgtgaactgagccactccctgggtcacccacccctcgctgcttgccctgcgtcgccttgctgcatgtccgctcctctgtgtgctctcactttccactgtaaccttaagcctgcttagcttggaataagacttaggagaaaatggtgcttcactaacccgcttccggtccagtcacaatcatcatgtcactgtggggacccagatctgtgtcttgaagcagctgccctcattccgacttcagaaaatcgaagcagctggctcctccccttgttctctctcccaccctcccccaaatctgttttcatgtaaaagacaaataaatgatgacttcccccaaaaaaaaaaaaaaaaaaaaaaaaaaaaaaaaaaaaaaaaaaaaaaaaaggggggggggggcaaaaatttccccgggggggcccattttaagcgagcaccccgcgtgttcgtgtggaaacgaaagggggccccccatgaggagggacccgcctaataagaaagaccggagccgggggccgcggccttaaaaacaaaccgcgcgccaggaggacaacaaacgagtgcagtgagcaactcgtggagaaaaggacaccaacactcggcggcggggaacaccaactgggaaccacactccctgacgaattaaggcccgagggaaaataacctgagggctacagg

SEQ ID NO: 374293 - DNA, 949 bp, Homo sapiens
ttcactctgtctcaaagaaaaaaaaaaaaaaaaaaaccttctgagaggttttaatgtgctagatacaaaatcaatatactgaaagtcaaacatgtttctctacactagcaacagaaacataatttttaaaaatactacttattagagcagaaaatataaagtacttaggaataagtctaacaaaagagtgtaagacacttctggagaaaactataaaactttgttaaaaggcattaaataaaaactgaatagatagaatgatttatctagtacacagatggaacgatcttctgtgaaggtgtaaattcccaccaggatatataccgttaatgcagttccagtcaagtgctcagcaggtatatgtgtgtgtttctttttgcaatgagataagctgattccaaaactgatttggaagaaaaaaattcaaaaaaagctgagacaatgttgaagatcataatggggccagggagggactcgccctaccaggttctataaaatcatagtaaacaagtccatttggcacaaagaagacagagccctggaacgaaagagagctcagacccatgtgaatgtgtggaaccttgacaaatgacaggtgacctgaaaagccatttggaaaggatttcatcagtgagtgatactctcacatttgatgacctagactgattatgtattaggaaatctggcctaatctttcattttgtttctcattttagatgtcatagtctggcttataatgcttatgtaaaattcagcaccttgtttttattttgtaagatgctgggcacaaatcatggctttgtttttttctcctgtagggtgaaattgatgcccatgaagacagcttcaaatctgcagatgaatctggacaggcactgcttgctgctggtcactatgcctcagatgaagtgagggagaaggtaagagaagagaaaccgtcgcattcgag

SEQ ID NO: 374294 - DNA, 7861 bp, Homo sapiens
cgccactacccgctgcggagtgaacggtgtggagcggaggccgcggaggctcctcggtccttcagcacccctcggcccgacgcacccacgcccctcaccccccgagagccgaaaatggacccaagtggggtcaaagtgctggaaacagcagaggacatccaggagaggcggcagcaggtcctagaccgataccaccgcttcaaggaactctcaacccttaggcgtcagaagctggaagattcctatcgattccagttctttcaaagagatgctgaagagctggagaaatggatacaggaaaaacttcagattgcatctgatgagaattataaagacccaaccaacttgcagggaaagcttcagaagcatcaagcatttgaagctgaagtgcaggccaactcaggagccattgttaagctggatgaaactggaaacctgatgatctcagaagggcattttgcatctgaaaccatacggacccgtttgatggagctgcaccgccagtgggaattacttttggagaagatgcgagaaaaaggaatcaaactgctgcaggcccagaagttggtgcagtacttacgagaatgtgaggacgtgatggactggatcaatgacaaggaagcaattgttacttctgaagagctgggccaggatctggagcatgtagaggttttacagaagaaatttgaagagtttcaaacagatatggctgctcatgaagaaagagttaatgaagtgaaccagtttgctgccaaactcatacaggagcagcaccctgaggaggaactgatcaagactaagcaggatgaagtcaatgcagcctggcagcggctgaagggcctggctctgcagaggcaggggaagctctttggggcagcagaagttcagcgctttaacagggatgtggatgagactatcagttggattaaggaaaaggagcagttaatggcctctgatgattttggccgagacctggcaagtgttcaggctctgcttcggaagcacgagggtctggagagagatcttgctgctctagaagacaaggtcaaagccctgtgtgctgaggctgaccgcctgcaacagtcccaccctctgagtgcaacacagattcaagtgaagcgagaggaactgattacaaactgggagcagatccgcaccttggcggcagagagacatgcacggctcaatgattcatacaggcttcaacgcttccttgctgacttccgtgacctcaccagctgggtgactgagatgaaagccctcatcaatgcagatgagcttgccagtgatgtggctggggctgaagccctgctagatagacaccaagagcacaagggtgaaattgatgcccatgaagacagcttcaaatctgcagatgaatctggacaggcactgcttgctgctggtcactatgcctcagatgaagtgagggagaagctgaccgtcctttccgaggagagagcggcgctgctggagctgtgggagctgcgcaggcagcagtacgagcagtgcatggacctgcagctcttctaccgggacactgagcaggtggacaactggatgagcaagcaggaggcgttcctgttgaatgaagacttgggagattccttggatagtgtggaagcgcttcttaagaagcacgaagactttgagaaatcccttagtgcccaggaggaaaagattacagcattagatgaatttgcaaccaagctaattcagaacaaccactatgcaatggaagatgtggccactcgccgagatgctctgttgagccgccgcaatgcccttcacgagagagccatgcgtcgccgggcccagctagccgattctttccatctgcagcagtttttccgtgattctgatgagctcaagagttgggtcaatgagaagatgaaaactgccacagatgaagcttataaagatccatccaacctacaaggaaaagtacagaagcatcaggcttttgaggctgagctctcagcaaaccagagccgaattgatgccttggagaaagctggccaaaagctgattgatgtcaaccactatgccaaggatgaagtggcagctcgtatgaatgaggtgatcagtttgtggaagaaactgctagaggccactgaactgaaaggaataaagcttcgtgaagccaaccagcaacagcaatttaatcgcaatgttgaggatattgaattgtggctatatgaagtagaaggtcacttggcttcggatgattacggcaaagatcttaccaatgtgcagaacctccagaagaaacatgccctgctagaggcagatgtggctgctcaccaggaccgaattgatggcatcaccattcaggcccgccagttccaagatgctggccattttgatgcagaaaacatcaagaagaaacaggaagccctcgtggctcgctatgaggcactcaaggagcccatggttgcccggaagcagaagctggccgattctctgcggttgcagcagctcttccgggatgttgaggatgaggagacgtggattcgagagaaagagcccattgccgcatctaccaacagaggtaaggatttaattggggtccagaatctgctaaagaaacatcaagccttacaagcagaaattgctggacatgaaccacgcatcaaagcagttacacagaaggggaatgccatggtggaggaaggccattttgctgcagaggatgtgaaggccaagcttcacgagctgaaccaaaagtgggaggcactgaaagccaaagcttcccagcgtcggcaggacctggaggactctctgcaggcccagcagtactttgctgatgctaacgaggctgaatcctggatgcgggagaaggaacccattgtgggcagcactgactatggcaaggacgaagactctgctgaggctctactgaagaaacacgaagctttgatgtcagatctcagtgcctacggcagcagcatccaggctttgcgagaacaagcacagtcctgccggcaacaagtggcccccacggatgatgagactgggaaggagctggtcttggctctctacgactatcaggagaagagtccccgagaggtcaccatgaagaagggagatatccttaccttactcaacagcaccaacaaggattggtggaaagtggaagtgaacgatcgtcagggttttgtgccggctgcgtacgtgaagaaattggaccccgcccagtcagcctcccgggagaatctcctggaggagcaaggcagcatagcactgcggcaggagcagattgacaatcagacacgcataactaaggaggccggcagtgtatctctgcgtatgaagcaggtggaagaactatatcattctctgctggaactgggtgagaagcgtaaaggcatgttggagaagagttgcaagaagtttatgttgttccgtgaagcgaatgaactacagcaatggatcaatgagaaggaagccgctctgacaagtgaggaggtcggagcagacttggagcaggttgaggtgctccagaagaagtttgatgacttccagaaggacctgaaggccaatgagtcacggttgaaggacattaacaaggtagctgaagacctggagtctgaaggtcttatggcagaggaggtgcaggctgtgcaacaacaggaagtgtatggcatgatgcccagggatgaaactgattccaagacagcctccccgtggaagtctgctcgtctgatggttcacaccgtggccacctttaattccatcaaggagctgaatgagcgctggcggtccctacagcagctggccgaggaacggagccagctcttgggcagcgcccatgaagtacagaggttccacagagatgctgatgaaaccaaagaatggattgaagagaagaatcaagctctaaacacagacaattatggacatgatctcgccagtgtccaggccctgcaacgcaagcatgagggcttcgagagggaccttgcggctctcggtgacaaggtaaactcccttggtgaaacagcagagcgcctgatccagtcccatcccgagtcagcagaagacctgcaggaaaagtgcacagagttaaaccaggcctggagcagcctggggaaacgtgcagatcagcgcaaggcaaagttgggtgactcccacgacctgcagcgcttccttagcgatttccgggacctcatgtcttggatcaatggaatacgggggttggtgtcctcagatgagctagccaaggatgtcaccggagctgaggcattgctggagcgacaccaggaacaccggacagaaatcgatgccagggctggcactttccaggcatttgagcagtttggacagcagctgttggctcacggacactatgccagccctgagatcaagcagaaacttgatattcttgaccaggagcgtgcagacctggagaaggcctgggttcagcgcaggatgatgctggatcagtgccttgaactgcagctgttccatcgggactgtgagcaagctgagaactggatggctgcccgggaggccttcttgaataccgaagacaaaggagactcactggacagcgtagaggctctgatcaaaaaacatgaagactttgacaaagcgattaacgtccaggaagagaagattgctgctctgcaggcctttgccgaccagctcatcgctgccggccattatgccaagggagacatttctagccggcgcaatgaggtcttggacaggtggcgacgtctgaaagcccagatgattgagaaaaggtcaaagctaggagaatctcaaaccctccaacagttcagccgggatgtggatgagattgaggcttggatcagtgaaaaattgcaaacagcgagtgatgagtcgtacaaggatcccaccaacatccagagcaagcaccagaagcaccaggcttttgaagcagagctgcatgccaacgctgaccggatccgtggggttatcgacatgggcaactccctcattgaacgtggagcctgtgccggcagtgaggatgctgtcaaggcccgcctggctgccttagctgaccagtggcagttcttggtgcaaaagtcagcggaaaagagccagaaactgaaagaagccaacaagcagcagaacttcaacacagggatcaaggactttgacttctggctgtctgaggtggaggccctgctggcatccgaagattatggcaaagacctggcttctgtgaacaacctgctgaaaaagcatcaactgctggaagcagatatatctgcccatgaggatcgcctgaaggacctgaacagccaggcagacagcctgatgaccagcagtgccttcgacacctcccaagtaaaggacaagagggacaccatcaacgggcgcttccagaagatcaagagcatggcggcctcccggcgagccaagctgaatgaatcccatcgcctgcaccagttcttccgggacatggatgacgaggagtcctggatcaaggagaagaagctgctggtgggctcagaggactacggccgggacctaactggcgtgcagaacctgaggaagaagcacaagcggctggaagcagaactggctgcgcatgagccggctattcagggtgtcctggacactggcaagaagctgtccgatgacaacaccatcgggaaagaggagatccagcagcggctggcgcagtttgtggagcactggaaagagctgaagcagctggcagctgcccggggtcagcggctggaagagtccttggaatatcagcagtttgtagccaatgtggaagaggaagaagcctggatcaatgagaaaatgaccctggtggccagcgaagattatggcgacactcttgccgccatccagggcttactgaagaaacatgaagcttttgagacagacttcaccgtccacaaggatcgcgtgaatgatgtctgcaccaatggacaagacctcattaagaagaacaatcaccatgaggagaacatctcttcaaagatgaagggcctgaacgggaaagtgtcagacctggagaaagctgcagcccagagaaaggcgaagctggatgagaactcggccttccttcagttcaactggaaggcggacgtggtggagtcctggatcggtgaaaaggagaacagcttgaagacagatgattatggccgagacctgtcttctgtgcagacgctcctcaccaaacaggaaacttttgacgctgggctgcaggccttccagcaggaaggcattgccaacatcactgccctcaaagatcagcttctcgccgccaaacacgttcagtccaaggccatcgaggcccggcacgcctccctcatgaagaggtggagccagcttctggccaactcagccgcccgcaagaagaagcttctggaggctcagagtcacttccgcaaggtggaggacctcttcctgaccttcgccaaaaaggcttctgccttcaacagctggtttgaaaatgcagaggaggacttaacagaccccgtgcgctgcaactccttggaagaaatcaaagctttgcgcgaggcccacgacgccttccgctcctccctcagctctgcccaggctgacttcaaccagctggccgagctggaccgccagatcaagagcttccgcgtagcctccaacccctacacctggtttaccatggaggccctggaggagacctggaggaacctacagaaaatcatcaaggagagggagctggagctgcagaaggaacagcggcggcaggaggagaacgacaagctgcgccaggagtttgcccagcacgccaacgccttccaccagtggatccaagagaccaggacatacctcctcgatgggtcctgtatggtggaagagtcggggaccctcgaatcccagcttgaagctaccaaacgcaagcaccaggaaatccgagccatgagaagtcagctcaaaaagatcgaggacctgggggccgccatggaggaggccctcatcctggacaacaagtacacggagcacagcaccgtgggcctcgcccagcagtgggaccagctggaccagctgggcatgcgcatgcagcacaacctggagcagcagatccaggccaggaacacaacaggtgtgactgaggaggccctcaaagaattcagcatgatgtttaaacactttgacaaggacaagtctggcaggctgaaccatcaggagttcaaatcttgcctgcgctccctgggctatgacctgcccatggtggaggaaggggaacctgaccctgagttcgaggcaatcctggacacggtggatccgaacagagatggccatgtctccttgcaagaatacatggctttcatgatcagccgcgaaactgagaacgtcaagtccagcgaggagattgagagcgccttccgggccctcagctcagagggaaagccttacgtgaccaaggaggagctctaccagaacctgacccgggaacaagccgactactgcgtctcccacatgaagccctacgtggacggcaagggccgcgagctccccaccgcgttcgactacgtggagttcacccgctcgcttttcgtgaactgagccactccctgggtcacccacccctcgctgcttgccctgcgtcgccttgctgcatgtccgctcctctgtgtgctctcactttccactgtaaccttaagcctgcttagcttggaataagacttaggagaaaatggtgcttcactaacccgcttccggtccagtcacaatcatcatgtcactgtggggacccagatctgtgtcttgaagcagctgccctcattccgacttcagaaaatcgaagcagctggctcctccccttgttctctctcccaccctcccccaaatctgttttcatgtaaaagacaaataaatgatgacttcccccaaa

SEQ ID NO: 374295 - DNA, 8047 bp, Homo sapiens
  misc_feature (7828)..(7828): n is a, c, g, or t
  misc_feature (7830)..(7830): n is a, c, g, or t
  misc_feature (7837)..(7837): n is a, c, g, or t
  misc_feature (7843)..(7843): n is a, c, g, or t
  misc_feature (7845)..(7845): n is a, c, g, or t
  misc_feature (7852)..(7852): n is a, c, g, or t
  misc_feature (7856)..(7856): n is a, c, g, or t
  misc_feature (7863)..(7863): n is a, c, g, or t
  misc_feature (7867)..(7867): n is a, c, g, or t
  misc_feature (7966)..(7966): n is a, c, g, or t
cgccactacccgctgcggagtgaacggtgtggagcggaggccgcggaggctcctcggtccttcagcacccctcggcccgacgcacccacgcccctcaccccccgagagccgaaaatggacccaagtggggtcaaagtgctggaaacagcagaggacatccaggagaggcggcagcaggtcctagaccgataccaccgcttcaaggaactctcaacccttaggcgtcagaagctggaagattcctatcgattccagttctttcaaagagatgctgaagagctggagaaatggatacaggaaaaacttcagattgcatctgatgagaattataaagacccaaccaacttgcagggaaagcttcagaagcatcaagcatttgaagctgaagtgcaggccaactcaggagccattgttaagctggatgaaactggaaacctgatgatctcagaagggcattttgcatctgaaaccatacggacccgtttgatggagctgcaccgccagtgggaattacttttggagaagatgcgagaaaaaggaatcaaactgctgcaggcccagaagttggtgcagtacttacgagaatgtgaggacgtgatggactggatcaatgacaaggaagcaattgttacttctgaagagctgggccaggatctggagcatgtagaggttttacagaagaaatttgaagagtttcaaacagatatggctgctcatgaagaaagagttaatgaagtgaaccagtttgctgccaaactcatacaggagcagcaccctgaggaggaactgatcaagactaagcaggatgaagtcaatgcagcctggcagcggctgaagggcctggctctgcagaggcaggggaagctctttggggcagcagaagttcagcgctttaacagggatgtggatgagactatcagttggattaaggaaaaggagcagttaatggcctctgatgattttggccgagacctggcaagtgttcaggctctgcttcggaagcacgagggtctggagagagatcttgctgctctagaagacaaggtcaaagccctgtgtgctgaggctgaccgcctgcaacagtcccaccctctgagtgcaacacagattcaagtgaagcgagaggaactgattacaaactgggagcagatccgcaccttggcggcagagagacatgcacggctcaatgattcatacaggcttcaacgcttccttgctgacttccgtgacctcaccagctgggtgactgagatgaaagccctcatcaatgcagatgagcttgccagtgatgtggctggggctgaagccctgctagatagacaccaagagcacaagggtgaaattgatgcccatgaagacagcttcaaatctgcagatgaatctggacaggcactgcttgctgctggtcactatgcctcagatgaagtgagggagaagctgaccgtcctttccgaggagagagcggcgctgctggagctgtgggagctgcgcaggcagcagtacgagcagtgcatggacctgcagctcttctaccgggacactgagcaggtggacaactggatgagcaagcaggaggcgttcctgttgaatgaagacttgggagattccttggatagtgtggaagcgcttcttaagaagcacgaagactttgagaaatcccttagtgcccaggaggaaaagattacagcattagatgaatttgcaaccaagctaattcagaacaaccactatgcaatggaagatgtggccactcgccgagatgctctgttgagccgccgcaatgcccttcacgagagagccatgcgtcgccgggcccagctagccgattctttccatctgcagcagtttttccgtgattctgatgagctcaagagttgggtcaatgagaagatgaaaactgccacagatgaagcttataaagatccatccaacctacaaggaaaagtacagaagcatcaggcttttgaggctgagctctcagcaaaccagagccgaattgatgccttggagaaagctggccaaaagctgattgatgtcaaccactatgccaaggatgaagtggcagctcgtatgaatgaggtgatcagtttgtggaagaaactgctagaggccactgaactgaaaggaataaagcttcgtgaagccaaccagcaacagcaatttaatcgcaatgttgaggatattgaattgtggctatatgaagtagaaggtcacttggcttcggatgattacggcaaagatcttaccaatgtgcagaacctccagaagaaacatgccctgctagaggcagatgtggctgctcaccaggaccgaattgatggcatcaccattcaggcccgccagttccaagatgctggccattttgatgcagaaaacatcaagaagaaacaggaagccctcgtggctcgctatgaggcactcaaggagcccatggttgcccggaagcagaagctggccgattctctgcggttgcagcagctcttccgggatgttgaggatgaggagacgtggattcgagagaaagagcccattgccgcatctaccaacagaggtaaggatttaattggggtccagaatctgctaaagaaacatcaagccttacaagcagaaattgctggacatgaaccacgcatcaaagcagttacacagaaggggaatgccatggtggaggaaggccattttgctgcagaggatgtgaaggccaagcttcacgagctgaaccaaaagtgggaggcactgaaagccaaagcttcccagcgtcggcaggacctggaggactctctgcaggcccagcagtactttgctgatgctaacgaggctgaatcctggatgcgggagaaggaacccattgtgggcagcactgactatggcaaggacgaagactctgctgaggctctactgaagaaacacgaagctttgatgtcagatctcagtgcctacggcagcagcatccaggctttgcgagaacaagcacagtcctgccggcaacaagtggcccccacggatgatgagactgggaaggagctggtcttggctctctacgactatcaggagaagagtccccgagaggtcaccatgaagaagggagatatccttaccttactcaacagcaccaacaaggattggtggaaagtggaagtgaacgatcgtcagggttttgtgccggctgcgtacgtgaagaaattggaccccgcccagtcagcctcccgggagaatctcctggaggagcaaggcagcatagcactgcggcaggagcagattgacaatcagacacgcataactaaggaggccggcagtgtatctctgcgtatgaagcaggtggaagaactatatcattctctgctggaactgggtgagaagcgtaaaggcatgttggagaagagttgcaagaagtttatgttgttccgtgaagcgaatgaactacagcaatggatcaatgagaaggaagccgctctgacaagtgaggaggtcggagcagacttggagcaggttgaggtgctccagaagaagtttgatgacttccagaaggacctgaaggccaatgagtcacggttgaaggacattaacaaggtagctgaagacctggagtctgaaggtcttatggcagaggaggtgcaggctgtgcaacaacaggaagtgtatggcatgatgcccagggatgaaactgattccaagacagcctccccgtggaagtctgctcgtctgatggttcacaccgtggccacctttaattccatcaaggagctgaatgagcgctggcggtccctacagcagctggccgaggaacggagccagctcttgggcagcgcccatgaagtacagaggttccacagagatgctgatgaaaccaaagaatggattgaagagaagaatcaagctctaaacacagacaattatggacatgatctcgccagtgtccaggccctgcaacgcaagcatgagggcttcgagagggaccttgcggctctcggtgacaaggtaaactcccttggtgaaacagcagagcgcctgatccagtcccatcccgagtcagcagaagacctgcaggaaaagtgcacagagttaaaccaggcctggagcagcctggggaaacgtgcagatcagcgcaaggcaaagttgggtgactcccacgacctgcagcgcttccttagcgatttccgggacctcatgtcttggatcaatggaatacgggggttggtgtcctcagatgagctagccaaggatgtcaccggagctgaggcattgctggagcgacaccaggaacaccggacagaaatcgatgccagggctggcactttccaggcatttgagcagtttggacagcagctgttggctcacggacactatgccagccctgagatcaagcagaaacttgatattcttgaccaggagcgtgcagacctggagaaggcctgggttcagcgcaggatgatgctggatcagtgccttgaactgcagctgttccatcgggactgtgagcaagctgagaactggatggctgcccgggaggccttcttgaataccgaagacaaaggagactcactggacagcgtagaggctctgatcaaaaaacatgaagactttgacaaagcgattaacgtccaggaagagaagattgctgctctgcaggcctttgccgaccagctcatcgctgccggccattatgccaagggagacatttctagccggcgcaatgaggtcttggacaggtggcgacgtctgaaagcccagatgattgagaaaaggtcaaagctaggagaatctcaaaccctccaacagttcagccgggatgtggatgagattgaggcttggatcagtgaaaaattgcaaacagcgagtgatgagtcgtacaaggatcccaccaacatccagagcaagcaccagaagcaccaggcttttgaagcagagctgcatgccaacgctgaccggatccgtggggttatcgacatgggcaactccctcattgaacgtggagcctgtgccggcagtgaggatgctgtcaaggcccgcctggctgccttagctgaccagtggcagttcttggtgcaaaagtcagcggaaaagagccagaaactgaaagaagccaacaagcagcagaacttcaacacagggatcaaggactttgacttctggctgtctgaggtggaggccctgctggcatccgaagattatggcaaagacctggcttctgtgaacaacctgctgaaaaagcatcaactgctggaagcagatatatctgcccatgaggatcgcctgaaggacctgaacagccaggcagacagcctgatgaccagcagtgccttcgacacctcccaagtaaaggacaagagggacaccatcaacgggcgcttccagaagatcaagagcatggcggcctcccggcgagccaagctgaatgaatcccatcgcctgcaccagttcttccgggacatggatgacgaggagtcctggatcaaggagaagaagctgctggtgggctcagaggactacggccgggacctaactggcgtgcagaacctgaggaagaagcacaagcggctggaagcagaactggctgcgcatgagccggctattcagggtgtcctggacactggcaagaagctgtccgatgacaacaccatcgggaaagaggagatccagcagcggctggcgcagtttgtggagcactggaaagagctgaagcagctggcagctgcccggggtcagcggctggaagagtccttggaatatcagcagtttgtagccaatgtggaagaggaagaagcctggatcaatgagaaaatgaccctggtggccagcgaagattatggcgacactcttgccgccatccagggcttactgaagaaacatgaagcttttgagacagacttcaccgtccacaaggatcgcgtgaatgatgtctgcaccaatggacaagacctcattaagaagaacaatcaccatgaggagaacatctcttcaaagatgaagggcctgaacgggaaagtgtcagacctggagaaagctgcagcccagagaaaggcgaagctggatgagaactcggccttccttcagttcaactggaaggcggacgtggtggagtcctggatcggtgaaaaggagaacagcttgaagacagatgattatggccgagacctgtcttctgtgcagacgctcctcaccaaacaggaaacttttgacgctgggctgcaggccttccagcaggaaggcattgccaacatcactgccctcaaagatcagcttctcgccgccaaacacgttcagtccaaggccatcgaggcccggcacgcctccctcatgaagaggtggagccagcttctggccaactcagccgcccgcaagaagaagcttctggaggctcagagtcacttccgcaaggtggaggacctcttcctgaccttcgccaaaaaggcttctgccttcaacagctggtttgaaaatgcagaggaggacttaacagaccccgtgcgctgcaactccttggaagaaatcaaagctttgcgcgaggcccacgacgccttccgctcctccctcagctctgcccaggctgacttcaaccagctggccgagctggaccgccagatcaagagcttccgcgtagcctccaacccctacacctggtttaccatggaggccctggaggagacctggaggaacctacagaaaatcatcaaggagagggagctggagctgcagaaggaacagcggcggcaggaggagaacgacaagctgcgccaggagtttgcccagcacgccaacgccttccaccagtggatccaagagaccaggacatacctcctcgatgggtcctgtatggtggaagagtcggggaccctcgaatcccagcttgaagctaccaaacgcaagcaccaggaaatccgagccatgagaagtcagctcaaaaagatcgaggacctgggggccgccatggaggaggccctcatcctggacaacaagtacacggagcacagcaccgtgggcctcgcccagcagtgggaccagctggaccagctgggcatgcgcatgcagcacaacctggagcagcagatccaggccaggaacacaacaggtgtgactgaggaggccctcaaagaattcagcatgatgtttaaacactttgacaaggacaagtctggcaggctgaaccatcaggagttcaaatcttgcctgcgctccctgggctatgacctgcccatggtggaggaaggggaacctgaccctgagttcgaggcaatcctggacacggtggatccgaacagagatggccatgtctccttgcaagaatacatggctttcatgatcagccgcgaaactgagaacgtcaagtccagcgaggagattgagagcgccttccgggccctcagctcagagggaaagccttacgtgaccaaggaggagctctaccagaacctgacccgggaacaagccgactactgcgtctcccacatgaagccctacgtggacggcaagggccgcgagctccccaccgcgttcgactacgtggagttcacccgctcgcttttcgtgaactgagccactccctgggtcacccacccctcgctgcttgccctgcgtcgccttgctgcatgtccgctcctctgtgtgctctcactttccactgtaaccttaagcctgcttagcttggaataagacttaggagaaaatggtgcttcactaacccgcttccggtccagtcacaatcatcatgtcactgtggggacccagatctgtgtcttgaagcagctgccctcattccgacttcagaaaatcgaagcagctggctcctccccttgttctctctcccaccctcccccaaatctgtttctgntnagacatnatgtgnantcccccnaaanaaaaagngggncgcaaaatcccggggccacatacggaccactatgtcaaagcgcaccagaggcgaaaaagacaggcgcataaaccactgggacaccaccgcaagagaacnacaccgaaaatggaacacagcaacactaaaacagtgcgacacgcgactgacagagatacacagaggcatgaatcgtagcat

SEQ ID NO: 374296 - DNA, 7878 bp, Homo sapiens
cgccactacccgctgcggagtgaacggtgtggagcggaggccgcggaggctcctcggtccttcagcacccctcggcccgacgcacccacgcccctcaccccccgagagccgaaaatggacccaagtggggtcaaagtgctggaaacagcagaggacatccaggagaggcggcagcaggtcctagaccgataccaccgcttcaaggaactctcaacccttaggcgtcagaagctggaagattcctatcgattccagttctttcaaagagatgctgaagagctggagaaatggatacaggaaaaacttcagattgcatctgatgagaattataaagacccaaccaacttgcagggaaagcttcagaagcatcaagcatttgaagctgaagtgcaggccaactcaggagccattgttaagctggatgaaactggaaacctgatgatctcagaagggcattttgcatctgaaaccatacggacccgtttgatggagctgcaccgccagtgggaattacttttggagaagatgcgagaaaaaggaatcaaactgctgcaggcccagaagttggtgcagtacttacgagaatgtgaggacgtgatggactggatcaatgacaaggaagcaattgttacttctgaagagctgggccaggatctggagcatgtagaggttttacagaagaaatttgaagagtttcaaacagatatggctgctcatgaagaaagagttaatgaagtgaaccagtttgctgccaaactcatacaggagcagcaccctgaggaggaactgatcaagactaagcaggatgaagtcaatgcagcctggcagcggctgaagggcctggctctgcagaggcaggggaagctctttggggcagcagaagttcagcgctttaacagggatgtggatgagactatcagttggattaaggaaaaggagcagttaatggcctctgatgattttggccgagacctggcaagtgttcaggctctgcttcggaagcacgagggtctggagagagatcttgctgctctagaagacaaggtcaaagccctgtgtgctgaggctgaccgcctgcaacagtcccaccctctgagtgcaacacagattcaagtgaagcgagaggaactgattacaaactgggagcagatccgcaccttggcggcagagagacatgcacggctcaatgattcatacaggcttcaacgcttccttgctgacttccgtgacctcaccagctgggtgactgagatgaaagccctcatcaatgcagatgagcttgccagtgatgtggctggggctgaagccctgctagatagacaccaagagcacaagggtgaaattgatgcccatgaagacagcttcaaatctgcagatgaatctggacaggcactgcttgctgctggtcactatgcctcagatgaagtgagggagaagctgaccgtcctttccgaggagagagcggcgctgctggagctgtgggagctgcgcaggcagcagtacgagcagtgcatggacctgcagctcttctaccgggacactgagcaggtggacaactggatgagcaagcaggaggcgttcctgttgaatgaagacttgggagattccttggatagtgtggaagcgcttcttaagaagcacgaagactttgagaaatcccttagtgcccaggaggaaaagattacagcattagatgaatttgcaaccaagctaattcagaacaaccactatgcaatggaagatgtggccactcgccgagatgctctgttgagccgccgcaatgcccttcacgagagagccatgcgtcgccgggcccagctagccgattctttccatctgcagcagtttttccgtgattctgatgagctcaagagttgggtcaatgagaagatgaaaactgccacagatgaagcttataaagatccatccaacctacaaggaaaagtacagaagcatcaggcttttgaggctgagctctcagcaaaccagagccgaattgatgccttggagaaagctggccaaaagctgattgatgtcaaccactatgccaaggatgaagtggcagctcgtatgaatgaggtgatcagtttgtggaagaaactgctagaggccactgaactgaaaggaataaagcttcgtgaagccaaccagcaacagcaatttaatcgcaatgttgaggatattgaattgtggctatatgaagtagaaggtcacttggcttcggatgattacggcaaagatcttaccaatgtgcagaacctccagaagaaacatgccctgctagaggcagatgtggctgctcaccaggaccgaattgatggcatcaccattcaggcccgccagttccaagatgctggccattttgatgcagaaaacatcaagaagaaacaggaagccctcgtggctcgctatgaggcactcaaggagcccatggttgcccggaagcagaagctggccgattctctgcggttgcagcagctcttccgggatgttgaggatgaggagacgtggattcgagagaaagagcccattgccgcatctaccaacagaggtaaggatttaattggggtccagaatctgctaaagaaacatcaagccttacaagcagaaattgctggacatgaaccacgcatcaaagcagttacacagaaggggaatgccatggtggaggaaggccattttgctgcagaggatgtgaaggccaagcttcacgagctgaaccaaaagtgggaggcactgaaagccaaagcttcccagcgtcggcaggacctggaggactctctgcaggcccagcagtactttgctgatgctaacgaggctgaatcctggatgcgggagaaggaacccattgtgggcagcactgactatggcaaggacgaagactctgctgaggctctactgaagaaacacgaagctttgatgtcagatctcagtgcctacggcagcagcatccaggctttgcgagaacaagcacagtcctgccggcaacaagtggcccccacggatgatgagactgggaaggagctggtcttggctctctacgactatcaggagaagagtccccgagaggtcaccatgaagaagggagatatccttaccttactcaacagcaccaacaaggattggtggaaagtggaagtgaacgatcgtcagggttttgtgccggctgcgtacgtgaagaaattggaccccgcccagtcagcctcccgggagaatctcctggaggagcaaggcagcatagcactgcggcaggagcagattgacaatcagacacgcataactaaggaggccggcagtgtatctctgcgtatgaagcaggtggaagaactatatcattctctgctggaactgggtgagaagcgtaaaggcatgttggagaagagttgcaagaagtttatgttgttccgtgaagcgaatgaactacagcaatggatcaatgagaaggaagccgctctgacaagtgaggaggtcggagcagacttggagcaggttgaggtgctccagaagaagtttgatgacttccagaaggacctgaaggccaatgagtcacggttgaaggacattaacaaggtagctgaagacctggagtctgaaggtcttatggcagaggaggtgcaggctgtgcaacaacaggaagtgtatggcatgatgcccagggatgaaactgattccaagacagcctccccgtggaagtctgctcgtctgatggttcacaccgtggccacctttaattccatcaaggagctgaatgagcgctggcggtccctacagcagctggccgaggaacggagccagctcttgggcagcgcccatgaagtacagaggttccacagagatgctgatgaaaccaaagaatggattgaagagaagaatcaagctctaaacacagacaattatggacatgatctcgccagtgtccaggccctgcaacgcaagcatgagggcttcgagagggaccttgcggctctcggtgacaaggtaaactcccttggtgaaacagcagagcgcctgatccagtcccatcccgagtcagcagaagacctgcaggaaaagtgcacagagttaaaccaggcctggagcagcctggggaaacgtgcagatcagcgcaaggcaaagttgggtgactcccacgacctgcagcgcttccttagcgatttccgggacctcatgtcttggatcaatggaatacgggggttggtgtcctcagatgagctagccaaggatgtcaccggagctgaggcattgctggagcgacaccaggaacaccggacagaaatcgatgccagggctggcactttccaggcatttgagcagtttggacagcagctgttggctcacggacactatgccagccctgagatcaagcagaaacttgatattcttgaccaggagcgtgcagacctggagaaggcctgggttcagcgcaggatgatgctggatcagtgccttgaactgcagctgttccatcgggactgtgagcaagctgagaactggatggctgcccgggaggccttcttgaataccgaagacaaaggagactcactggacagcgtagaggctctgatcaaaaaacatgaagactttgacaaagcgattaacgtccaggaagagaagattgctgctctgcaggcctttgccgaccagctcatcgctgccggccattatgccaagggagacatttctagccggcgcaatgaggtcttggacaggtggcgacgtctgaaagcccagatgattgagaaaaggtcaaagctaggagaatctcaaaccctccaacagttcagccgggatgtggatgagattgaggcttggatcagtgaaaaattgcaaacagcgagtgatgagtcgtacaaggatcccaccaacatccaggctttccaagctgctggagcaagcaccagaagcaccaggcttttgaagcagagctgcatgccaacgctgaccggatccgtggggttatcgacatgggcaactccctcattgaacgtggagcctgtgccggcagtgaggatgctgtcaaggcccgcctggctgccttagctgaccagtggcagttcttggtgcaaaagtcagcggaaaagagccagaaactgaaagaagccaacaagcagcagaacttcaacacagggatcaaggactttgacttctggctgtctgaggtggaggccctgctggcatccgaagattatggcaaagacctggcttctgtgaacaacctgctgaaaaagcatcaactgctggaagcagatatatctgcccatgaggatcgcctgaaggacctgaacagccaggcagacagcctgatgaccagcagtgccttcgacacctcccaagtaaaggacaagagggacaccatcaacgggcgcttccagaagatcaagagcatggcggcctcccggcgagccaagctgaatgaatcccatcgcctgcaccagttcttccgggacatggatgacgaggagtcctggatcaaggagaagaagctgctggtgggctcagaggactacggccgggacctaactggcgtgcagaacctgaggaagaagcacaagcggctggaagcagaactggctgcgcatgagccggctattcagggtgtcctggacactggcaagaagctgtccgatgacaacaccatcgggaaagaggagatccagcagcggctggcgcagtttgtggagcactggaaagagctgaagcagctggcagctgcccggggtcagcggctggaagagtccttggaatatcagcagtttgtagccaatgtggaagaggaagaagcctggatcaatgagaaaatgaccctggtggccagcgaagattatggcgacactcttgccgccatccagggcttactgaagaaacatgaagcttttgagacagacttcaccgtccacaaggatcgcgtgaatgatgtctgcaccaatggacaagacctcattaagaagaacaatcaccatgaggagaacatctcttcaaagatgaagggcctgaacgggaaagtgtcagacctggagaaagctgcagcccagagaaaggcgaagctggatgagaactcggccttccttcagttcaactggaaggcggacgtggtggagtcctggatcggtgaaaaggagaacagcttgaagacagatgattatggccgagacctgtcttctgtgcagacgctcctcaccaaacaggaaacttttgacgctgggctgcaggccttccagcaggaaggcattgccaacatcactgccctcaaagatcagcttctcgccgccaaacacgttcagtccaaggccatcgaggcccggcacgcctccctcatgaagaggtggagccagcttctggccaactcagccgcccgcaagaagaagcttctggaggctcagagtcacttccgcaaggtggaggacctcttcctgaccttcgccaaaaaggcttctgccttcaacagctggtttgaaaatgcagaggaggacttaacagaccccgtgcgctgcaactccttggaagaaatcaaagctttgcgcgaggcccacgacgccttccgctcctccctcagctctgcccaggctgacttcaaccagctggccgagctggaccgccagatcaagagcttccgcgtagcctccaacccctacacctggtttaccatggaggccctggaggagacctggaggaacctacagaaaatcatcaaggagagggagctggagctgcagaaggaacagcggcggcaggaggagaacgacaagctgcgccaggagtttgcccagcacgccaacgccttccaccagtggatccaagagaccaggacatacctcctcgatgggtcctgtatggtggaagagtcggggaccctcgaatcccagcttgaagctaccaaacgcaagcaccaggaaatccgagccatgagaagtcagctcaaaaagatcgaggacctgggggccgccatggaggaggccctcatcctggacaacaagtacacggagcacagcaccgtgggcctcgcccagcagtgggaccagctggaccagctgggcatgcgcatgcagcacaacctggagcagcagatccaggccaggaacacaacaggtgtgactgaggaggccctcaaagaattcagcatgatgtttaaacactttgacaaggacaagtctggcaggctgaaccatcaggagttcaaatcttgcctgcgctccctgggctatgacctgcccatggtggaggaaggggaacctgaccctgagttcgaggcaatcctggacacggtggatccgaacagagatggccatgtctccttgcaagaatacatggctttcatgatcagccgcgaaactgagaacgtcaagtccagcgaggagattgagagcgccttccgggccctcagctcagagggaaagccttacgtgaccaaggaggagctctaccagaacctgacccgggaacaagccgactactgcgtctcccacatgaagccctacgtggacggcaagggccgcgagctccccaccgcgttcgactacgtggagttcacccgctcgcttttcgtgaactgagccactccctgggtcacccacccctcgctgcttgccctgcgtcgccttgctgcatgtccgctcctctgtgtgctctcactttccactgtaaccttaagcctgcttagcttggaataagacttaggagaaaatggtgcttcactaacccgcttccggtccagtcacaatcatcatgtcactgtggggacccagatctgtgtcttgaagcagctgccctcattccgacttcagaaaatcgaagcagctggctcctccccttgttctctctcccaccctcccccaaatctgttttcatgtaaaagacaaataaatgatgacttcccccaaa

SEQ ID NO: 374297 - DNA, 7344 bp, Homo sapiens
ttcactctgtctcaaagaaaaaaaaaaaaaaaaaaaccttctgagaggttttaatgtgctagatacaaaatcaatatactgaaagtcaaacatgtttctctacactagcaacagaaacataatttttaaaaatactacttattagagcagaaaatataaagtacttaggaataagtctaacaaaagagtgtaagacacttctggagaaaactataaaactttgttaaaaggcattaaataaaaactgaatagatagaatgatttatctagtacacagatggaacgatcttctgtgaaggtgtaaattcccaccaggatatataccgttaatgcagttccagtcaagtgctcagcaggtatatgtgtgtgtttctttttgcaatgagataagctgattccaaaactgatttggaagaaaaaaattcaaaaaaagctgagacaatgttgaagatcataatggggccagggagggactcgccctaccaggttctataaaatcatagtaaacaagtccatttggcacaaagaagacagagccctggaacgaaagagagctcagacccatgtgaatgtgtggaaccttgacaaatgacaggtgacctgaaaagccatttggaaaggatttcatcagtgagtgatactctcacatttgatgacctagactgattatgtattaggaaatctggcctaatctttcattttgtttctcattttagatgtcatagtctggcttataatgcttatgtaaaattcagcaccttgtttttattttgtaagatgctgggcacaaatcatggctttgtttttttctcctgtagggtgaaattgatgcccatgaagacagcttcaaatctgcagatgaatctggacaggcactgcttgctgctggtcactatgcctcagatgaagtgagggagaagctgaccgtcctttccgaggagagagcggcgctgctggagctgtgggagctgcgcaggcagcagtacgagcagtgcatggacctgcagctcttctaccgggacactgagcaggtggacaactggatgagcaagcaggaggcgttcctgttgaatgaagacttgggagattccttggatagtgtggaagcgcttcttaagaagcacgaagactttgagaaatcccttagtgcccaggaggaaaagattacagcattagatgaatttgcaaccaagctaattcagaacaaccactatgcaatggaagatgtggccactcgccgagatgctctgttgagccgccgcaatgcccttcacgagagagccatgcgtcgccgggcccagctagccgattctttccatctgcagcagtttttccgtgattctgatgagctcaagagttgggtcaatgagaagatgaaaactgccacagatgaagcttataaagatccatccaacctacaaggaaaagtacagaagcatcaggcttttgaggctgagctctcagcaaaccagagccgaattgatgccttggagaaagctggccaaaagctgattgatgtcaaccactatgccaaggatgaagtggcagctcgtatgaatgaggtgatcagtttgtggaagaaactgctagaggccactgaactgaaaggaataaagcttcgtgaagccaaccagcaacagcaatttaatcgcaatgttgaggatattgaattgtggctatatgaagtagaaggtcacttggcttcggatgattacggcaaagatcttaccaatgtgcagaacctccagaagaaacatgccctgctagaggcagatgtggctgctcaccaggaccgaattgatggcatcaccattcaggcccgccagttccaagatgctggccattttgatgcagaaaacatcaagaagaaacaggaagccctcgtggctcgctatgaggcactcaaggagcccatggttgcccggaagcagaagctggccgattctctgcggttgcagcagctcttccgggatgttgaggatgaggagacgtggattcgagagaaagagcccattgccgcatctaccaacagaggtaaggatttaattggggtccagaatctgctaaagaaacatcaagccttacaagcagaaattgctggacatgaaccacgcatcaaagcagttacacagaaggggaatgccatggtggaggaaggccattttgctgcagaggatgtgaaggccaagcttcacgagctgaaccaaaagtgggaggcactgaaagccaaagcttcccagcgtcggcaggacctggaggactctctgcaggcccagcagtactttgctgatgctaacgaggctgaatcctggatgcgggagaaggaacccattgtgggcagcactgactatggcaaggacgaagactctgctgaggctctactgaagaaacacgaagctttgatgtcagatctcagtgcctacggcagcagcatccaggctttgcgagaacaagcacagtcctgccggcaacaagtggcccccacggatgatgagactgggaaggagctggtcttggctctctacgactatcaggagaagagtccccgagaggtcaccatgaagaagggagatatccttaccttactcaacagcaccaacaaggattggtggaaagtggaagtgaacgatcgtcagggttttgtgccggctgcgtacgtgaagaaattggaccccgcccagtcagcctcccgggagaatctcctggaggagcaaggcagcatagcactgcggcaggagcagattgacaatcagacacgcataactaaggaggccggcagtgtatctctgcgtatgaagcaggtggaagaactatatcattctctgctggaactgggtgagaagcgtaaaggcatgttggagaagagttgcaagaagtttatgttgttccgtgaagcgaatgaactacagcaatggatcaatgagaaggaagccgctctgacaagtgaggaggtcggagcagacttggagcaggttgaggtgctccagaagaagtttgatgacttccagaaggacctgaaggccaatgagtcacggttgaaggacattaacaaggtagctgaagacctggagtctgaaggtcttatggcagaggaggtgcaggctgtgcaacaacaggaagtgtatggcatgatgcccagggatgaaactgattccaagacagcctccccgtggaagtctgctcgtctgatggttcacaccgtggccacctttaattccatcaaggagctgaatgagcgctggcggtccctacagcagctggccgaggaacggagccagctcttgggcagcgcccatgaagtacagaggttccacagagatgctgatgaaaccaaagaatggattgaagagaagaatcaagctctaaacacagacaattatggacatgatctcgccagtgtccaggccctgcaacgcaagcatgagggcttcgagagggaccttgcggctctcggtgacaaggtaaactcccttggtgaaacagcagagcgcctgatccagtcccatcccgagtcagcagaagacctgcaggaaaagtgcacagagttaaaccaggcctggagcagcctggggaaacgtgcagatcagcgcaaggcaaagttgggtgactcccacgacctgcagcgcttccttagcgatttccgggacctcatgtcttggatcaatggaatacgggggttggtgtcctcagatgagctagccaaggatgtcaccggagctgaggcattgctggagcgacaccaggaacaccggacagaaatcgatgccagggctggcactttccaggcatttgagcagtttggacagcagctgttggctcacggacactatgccagccctgagatcaagcagaaacttgatattcttgaccaggagcgtgcagacctggagaaggcctgggttcagcgcaggatgatgctggatcagtgccttgaactgcagctgttccatcgggactgtgagcaagctgagaactggatggctgcccgggaggccttcttgaataccgaagacaaaggagactcactggacagcgtagaggctctgatcaaaaaacatgaagactttgacaaagcgattaacgtccaggaagagaagattgctgctctgcaggcctttgccgaccagctcatcgctgccggccattatgccaagggagacatttctagccggcgcaatgaggtcttggacaggtggcgacgtctgaaagcccagatgattgagaaaaggtcaaagctaggagaatctcaaaccctccaacagttcagccgggatgtggatgagattgaggcttggatcagtgaaaaattgcaaacagcgagtgatgagtcgtacaaggatcccaccaacatccagagcaagcaccagaagcaccaggcttttgaagcagagctgcatgccaacgctgaccggatccgtggggttatcgacatgggcaactccctcattgaacgtggagcctgtgccggcagtgaggatgctgtcaaggcccgcctggctgccttagctgaccagtggcagttcttggtgcaaaagtcagcggaaaagagccagaaactgaaagaagccaacaagcagcagaacttcaacacagggatcaaggactttgacttctggctgtctgaggtggaggccctgctggcatccgaagattatggcaaagacctggcttctgtgaacaacctgctgaaaaagcatcaactgctggaagcagatatatctgcccatgaggatcgcctgaaggacctgaacagccaggcagacagcctgatgaccagcagtgccttcgacacctcccaagtaaaggacaagagggacaccatcaacgggcgcttccagaagatcaagagcatggcggcctcccggcgagccaagctgaatgaatcccatcgcctgcaccagttcttccgggacatggatgacgaggagtcctggatcaaggagaagaagctgctggtgggctcagaggactacggccgggacctaactggcgtgcagaacctgaggaagaagcacaagcggctggaagcagaactggctgcgcatgagccggctattcagggtgtcctggacactggcaagaagctgtccgatgacaacaccatcgggaaagaggagatccagcagcggctggcgcagtttgtggagcactggaaagagctgaagcagctggcagctgcccggggtcagcggctggaagagtccttggaatatcagcagtttgtagccaatgtggaagaggaagaagcctggatcaatgagaaaatgaccctggtggccagcgaagattatggcgacactcttgccgccatccagggcttactgaagaaacatgaagcttttgagacagacttcaccgtccacaaggatcgcgtgaatgatgtctgcaccaatggacaagacctcattaagaagaacaatcaccatgaggagaacatctcttcaaagatgaagggcctgaacgggaaagtgtcagacctggagaaagctgcagcccagagaaaggcgaagctggatgagaactcggccttccttcagttcaactggaaggcggacgtggtggagtcctggatcggtgaaaaggagaacagcttgaagacagatgattatggccgagacctgtcttctgtgcagacgctcctcaccaaacaggaaacttttgacgctgggctgcaggccttccagcaggaaggcattgccaacatcactgccctcaaagatcagcttctcgccgccaaacacgttcagtccaaggccatcgaggcccggcacgcctccctcatgaagaggtggagccagcttctggccaactcagccgcccgcaagaagaagcttctggaggctcagagtcacttccgcaaggtggaggacctcttcctgaccttcgccaaaaaggcttctgccttcaacagctggtttgaaaatgcagaggaggacttaacagaccccgtgcgctgcaactccttggaagaaatcaaagctttgcgcgaggcccacgacgccttccgctcctccctcagctctgcccaggctgacttcaaccagctggccgagctggaccgccagatcaagagcttccgcgtagcctccaacccctacacctggtttaccatggaggccctggaggagacctggaggaacctacagaaaatcatcaaggagagggagctggagctgcagaaggaacagcggcggcaggaggagaacgacaagctgcgccaggagtttgcccagcacgccaacgccttccaccagtggatccaagagaccaggacatacctcctcgatgggtcctgtatggtggaagagtcggggaccctcgaatcccagcttgaagctaccaaacgcaagcaccaggaaatccgagccatgagaagtcagctcaaaaagatcgaggacctgggggccgccatggaggaggccctcatcctggacaacaagtacacggagcacagcaccgtgggcctcgcccagcagtgggaccagctggaccagctgggcatgcgcatgcagcacaacctggagcagcagatccaggccaggaacacaacaggtgtgactgaggaggccctcaaagaattcagcatgatgtttaaacactttgacaaggacaagtctggcaggctgaaccatcaggagttcaaatcttgcctgcgctccctgggctatgacctgcccatggtggaggaaggggaacctgaccctgagttcgaggcaatcctggacacggtggatccgaacagagatggccatgtctccttgcaagaatacatggctttcatgatcagccgcgaaactgagaacgtcaagtccagcgaggagattgagagcgccttccgggccctcagctcagagggaaagccttacgtgaccaaggaggagctctaccagaacctgacccgggaacaagccgactactgcgtctcccacatgaagccctacgtggacggcaagggccgcgagctccccaccgcgttcgactacgtggagttcacccgctcgcttttcgtgaactgagccactccctgggtcacccacccctcgctgcttgccctgcgtcgccttgctgcatgtccgctcctctgtgtgctctcactttccactgtaaccttaagcctgcttagcttggaataagacttaggagaaaatggtgcttcactaacccgcttccggtccagtcacaatcatcatgtcactgtggggacccagatctgtgtcttgaagcagctgccctcattccgacttcagaaaatcgaagcagctggctcctccccttgttctctctcccaccctcccccaaatctgttttcatgtaaaagacaaataaatgatgacttcccccaaa

SEQ ID NO: 374298 - DNA, 6488 bp, Homo sapiens
  misc_feature (14)..(14): n is a, c, g, or t
gtcggtaccctganctcttccgtccggcaatggtcactatgcctcagatgaattgagggagaagctgaccgtcctttccgaggagagagcggcgctgctggagctgtgggagctgcgcaggcagcagtacgagcagtgcatggacctgcagctcttctaccgggacactgagcaggtggacaactggatgagcaagcaggaggcgttcctgttgaatgaagacttgggagattccttggatagtgtggaagcgcttcttaagaagcacgaagactttgagaaatcccttagtgcccaggaggaaaagattacagcattagatgaatttgcaaccaagctaattcagaacaaccactatgcaatggaagatgtggccactcgccgagatgctctgttgagccgccgcaatgcccttcacgagagagccatgcgtcgccgggcccagctagccgattctttccatctgcagcagtttttccgtgattctgatgagctcaagagttgggtcaatgagaagatgaaaactgccacagatgaagcttataaagatccatccaacctacaaggaaaagtacagaagcatcaggcttttgaggctgagctctcagcaaaccagagccgaattgatgccttggagaaagctggccaaaagctgattgatgtcaaccactatgccaaggatgaagtggcagctcgtatgaatgaggtgatcagtttgtggaagaaactgctagaggccactgaactgaaaggaataaagcttcgtgaagccaaccagcaacagcaatttaatcgcaatgttgaggatattgaattgtggctatatgaagtagaaggtcacttggcttcggatgattacggcaaagatcttaccaatgtgcagaacctccagaagaaacatgccctgctagaggcagatgtggctgctcaccaggaccgaattgatggcatcaccattcaggcccgccagttccaagatgctggccattttgatgcagaaaacatcaagaagaaacaggaagccctcgtggctcgctatgaggcactcaaggagcccatggttgcccggaagcagaagctggccgattctctgcggttgcagcagctcttccgggatgttgaggatgaggagacgtggattcgagagaaagagcccattgccgcatctaccaacagaggtaaggatttaattggggtccagaatctgctaaagaaacatcaagccttacaagcagaaattgctggacatgaaccacgcatcaaagcagttacacagaaggggaatgccatggtggaggaaggccattttgctgcagaggatgtgaaggccaagcttcacgagctgaaccaaaagtgggaggcactgaaagccaaagcttcccagcgtcggcaggacctggaggactctctgcaggcccagcagtactttgctgatgctaacgaggctgaatcctggatgcgggagaaggaacccattgtgggcagcactgactatggcaaggacgaagactctgctgaggctctactgaagaaacacgaagctttgatgtcagatctcagtgcctacggcagcagcatccaggctttgcgagaacaagcacagtcctgccggcaacaagtggcccccacggatgatgagactgggaaggagctggtcttggctctctacgactatcaggagaagagtccccgagaggtcaccatgaagaagggagatatccttaccttactcaacagcaccaacaaggattggtggaaagtggaagtgaacgatcgtcagggttttgtgccggctgcgtacgtgaagaaattggaccccgcccagtcagcctcccgggagaatctcctggaggagcaaggcagcatagcactgcggcaggagcagattgacaatcagacacgcataactaaggaggccggcagtgtatctctgcgtatgaagcaggtggaagaactatatcattctctgctggaactgggtgagaagcgtaaaggcatgttggagaagagttgcaagaagtttatgttgttccgtgaagcgaatgaactacagcaatggatcaatgagaaggaagccgctctgacaagtgaggaggtcggagcagacttggagcaggttgaggtgctccagaagaagtttgatgacttccagaaggacctgaaggccaatgagtcacggttgaaggacattaacaaggtagctgaagacctggagtctgaaggtcttatggcagaggaggtgcaggctgtgcaacaacaggaagtgtatggcatgatgcccagggatgaaactgattccaagacagcctccccgtggaagtctgctcgtctgatggttcacaccgtggccacctttaattccatcaaggagctgaatgagcgctggcggtccctacagcagctggccgaggaacggagccagctcttgggcagcgcccatgaagtacagaggttccacagagatgctgatgaaaccaaagaatggattgaagagaagaatcaagctctaaacacagacaattatggacatgatctcgccagtgtccaggccctgcaacgcaagcatgagggcttcgagagggaccttgcggctctcggtgacaaggtaaactcccttggtgaaacagcagagcgcctgatccagtcccatcccgagtcagcagaagacctgcaggaaaagtgcacagagttaaaccaggcctggagcagcctggggaaacgtgcagatcagcgcaaggcaaagttgggtgactcccacgacctgcagcgcttccttagcgatttccgggacctcatgtcttggatcaatggaatacgggggttggtgtcctcagatgagctagccaaggatgtcaccggagctgaggcattgctggagcgacaccaggaacaccggacagaaatcgatgccagggctggcactttccaggcatttgagcagtttggacagcagctgttggctcacggacactatgccagccctgagatcaagcagaaacttgatattcttgaccaggagcgtgcagacctggagaaggcctgggttcagcgcaggatgatgctggatcagtgccttgaactgcagctgttccatcgggactgtgagcaagctgagaactggatggctgcccgggaggccttcttgaataccgaagacaaaggagactcactggacagcgtagaggctctgatcaaaaaacatgaagactttgacaaagcgattaacgtccaggaagagaagattgctgctctgcaggcctttgccgaccagctcatcgctgccggccattatgccaagggagacatttctagccggcgcaatgaggtcttggacaggtggcgacgtctgaaagcccagatgattgagaaaaggtcaaagctaggagaatctcaaaccctccaacagttcagccgggatgtggatgagattgaggcttggatcagtgaaaaattgcaaacagcgagtgatgagtcgtacaaggatcccaccaacatccagagcaagcaccagaagcaccaggcttttgaagcagagctgcatgccaacgctgaccggatccgtggggttatcgacatgggcaactccctcattgaacgtggagcctgtgccggcagtgaggatgctgtcaaggcccgcctggctgccttagctgaccagtggcagttcttggtgcaaaagtcagcggaaaagagccagaaactgaaagaagccaacaagcagcagaacttcaacacagggatcaaggactttgacttctggctgtctgaggtggaggccctgctggcatccgaagattatggcaaagacctggcttctgtgaacaacctgctgaaaaagcatcaactgctggaagcagatatatctgcccatgaggatcgcctgaaggacctgaacagccaggcagacagcctgatgaccagcagtgccttcgacacctcccaagtaaaggacaagagggacaccatcaacgggcgcttccagaagatcaagagcatggcggcctcccggcgagccaagctgaatgaatcccatcgcctgcaccagttcttccgggacatggatgacgaggagtcctggatcaaggagaagaagctgctggtgggctcagaggactacggccgggacctaactggcgtgcagaacctgaggaagaagcacaagcggctggaagcagaactggctgcgcatgagccggctattcagggtgtcctggacactggcaagaagctgtccgatgacaacaccatcgggaaagaggagatccagcagcggctggcgcagtttgtggagcactggaaagagctgaagcagctggcagctgcccggggtcagcggctggaagagtccttggaatatcagcagtttgtagccaatgtggaagaggaagaagcctggatcaatgagaaaatgaccctggtggccagcgaagattatggcgacactcttgccgccatccagggcttactgaagaaacatgaagcttttgagacagacttcaccgtccacaaggatcgcgtgaatgatgtctgcaccaatggacaagacctcattaagaagaacaatcaccatgaggagaacatctcttcaaagatgaagggcctgaacgggaaagtgtcagacctggagaaagctgcagcccagagaaaggcgaagctggatgagaactcggccttccttcagttcaactggaaggcggacgtggtggagtcctggatcggtgaaaaggagaacagcttgaagacagatgattatggccgagacctgtcttctgtgcagacgctcctcaccaaacaggaaacttttgacgctgggctgcaggccttccagcaggaaggcattgccaacatcactgccctcaaagatcagcttctcgccgccaaacacgttcagtccaaggccatcgaggcccggcacgcctccctcatgaagaggtggagccagcttctggccaactcagccgcccgcaagaagaagcttctggaggctcagagtcacttccgcaaggtggaggacctcttcctgaccttcgccaaaaaggcttctgccttcaacagctggtttgaaaatgcagaggaggacttaacagaccccgtgcgctgcaactccttggaagaaatcaaagctttgcgcgaggcccacgacgccttccgctcctccctcagctctgcccaggctgacttcaaccagctggccgagctggaccgccagatcaagagcttccgcgtagcctccaacccctacacctggtttaccatggaggccctggaggagacctggaggaacctacagaaaatcatcaaggagagggagctggagctgcagaaggaacagcggcggcaggaggagaacgacaagctgcgccaggagtttgcccagcacgccaacgccttccaccagtggatccaagagaccaggacatacctcctcgatgggtcctgtatggtggaagagtcggggaccctcgaatcccagcttgaagctaccaaacgcaagcaccaggaaatccgagccatgagaagtcagctcaaaaagatcgaggacctgggggccgccatggaggaggccctcatcctggacaacaagtacacggagcacagcaccgtgggcctcgcccagcagtgggaccagctggaccagctgggcatgcgcatgcagcacaacctggagcagcagatccaggccaggaacacaacaggtgtgactgaggaggccctcaaagaattcagcatgatgtttaaacactttgacaaggacaagtctggcaggctgaaccatcaggagttcaaatcttgcctgcgctccctgggctatgacctgcccatggtggaggaaggggaacctgaccctgagttcgaggcaatcctggacacggtggatccgaacagagatggccatgtctccttgcaagaatacatggctttcatgatcagccgcgaaactgagaacgtcaagtccagcgaggagattgagagcgccttccgggccctcagctcagagggaaagccttacgtgaccaaggaggagctctaccagaacctgacccgggaacaagccgactactgcgtctcccacatgaagccctacgtggacggcaagggccgcgagctccccaccgcgttcgactacgtggagttcacccgctcgcttttcgtgaactgagccactccctgggtcacccacccctcgctgcttgccctgcgtcgccttgctgcatgtccgctcctctgtgtgctctcactttccactgtaaccttaagcctgcttagcttggaataagacttaggagaaaatggtgcttcactaacccgcttccggtccagtcacaatcatcatgtcactgtggggacccagatctgtgtcttgaagcagctgccctcattccgacttcagaaaatcgaagcagctggctcctccccttgttctctctcccaccctcccccaaatctgttttcatgtaaaagacaaataaatgatgacttcccccaaa

SEQ ID NO: 374299 - DNA, 7669 bp, Homo sapiens
cgccactacccgctgcggagtgaacggtgtggagcggaggccgcggaggctcctcggtccttcagcacccctcggcccgacgcacccacgcccctcaccccccgagagccgaaaatggacccaagtggggtcaaagtgctggaaacagcagaggacatccaggagaggcggcagcaggtcctagaccgataccaccgcttcaaggaactctcaacccttaggcgtcagaagctggaagattcctatcgattccagttctttcaaagagatgctgaagagctggagaaatggatacaggaaaaacttcagattgcatctgatgagaattataaagacccaaccaacttgcagggaaagcttcagaagcatcaagcatttgaagctgaagtgcaggccaactcaggagccattgttaagctggatgaaactggaaacctgatgatctcagaagggcattttgcatctgaaaccatacggacccgtttgatggagctgcaccgccagtgggaattacttttggagaagatgcgagaaaaaggaatcaaactgctgcaggcccagaagttggtgcagtacttacgagaatgtgaggacgtgatggactggatcaatgacaaggaagcaattgttacttctgaagagctgggccaggatctggagcatgtagaggttttacagaagaaatttgaagagtttcaaacagatatggctgctcatgaagaaagagttaatgaagtgaaccagtttgctgccaaactcatacaggagcagcaccctgaggaggaactgatcaagactaagcaggatgaagtcaatgcagcctggcagcggctgaagggcctggctctgcagaggcaggggaagctctttggggcagcagaagttcagcgctttaacagggatgtggatgagactatcagttggattaaggaaaaggagcagttaatggcctctgatgattttggccgagacctggcaagtgttcaggctctgcttcggaagcacgagggtctggagagagatcttgctgctctagaagacaaggtcaaagccctgtgtgctgaggctgaccgcctgcaacagtcccaccctctgagtgcaacacagattcaagtgaagcgagaggaactgattacaaactgggagcagatccgcaccttggcggcagagagacatgcacggctcaatgattcatacaggcttcaacgcttccttgctgacttccgtgacctcaccagctgggtgactgagatgaaagccctcatcaatgcagatgagcttgccagtgatgtggctggggctgaagccctgctagatagacaccaagagcacaagggtgaaattgatgcccatgaagacagcttcaaatctgcagatgaatctggacaggcactgcttgctgctggtcactatgcctcagatgaagtgagggagaagctgaccgtcctttccgaggagagagcggcgctgctggagctgtgggagctgcgcaggcagcagtacgagcagtgcatggacctgcagctcttctaccgggacactgagcaggtggacaactggatgagcaagcaggaggcgttcctgttgaatgaagacttgggagattccttggatagtgtggaagcgcttcttaagaagcacgaagactttgagaaatcccttagtgcccaggaggaaaagattacagcattagatgaatttgcaaccaagctaattcagaacaaccactatgcaatggaagatgtggccactcgccgagatgctctgttgagccgccgcaatgcccttcacgagagagccatgcgtcgccgggcccagctagccgattctttccatctgcagcagtttttccgtgattctgatgagctcaagagttgggtcaatgagaagatgaaaactgccacagatgaagcttataaagatccatccaacctacaaggaaaagtacagaagcatcaggcttttgaggctgagctctcagcaaaccagagccgaattgatgccttggagaaagctggccaaaagctgattgatgtcaaccactatgccaaggatgaagtggcagctcgtatgaatgaggtgatcagtttgtggaagaaactgctagaggccactgaactgaaaggaataaagcttcgtgaagccaaccagcaacagcaatttaatcgcaatgttgaggatattgaattgtggctatatgaagtagaaggtcacttggcttcggatgattacggcaaagatcttaccaatgtgcagaacctccagaagaaacatgccctgctagaggcagatgtggctgctcaccaggaccgaattgatggcatcaccattcaggcccgccagttccaagatgctggccattttgatgcagaaaacatcaagaagaaacaggaagccctcgtggctcgctatgaggcactcaaggagcccatggttgcccggaagcagaagctggccgattctctgcggttgcagcagctcttccgggatgttgaggatgaggagacgtggattcgagagaaagagcccattgccgcatctaccaacagaggtaaggatttaattggggtccagaatctgctaaagaaacatcaagccttacaagcagaaattgctggacatgaaccacgcatcaaagcagttacacagaaggggaatgccatggtggaggaaggccattttgctgcagaggatgtgaaggccaagcttcacgagctgaaccaaaagtgggaggcactgaaagccaaagcttcccagcgtcggcaggacctggaggactctctgcaggcccagcagtactttgctgatgctaacgaggctgaatcctggatgcgggagaaggaacccattgtgggcagcactgactatggcaaggacgaagactctgctgaggctctactgaagaaacacgaagctttgatgtcagatctcagtgcctacggcagcagcatccaggctttgcgagaacaagcacagtcctgccggcaacaagtggcccccacggatgatgagactgggaaggagctggtcttggctctctacgactatcaggagaagagtccccgagaggtcaccatgaagaagggagatatccttaccttactcaacagcaccaacaaggattggtggaaagtggaagtgaacgatcgtcagggttttgtgccggctgcgtacgtgaagaaattggaccccgcccagtcagcctcccgggagaatctcctggaggagcaaggcagcatagcactgcggcaggagcagattgacaatcagacacgcataactaaggaggccggcagtgtatctctgcgtatgaagcaggtggaagaactatatcattctctgctggaactgggtgagaagcgtaaaggcatgttggagaagagttgcaagaagtttatgttgttccgtgaagcgaatgaactacagcaatggatcaatgagaaggaagccgctctgacaagtgaggaggtcggagcagacttggagcaggttgaggtgctccagaagaagtttgatgacttccagaaggacctgaaggccaatgagtcacggttgaaggacattaacaaggtagctgaagacctggagtctgaaggtcttatggcagaggaggtgcaggctgtgcaacaacaggaagtgtatggcatgatgcccagggatgaaactgattccaagacagcctccccgtggaagtctgctcgtctgatggttcacaccgtggccacctttaattccatcaaggagctgaatgagcgctggcggtccctacagcagctggccgaggaacggagccagctcttgggcagcgcccatgaagtacagaggttccacagagatgctgatgaaaccaaagaatggattgaagagaagaatcaagctctaaacacagacaattatggacatgatctcgccagtgtccaggccctgcaacgcaagcatgagggcttcgagagggaccttgcggctctcggtgacaaggtaaactcccttggtgaaacagcagagcgcctgatccagtcccatcccgagtcagcagaagacctgcaggaaaagtgcacagagttaaaccaggcctggagcagcctggggaaacgtgcagatcagcgcaaggcaaagttgggtgactcccacgacctgcagcgcttccttagcgatttccgggacctcatgtcttggatcaatggaatacgggggttggtgtcctcagatgagctagccaaggatgtcaccggagctgaggcattgctggagcgacaccaggaacaccggacagaaatcgatgccagggctggcactttccaggcatttgagcagtttggacagcagctgttggctcacggacactatgccagccctgagatcaagcagaaacttgatattcttgaccaggagcgtgcagacctggagaaggcctgggttcagcgcaggatgatgctggatcagtgccttgaactgcagctgttccatcgggactgtgagcaagctgagaactggatggctgcccgggaggccttcttgaataccgaagacaaaggagactcactggacagcgtagaggctctgatcaaaaaacatgaagactttgacaaagcgattaacgtccaggaagagaagattgctgctctgcaggcctttgccgaccagctcatcgctgccggccattatgccaagggagacatttctagccggcgcaatgaggtcttggacaggtggcgacgtctgaaagcccagatgattgagaaaaggtcaaagctaggagaatctcaaaccctccaacagttcagccgggatgtggatgagattgaggcttggatcagtgaaaaattgcaaacagcgagtgatgagtcgtacaaggatcccaccaacatccagagcaagcaccagaagcaccaggcttttgaagcagagctgcatgccaacgctgaccggatccgtggggttatcgacatgggcaactccctcattgaacgtggagcctgtgccggcagtgaggatgctgtcaaggcccgcctggctgccttagctgaccagtggcagttcttggtgcaaaagtcagcggaaaagagccagaaactgaaagaagccaacaagcagcagaacttcaacacagggatcaaggactttgacttctggctgtctgaggtggaggccctgctggcatccgaagattatggcaaagacctggcttctgtgaacaacctgctgaaaaagcatcaactgctggaagcagatatatctgcccatgaggatcgcctgaaggacctgaacagccaggcagacagcctgatgaccagcagtgccttcgacacctcccaagtaaaggacaagagggacaccatcaacgggcgcttccagaagatcaagagcatggcggcctcccggcgagccaagctgaatgaatcccatcgcctgcaccagttcttccgggacatggatgacgaggagtcctggatcaaggagaagaagctgctggtgggctcagaggactacggccgggacctaactggcgtgcagaacctgaggaagaagcacaagcggctggaagcagaactggctgcgcatgagccggctattcagggtgtcctggacactggcaagaagctgtccgatgacaacaccatcgggaaagaggagatccagcagcggctggcgcagtttgtggagcactggaaagagctgaagcagctggcagctgcccggggtcagcggctggaagagtccttggaatatcagcagtttgtagccaatgtggaagaggaagaagcctggatcaatgagaaaatgaccctggtggccagcgaagattatggcgacactcttgccgccatccagggcttactgaagaaacatgaagcttttgagacagacttcaccgtccacaaggatcgcgtgaatgatgtctgcaccaatggacaagacctcattaagaagaacaatcaccatgaggagaacatctcttcaaagatgaagggcctgaacgggaaagtgtcagacctgcaggccttccagcaggaaggcattgccaacatcactgccctcaaagatcagcttctcgccgccaaacacgttcagtccaaggccatcgaggcccggcacgcctccctcatgaagaggtggagccagcttctggccaactcagccgcccgcaagaagaagcttctggaggctcagagtcacttccgcaaggtggaggacctcttcctgaccttcgccaaaaaggcttctgccttcaacagctggtttgaaaatgcagaggaggacttaacagaccccgtgcgctgcaactccttggaagaaatcaaagctttgcgcgaggcccacgacgccttccgctcctccctcagctctgcccaggctgacttcaaccagctggccgagctggaccgccagatcaagagcttccgcgtagcctccaacccctacacctggtttaccatggaggccctggaggagacctggaggaacctacagaaaatcatcaaggagagggagctggagctgcagaaggaacagcggcggcaggaggagaacgacaagctgcgccaggagtttgcccagcacgccaacgccttccaccagtggatccaagagaccaggacatacctcctcgatgggtcctgtatggtggaagagtcggggaccctcgaatcccagcttgaagctaccaaacgcaagcaccaggaaatccgagccatgagaagtcagctcaaaaagatcgaggacctgggggccgccatggaggaggccctcatcctggacaacaagtacacggagcacagcaccgtgggcctcgcccagcagtgggaccagctggaccagctgggcatgcgcatgcagcacaacctggagcagcagatccaggccaggaacacaacaggtgtgactgaggaggccctcaaagaattcagcatgatgtttaaacactttgacaaggacaagtctggcaggctgaaccatcaggagttcaaatcttgcctgcgctccctgggctatgacctgcccatggtggaggaaggggaacctgaccctgagttcgaggcaatcctggacacggtggatccgaacagagatggccatgtctccttgcaagaatacatggctttcatgatcagccgcgaaactgagaacgtcaagtccagcgaggagattgagagcgccttccgggccctcagctcagagggaaagccttacgtgaccaaggaggagctctaccagaacctgacccgggaacaagccgactactgcgtctcccacatgaagccctacgtggacggcaagggccgcgagctccccaccgcgttcgactacgtggagttcacccgctcgcttttcgtgaactgagccactccctgggtcacccacccctcgctgcttgccctgcgtcgccttgctgcatgtccgctcctctgtgtgctctcactttccactgtaaccttaagcctgcttagcttggaataagacttaggagaaaatggtgcttcactaacccgcttccggtccagtcacaatcatcatgtcactgtggggacccagatctgtgtcttgaagcagctgccctcattccgacttcagaaaatcgaagcagctggctcctccccttgttctctctcccaccctcccccaaatctgttttcatgtaaaagacaaataaatgatgacttcccccaaa

SEQ ID NO: 374300 - DNA, 6212 bp, Homo sapiens
atccgcccgccttggcctcccagagtgctgggattacaggcgtgagccaccacgcctggccttggtttgtattcttaccagtagtctgggtcataaatataagaggaaaaagatcaaatacgtggctaaattgcctgttagcactcagtaaaatttctttctaagggtagtccagtctgttccctgaccttgctctgtgaagttaccagtgttttcagcacaggaaaatctgccttaagcatggcagacccgccaggaaaatgaaggtgaactaaccctctaattttcctgctatttctttactgtcatgtcactcatgacttagactgctccttagacctgttgaataactccatagtttcccaacattaagcatccaccatcatggcaccagtcggagctgctgcctttcatccctgtggattaaccccactaattcgtgcatgcttttgctgtgccccctctgtgcaggacacgcataactaaggaggccggcagtgtatctctgcgtatgaagcaggtggaagaactgtgagtaggctgagagtcttgcagagcaccaatgtccactgctaccctatccattctccctctgccgcttctcttgaaggcctttgtccatccagaaagatgaggtggtgggaggaactgcctgtccgtgcagcagctttggctcacaagggaagaggtcgcggtgcagctgtgtcggtcgatgactgcttatctcattggttgcttccatgtgcagctgtgtgttcagagtggtgttggttctccctcctgttggtttttgtggtggaccagccactatcagcagcaaacctgaaggcctgttctatagttttccttagtaggaaggaaatcatatgcttctcttaaagtgctctgattcttggtaactcattgcttttttattttactttgggacacttagatttgatgatgattctagttttttttaatttttagttttttattgtttgttgttttcgtgttcaaagataatatttcagccttttgtattttagttcccgagggttagaatattctttgattcttaagaaatctttcaagtaacagaatggcacagatactcagtactgtgcctgattttccttctgaacttgccaaaactttctgagagctgaatgtatcattttagaaatgtcctactaatatggagataaaacatcctatatgaggatattttaaagctcagtgtaccctcccccacctcaccccagcctgggggctcttcagagaattataaaagacagaaaaaccctctgtatacattctgcccagcaagttcatctcgtctctccactgtagttgcatgagccctgtgttactgtgctaagcgcttggtttcagtcccttgtggttgtgttgttctaagtgcagaatcggcctggggataagtgtgcctggctgttctagccacctggttgtgaacagtacagtgtgcgcatatctctcaggctgtggcgtgggtacttgggatcctcgtcttcatctgataactctgttactagggcatcatcattacaaactcgtagcctggaatccacatcttggagacacctcgtggtttgcctttatgttagcatctacagctaactgccttccttgtccctcttgtcaccctcttgaattccatcagatatcattctctgctggaactgggtgagaagcgtaaaggcatgttggagaagagttgcaagaagtttatgttgttccgtgaagcgaatgaactacagcaatggatcaatgagaaggaagccgctctgacaagtgaggaggtcggagcagacttggagcaggttgaggtgctccagaagaagtttgatgacttccagaaggacctgaaggccaatgagtcacggttgaaggacattaacaaggtagctgaagacctggagtctgaaggtcttatggcagaggaggtgcaggctgtgcaacaacaggaagtgtatggcatgatgcccagggatgaaactgattccaagacagcctccccgtggaagtctgctcgtctgatggttcacaccgtggccacctttaattccatcaaggagctgaatgagcgctggcggtccctacagcagctggccgaggaacggagccagctcttgggcagcgcccatgaagtacagaggttccacagagatgctgatgaaaccaaagaatggattgaagagaagaatcaagctctaaacacagacaattatggacatgatctcgccagtgtccaggccctgcaacgcaagcatgagggcttcgagagggaccttgcggctctcggtgacaaggtaaactcccttggtgaaacagcagagcgcctgatccagtcccatcccgagtcagcagaagacctgcaggaaaagtgcacagagttaaaccaggcctggagcagcctggggaaacgtgcagatcagcgcaaggcaaagttgggtgactcccacgacctgcagcgcttccttagcgatttccgggacctcatgtcttggatcaatggaatacgggggttggtgtcctcagatgagctagccaaggatgtcaccggagctgaggcattgctggagcgacaccaggaacaccggacagaaatcgatgccagggctggcactttccaggcatttgagcagtttggacagcagctgttggctcacggacactatgccagccctgagatcaagcagaaacttgatattcttgaccaggagcgtgcagacctggagaaggcctgggttcagcgcaggatgatgctggatcagtgccttgaactgcagctgttccatcgggactgtgagcaagctgagaactggatggctgcccgggaggccttcttgaataccgaagacaaaggagactcactggacagcgtagaggctctgatcaaaaaacatgaagactttgacaaagcgattaacgtccaggaagagaagattgctgctctgcaggcctttgccgaccagctcatcgctgccggccattatgccaagggagacatttctagccggcgcaatgaggtcttggacaggtggcgacgtctgaaagcccagatgattgagaaaaggtcaaagctaggagaatctcaaaccctccaacagttcagccgggatgtggatgagattgaggcttggatcagtgaaaaattgcaaacagcgagtgatgagtcgtacaaggatcccaccaacatccaggctttccaagctgctggagcaagcaccagaagcaccaggcttttgaagcagagctgcatgccaacgctgaccggatccgtggggttatcgacatgggcaactccctcattgaacgtggagcctgtgccggcagtgaggatgctgtcaaggcccgcctggctgccttagctgaccagtggcagttcttggtgcaaaagtcagcggaaaagagccagaaactgaaagaagccaacaagcagcagaacttcaacacagggatcaaggactttgacttctggctgtctgaggtggaggccctgctggcatccgaagattatggcaaagacctggcttctgtgaacaacctgctgaaaaagcatcaactgctggaagcagatatatctgcccatgaggatcgcctgaaggacctgaacagccaggcagacagcctgatgaccagcagtgccttcgacacctcccaagtaaaggacaagagggacaccatcaacgggcgcttccagaagatcaagagcatggcggcctcccggcgagccaagctgaatgaatcccatcgcctgcaccagttcttccgggacatggatgacgaggagtcctggatcaaggagaagaagctgctggtgggctcagaggactacggccgggacctaactggcgtgcagaacctgaggaagaagcacaagcggctggaagcagaactggctgcgcatgagccggctattcagggtgtcctggacactggcaagaagctgtccgatgacaacaccatcgggaaagaggagatccagcagcggctggcgcagtttgtggagcactggaaagagctgaagcagctggcagctgcccggggtcagcggctggaagagtccttggaatatcagcagtttgtagccaatgtggaagaggaagaagcctggatcaatgagaaaatgaccctggtggccagcgaagattatggcgacactcttgccgccatccagggcttactgaagaaacatgaagcttttgagacagacttcaccgtccacaaggatcgcgtgaatgatgtctgcaccaatggacaagacctcattaagaagaacaatcaccatgaggagaacatctcttcaaagatgaagggcctgaacgggaaagtgtcagacctggagaaagctgcagcccagagaaaggcgaagctggatgagaactcggccttccttcagttcaactggaaggcggacgtggtggagtcctggatcggtgaaaaggagaacagcttgaagacagatgattatggccgagacctgtcttctgtgcagacgctcctcaccaaacaggaaacttttgacgctgggctgcaggccttccagcaggaaggcattgccaacatcactgccctcaaagatcagcttctcgccgccaaacacgttcagtccaaggccatcgaggcccggcacgcctccctcatgaagaggtggagccagcttctggccaactcagccgcccgcaagaagaagcttctggaggctcagagtcacttccgcaaggtggaggacctcttcctgaccttcgccaaaaaggcttctgccttcaacagctggtttgaaaatgcagaggaggacttaacagaccccgtgcgctgcaactccttggaagaaatcaaagctttgcgcgaggcccacgacgccttccgctcctccctcagctctgcccaggctgacttcaaccagctggccgagctggaccgccagatcaagagcttccgcgtagcctccaacccctacacctggtttaccatggaggccctggaggagacctggaggaacctacagaaaatcatcaaggagagggagctggagctgcagaaggaacagcggcggcaggaggagaacgacaagctgcgccaggagtttgcccagcacgccaacgccttccaccagtggatccaagagaccaggacatacctcctcgatgggtcctgtatggtggaagagtcggggaccctcgaatcccagcttgaagctaccaaacgcaagcaccaggaaatccgagccatgagaagtcagctcaaaaagatcgaggacctgggggccgccatggaggaggccctcatcctggacaacaagtacacggagcacagcaccgtgggcctcgcccagcagtgggaccagctggaccagctgggcatgcgcatgcagcacaacctggagcagcagatccaggccaggaacacaacaggtgtgactgaggaggccctcaaagaattcagcatgatgtttaaacactttgacaaggacaagtctggcaggctgaaccatcaggagttcaaatcttgcctgcgctccctgggctatgacctgcccatggtggaggaaggggaacctgaccctgagttcgaggcaatcctggacacggtggatccgaacagagatggccatgtctccttgcaagaatacatggctttcatgatcagccgcgaaactgagaacgtcaagtccagcgaggagattgagagcgccttccgggccctcagctcagagggaaagccttacgtgaccaaggaggagctctaccagaacctgacccgggaacaagccgactactgcgtctcccacatgaagccctacgtggacggcaagggccgcgagctccccaccgcgttcgactacgtggagttcacccgctcgcttttcgtgaactgagccactccctgggtcacccacccctcgctgcttgccctgcgtcgccttgctgcatgtccgctcctctgtgtgctctcactttccactgtaaccttaagcctgcttagcttggaataagacttaggagaaaatggtgcttcactaacccgcttccggtccagtcacaatcatcatgtcactgtggggacccagatctgtgtcttgaagcagctgccctcattccgacttcagaaaatcgaagcagctggctcctccccttgttctctctcccaccctcccccaaatctgttttcatgtaaaagacaaataaatgatgacttcccccaaa

SEQ ID NO: 374301 - DNA, 7822 bp, Homo sapiens
cgccactacccgctgcggagtgaacggtgtggagcggaggccgcggaggctcctcggtccttcagcacccctcggcccgacgcacccacgcccctcaccccccgagagccgaaaatggacccaagtggggtcaaagtgctggaaacagcagaggacatccaggagaggcggcagcaggtcctagaccgataccaccgcttcaaggaactctcaacccttaggcgtcagaagctggaagattcctatcgattccagttctttcaaagagatgctgaagagctggagaaatggatacaggaaaaacttcagattgcatctgatgagaattataaagacccaaccaacttgcagggaaagcttcagaagcatcaagcatttgaagctgaagtgcaggccaactcaggagccattgttaagctggatgaaactggaaacctgatgatctcagaagggcattttgcatctgaaaccatacggacccgtttgatggagctgcaccgccagtgggaattacttttggagaagatgcgagaaaaaggaatcaaactgctgcaggcccagaagttggtgcagtacttacgagaatgtgaggacgtgatggactggatcaatgacaaggaagcaattgttacttctgaagagctgggccaggatctggagcatgtagaggttttacagaagaaatttgaagagtttcaaacagatatggctgctcatgaagaaagagttaatgaagtgaaccagtttgctgccaaactcatacaggagcagcaccctgaggaggaactgatcaagactaagcaggatgaagtcaatgcagcctggcagcggctgaagggcctggctctgcagaggcaggggaagctctttggggcagcagaagttcagcgctttaacagggatgtggatgagactatcagttggattaaggaaaaggagcagttaatggcctctgatgattttggccgagacctggcaagtgttcaggctctgcttcggaagcacgagggtctggagagagatcttgctgctctagaagacaaggtcaaagccctgtgtgctgaggctgaccgcctgcaacagtcccaccctctgagtgcaacacagattcaagtgaagcgagaggaactgattacaaactgggagcagatccgcaccttggcggcagagagacatgcacggctcaatgattcatacaggcttcaacgcttccttgctgacttccgtgacctcaccagctgggtgactgagatgaaagccctcatcaatgcagatgagcttgccagtgatgtggctggggctgaagccctgctagatagacaccaagagcacaagggtgaaattgatgcccatgaagacagcttcaaatctgcagatgaatctggacaggcactgcttgctgctggtcactatgcctcagatgaagtgagggagaagctgaccgtcctttccgaggagagagcggcgctgctggagctgtgggagctgcgcaggcagcagtacgagcagtgcatggacctgcagctcttctaccgggacactgagcaggtggacaactggatgagcaagcaggaggcgttcctgttgaatgaagacttgggagattccttggatagtgtggaagcgcttcttaagaagcacgaagactttgagaaatcccttagtgcccaggaggaaaagattacagcattagatgaatttgcaaccaagctaattcagaacaaccactatgcaatggaagatgtggccactcgccgagatgctctgttgagccgccgcaatgcccttcacgagagagccatgcgtcgccgggcccagctagccgattctttccatctgcagcagtttttccgtgattctgatgagctcaagagttgggtcaatgagaagatgaaaactgccacagatgaagcttataaagatccatccaacctacaaggaaaagtacagaagcatcaggcttttgaggctgagctctcagcaaaccagagccgaattgatgccttggagaaagctggccaaaagctgattgatgtcaaccactatgccaaggatgaagtggcagctcgtatgaatgaggtgatcagtttgtggaagaaactgctagaggccactgaactgaaaggaataaagcttcgtgaagccaaccagcaacagcaatttaatcgcaatgttgaggatattgaattgtggctatatgaagtagaaggtcacttggcttcggatgattacggcaaagatcttaccaatgtgcagaacctccagaagaaacatgccctgctagaggcagatgtggctgctcaccaggaccgaattgatggcatcaccattcaggcccgccagttccaagatgctggccattttgatgcagaaaacatcaagaagaaacaggaagccctcgtggctcgctatgaggcactcaaggagcccatggttgcccggaagcagaagctggccgattctctgcggttgcagcagctcttccgggatgttgaggatgaggagacgtggattcgagagaaagagcccattgccgcatctaccaacagaggtaaggatttaattggggtccagaatctgctaaagaaacatcaagccttacaagcagaaattgctggacatgaaccacgcatcaaagcagttacacagaaggggaatgccatggtggaggaaggccattttgctgcagaggatgtgaaggccaagcttcacgagctgaaccaaaagtgggaggcactgaaagccaaagcttcccagcgtcggcaggacctggaggactctctgcaggcccagcagtactttgctgatgctaacgaggctgaatcctggatgcgggagaaggaacccattgtgggcagcactgactatggcaaggacgaagactctgctgaggctctactgaagaaacacgaagctttgatgtcagatctcagtgcctacggcagcagcatccaggctttgcgagaacaagcacagtcctgccggcaacaagtggcccccacggatgatgagactgggaaggagctggtcttggctctctacgactatcaggagaagagtccccgagaggtcaccatgaagaagggagatatccttaccttactcaacagcaccaacaaggattggtggaaagtggaagtgaacgatcgtcagggttttgtgccggctgcgtacgtgaagaaattggaccccgcccagtcagcctcccgggagaatctcctggaggagcaaggcagcatagcactgcggcaggagcagattgacaatcagacacgcataactaaggaggccggcagtgtatctctgcgtatgaagcaggtggaagaactatatcattctctgctggaactgggtgagaagcgtaaaggcatgttggagaagagttgcaagaagtttatgttgttccgtgaagcgaatgaactacagcaatggatcaatgagaaggaagccgctctgacaagtgaggaggtcggagcagacttggagcaggttgaggtgctccagaagaagtttgatgacttccagaaggacctgaaggccaatgagtcacggttgaaggacattaacaaggtagctgaagacctggagtctgaaggtcttatggcagaggaggtgcaggctgtgcaacaacaggaagtgtatggcatgatgcccagggatgaaactgattccaagacagcctccccgtggaagtctgctcgtctgatggttcacaccgtggccacctttaattccatcaaggagctgaatgagcgctggcggtccctacagcagctggccgaggaacggagccagctcttgggcagcgcccatgaagtacagaggttccacagagatgctgatgaaaccaaagaatggattgaagagaagaatcaagctctaaacacagacaattatggacatgatctcgccagtgtccaggccctgcaacgcaagcatgagggcttcgagagggaccttgcggctctcggtgacaaggtaaactcccttggtgaaacagcagagcgcctgatccagtcccatcccgagtcagcagaagacctgcaggaaaagtgcacagagttaaaccaggcctggagcagcctggggaaacgtgcagatcagcgcaaggcaaagttgggtgactcccacgacctgcagcgcttccttagcgatttccgggacctcatgtcttggatcaatggaatacgggggttggtgtcctcagatgagctagccaaggatgtcaccggagctgaggcattgctggagcgacaccaggaacaccggacagaaatcgatgccagggctggcactttccaggcatttgagcagtttggacagcagctgttggctcacggacactatgccagccctgagatcaagcagaaacttgatattcttgaccaggagcgtgcagacctggagaaggcctgggttcagcgcaggatgatgctggatcagtgccttgaactgcagctgttccatcgggactgtgagcaagctgagaactggatggctgcccgggaggccttcttgaataccgaagacaaaggagactcactggacagcgtagaggctctgatcaaaaaacatgaagactttgacaaagcgattaacgtccaggaagagaagattgctgctctgcaggcctttgccgaccagctcatcgctgccggccattatgccaagggagacatttctagccggcgcaatgaggtcttggacaggtggcgacgtctgaaagcccagatgattgagaaaaggtcaaagctaggagaatctcaaaccctccaacagttcagccgggatgtggatgagattgaggcttggatcagtgaaaaattgcaaacagcgagtgatgagtcgtacaaggatcccaccaacatccaggctttccaagctgctggagcaagcaccagaagcaccaggcttttgaagcagagctgcatgccaacgctgaccggatccgtggggttatcgacatgggcaactccctcattgaacgtggagcctgtgccggcagtgaggatgctgtcaaggcccgcctggctgccttagctgaccagtggcagttcttggtgcaaaagtcagcggaaaagagccagaaactgaaagaagccaacaagcagcagaacttcaacacagggatcaaggactttgacttctggctgtctgaggtggaggccctgctggcatccgaagattatggcaaagacctggcttctgtgaacaacctgctgaaaaagcatcaactgctggaagcagatatatctgcccatgaggatcgcctgaaggacctgaacagccaggcagacagcctgatgaccagcagtgccttcgacacctcccaagtaaaggacaagagggacaccatcaacgggcgcttccagaagatcaagagcatggcggcctcccggcgagccaagctgaatgaatcccatcgcctgcaccagttcttccgggacatggatgacgaggagtcctggatcaaggagaagaagctgctggtgggctcagaggactacggccgggacctaactggcgtgcagaacctgaggaagaagcacaagcggctggaagcagaactggctgcgcatgagccggctattcagggtgtcctggacactggcaagaagctgtccgatgacaacaccatcgggaaagaggagatccagcagcggctggcgcagtttgtggagcactggaaagagctgaagcagctggcagctgcccggggtcagcggctggaagagtccttggaatatcagcagtttgtagccaatgtggaagaggaagaagcctggatcaatgagaaaatgaccctggtggccagcgaagattatggcgacactcttgccgccatccagggcttactgaagaaacatgaagcttttgagacagacttcaccgtccacaaggatcgcgtgaatgatgtctgcaccaatggacaagacctcattaagaagaacaatcaccatgaggagaacatctcttcaaagatgaagggcctgaacgggaaagtgtcagacctggagaaagctgcagcccagagaaaggcgaagctggatgagaactcggccttccttcagttcaactggaaggcggacgtggtggagtcctggatcggtgaaaaggagaacagcttgaagacagatgattatggccgagacctgtcttctgtgcagacgctcctcaccaaacaggaaacttttgacgctgggctgcaggccttccagcaggaaggcattgccaacatcactgccctcaaagatcagcttctcgccgccaaacacgttcagtccaaggccatcgaggcccggcacgcctccctcatgaagaggtggagccagcttctggccaactcagccgcccgcaagaagaagcttctggaggctcagagtcacttccgcaaggtggaggacctcttcctgaccttcgccaaaaaggcttctgccttcaacagctggtttgaaaatgcagaggaggacttaacagaccccgtgcgctgcaactccttggaagaaatcaaagctttgcgcgaggcccacgacgccttccgctcctccctcagctctgcccaggctgacttcaaccagctggccgagctggaccgccagatcaagagcttccgcgtagcctccaacccctacacctggtttaccatggaggccctggaggagacctggaggaacctacagaaaatcatcaaggagagggagctggagctgcagaaggaacagcggcggcaggaggagaacgacaagctgcgccaggagtttgcccagcacgccaacgccttccaccagtggatccaagagaccaggacatacctcctcgatgggtcctgtatggtggaagagtcggggaccctcgaatcccagcttgaagctaccaaacgcaagcaccaggaaatccgagccatgagaagtcagctcaaaaagatcgaggacctgggggccgccatggaggaggccctcatcctggacaacaagtacacggagcacagcaccgtgggcctcgcccagcagtgggaccagctggaccagctgggcatgcgcatgcagcacaacctggagcagcagatccaggccaggaacacaacaggtgtgactgaggaggccctcaaagaattcagcatgatgtttaaacactttgacaaggacaagtctggcaggctgaaccatcaggagttcaaatcttgcctgcgctccctgggctatgacctgcccatggtggaggaaggggaacctgaccctgagttcgaggcaatcctggacacggtggatccgaacagagatggccatgtctccttgcaagaatacatggctttcatgatcagccgcgaaactgagaacgtcaagtccagcgaggagattgagagcgccttccgggccctcagctcagagggaaagccttacgtgaccaaggaggagctctaccagaacctgacccgggaacaagccgactactgcgtctcccacatgaagccctacgtggacggcaagggccgcgagctccccaccgcgttcgactacgtggagttcacccgctcgcttttcgtgaactgagccactccctgggtcacccacccctcgctgcttgccctgcgtcgccttgctgcatgtccgctcctctgtgtgctctcactttccactgtaaccttaagcctgcttagcttggaataagacttaggagaaaatggtgcttcactaacccgcttccggtccagtcacaatcatcatgtcactgtggggacccagatctgtgtcttgttctctctcccaccctcccccaaatctgttttcatgtaaaagacaaataaatgatgacttcccccaaa

SEQ ID NO: 374302 - DNA, 3989 bp, Homo sapiens
tctcttgggacgcaggttgttggtgtgaccacacttcttcttgcggcagttgacagcacgagggtgaaggcgagcatagcacttgcggcaggagcagattgacaatcagacacgcataactaaggaggccggcagtgtatctctgcgtatgaagcaggtggaagaactatatcattctctgctggaactgggtgagaagcgtaaaggcatgttggagaagagttgcaagaagtttatgttgttccgtgaagcgaatgaactacagcaatggggacctcatgtcttggatcaatggaatacgggggttggtgtcctcagatgagctagccaaggatgtcaccggagctgaggcattgctggagcgacaccaggaacaccggacagaaatcgatgccagggctggcactttccaggcatttgagcagtttggacagcagctgttggctcacggacactatgccagccctgagatcaagcagaaacttgatattcttgaccaggagcgtgcagacctggagaaggcctgggttcagcgcaggatgatgctggatcagtgccttgaactgcagctgttccatcgggactgtgagcaagctgagaactggatggctgcccgggaggccttcttgaataccgaagacaaaggagactcactggacagcgtagaggctctgatcaaaaaacatgaagactttgacaaagcgattaacgtccaggaagagaagattgctgctctgcaggcctttgccgaccagctcatcgctgccggccattatgccaagggagacatttctagccggcgcaatgaggtcttggacaggtggcgacgtctgaaagcccagatgattgagaaaaggtcaaagctaggagaatctcaaaccctccaacagttcagccgggatgtggatgagattgaggcttggatcagtgaaaaattgcaaacagcgagtgatgagtcgtacaaggatcccaccaacatccaggctttccaagctgctggagcaagcaccagaagcaccaggcttttgaagcagagctgcatgccaacgctgaccggatccgtggggttatcgacatgggcaactccctcattgaacgtggagcctgtgccggcagtgaggatgctgtcaaggcccgcctggctgccttagctgaccagtggcagttcttggtgcaaaagtcagcggaaaagagccagaaactgaaagaagccaacaagcagcagaacttcaacacagggatcaaggactttgacttctggctgtctgaggtggaggccctgctggcatccgaagattatggcaaagacctggcttctgtgaacaacctgctgaaaaagcatcaactgctggaagcagatatatctgcccatgaggatcgcctgaaggacctgaacagccaggcagacagcctgatgaccagcagtgccttcgacacctcccaagtaaaggacaagagggacaccatcaacgggcgcttccagaagatcaagagcatggcggcctcccggcgagccaagctgaatgaatcccatcgcctgcaccagttcttccgggacatggatgacgaggagtcctggatcaaggagaagaagctgctggtgggctcagaggactacggccgggacctaactggcgtgcagaacctgaggaagaagcacaagcggctggaagcagaactggctgcgcatgagccggctattcagggtgtcctggacactggcaagaagctgtccgatgacaacaccatcgggaaagaggagatccagcagcggctggcgcagtttgtggagcactggaaagagctgaagcagctggcagctgcccggggtcagcggctggaagagtccttggaatatcagcagtttgtagccaatgtggaagaggaagaagcctggatcaatgagaaaatgaccctggtggccagcgaagattatggcgacactcttgccgccatccagggcttactgaagaaacatgaagcttttgagacagacttcaccgtccacaaggatcgcgtgaatgatgtctgcaccaatggacaagacctcattaagaagaacaatcaccatgaggagaacatctcttcaaagatgaagggcctgaacgggaaagtgtcagacctggagaaagctgcagcccagagaaaggcgaagctggatgagaactcggccttccttcagttcaactggaaggcggacgtggtggagtcctggatcggtgaaaaggagaacagcttgaagacagatgattatggccgagacctgtcttctgtgcagacgctcctcaccaaacaggaaacttttgacgctgggctgcaggccttccagcaggaaggcattgccaacatcactgccctcaaagatcagcttctcgccgccaaacacgttcagtccaaggccatcgaggcccggcacgcctccctcatgaagaggtggagccagcttctggccaactcagccgcccgcaagaagaagcttctggaggctcagagtcacttccgcaaggtggaggacctcttcctgaccttcgccaaaaaggcttctgccttcaacagctggtttgaaaatgcagaggaggacttaacagaccccgtgcgctgcaactccttggaagaaatcaaagctttgcgcgaggcccacgacgccttccgctcctccctcagctctgcccaggctgacttcaaccagctggccgagctggaccgccagatcaagagcttccgcgtagcctccaacccctacacctggtttaccatggaggccctggaggagacctggaggaacctacagaaaatcatcaaggagagggagctggagctgcagaaggaacagcggcggcaggaggagaacgacaagctgcgccaggagtttgcccagcacgccaacgccttccaccagtggatccaagagaccaggacatacctcctcgatgggtcctgtatggtggaagagtcggggaccctcgaatcccagcttgaagctaccaaacgcaagcaccaggaaatccgagccatgagaagtcagctcaaaaagatcgaggacctgggggccgccatggaggaggccctcatcctggacaacaagtacacggagcacagcaccgtgggcctcgcccagcagtgggaccagctggaccagctgggcatgcgcatgcagcacaacctggagcagcagatccaggccaggaacacaacaggtgtgactgaggaggccctcaaagaattcagcatgatgtttaaacactttgacaaggacaagtctggcaggctgaaccatcaggagttcaaatcttgcctgcgctccctgggctatgacctgcccatggtggaggaaggggaacctgaccctgagttcgaggcaatcctggacacggtggatccgaacagagatggccatgtctccttgcaagaatacatggctttcatgatcagccgcgaaactgagaacgtcaagtccagcgaggagattgagagcgccttccgggccctcagctcagagggaaagccttacgtgaccaaggaggagctctaccagaacctgacccgggaacaagccgactactgcgtctcccacatgaagccctacgtggacggcaagggccgcgagctccccaccgcgttcgactacgtggagttcacccgctcgcttttcgtgaactgagccactccctgggtcacccacccctcgctgcttgccctgcgtcgccttgctgcatgtccgctcctctgtgtgctctcactttccactgtaaccttaagcctgcttagcttggaataagacttaggagaaaatggtgcttcactaacccgcttccggtccagtcacaatcatcatgtcactgtggggacccagatctgtgtcttgaagcagctgccctcattccgacttcagaaaatcgaagcagctggctcctccccttgttctctctcccaccctcccccaaatctgttttcatgtaaaagacaaataaatgatgacttcccccaaa

SEQ ID NO: 374303 - DNA, 7950 bp, Homo sapiens
cgccactacccgctgcggagtgaacggtgtggagcggaggccgcggaggctcctcggtccttcagcacccctcggcccgacgcacccacgcccctcaccccccgagagccgaaaatggacccaagtggggtcaaagtgctggaaacagcagaggacatccaggagaggcggcagcaggtcctagaccgataccaccgcttcaaggaactctcaacccttaggcgtcagaagctggaagattcctatcgattccagttctttcaaagagatgctgaagagctggagaaatggatacaggaaaaacttcagattgcatctgatgagaattataaagacccaaccaacttgcagggaaagcttcagaagcatcaagcatttgaagctgaagtgcaggccaactcaggagccattgttaagctggatgaaactggaaacctgatgatctcagaagggcattttgcatctgaaaccatacggacccgtttgatggagctgcaccgccagtgggaattacttttggagaagatgcgagaaaaaggaatcaaactgctgcaggcccagaagttggtgcagtacttacgagaatgtgaggacgtgatggactggatcaatgacaaggaagcaattgttacttctgaagagctgggccaggatctggagcatgtagaggttttacagaagaaatttgaagagtttcaaacagatatggctgctcatgaagaaagagttaatgaagtgaaccagtttgctgccaaactcatacaggagcagcaccctgaggaggaactgatcaagactaagcaggatgaagtcaatgcagcctggcagcggctgaagggcctggctctgcagaggcaggggaagctctttggggcagcagaagttcagcgctttaacagggatgtggatgagactatcagttggattaaggaaaaggagcagttaatggcctctgatgattttggccgagacctggcaagtgttcaggctctgcttcggaagcacgagggtctggagagagatcttgctgctctagaagacaaggtcaaagccctgtgtgctgaggctgaccgcctgcaacagtcccaccctctgagtgcaacacagattcaagtgaagcgagaggaactgattacaaactgggagcagatccgcaccttggcggcagagagacatgcacggctcaatgattcatacaggcttcaacgcttccttgctgacttccgtgacctcaccagctgggtgactgagatgaaagccctcatcaatgcagatgagcttgccagtgatgtggctggggctgaagccctgctagatagacaccaagagcacaagggtgaaattgatgcccatgaagacagcttcaaatctgcagatgaatctggacaggcactgcttgctgctggtcactatgcctcagatgaagtgagggagaagctgaccgtcctttccgaggagagagcggcgctgctggagctgtgggagctgcgcaggcagcagtacgagcagtgcatggacctgcagctcttctaccgggacactgagcaggtggacaactggatgagcaagcaggaggcgttcctgttgaatgaagacttgggagattccttggatagtgtggaagcgcttcttaagaagcacgaagactttgagaaatcccttagtgcccaggaggaaaagattacagcattagatgaatttgcaaccaagctaattcagaacaaccactatgcaatggaagatgtggccactcgccgagatgctctgttgagccgccgcaatgcccttcacgagagagccatgcgtcgccgggcccagctagccgattctttccatctgcagcagtttttccgtgattctgatgagctcaagagttgggtcaatgagaagatgaaaactgccacagatgaagcttataaagatccatccaacctacaaggaaaagtacagaagcatcaggcttttgaggctgagctctcagcaaaccagagccgaattgatgccttggagaaagctggccaaaagctgattgatgtcaaccactatgccaaggatgaagtggcagctcgtatgaatgaggtgatcagtttgtggaagaaactgctagaggccactgaactgaaaggaataaagcttcgtgaagccaaccagcaacagcaatttaatcgcaatgttgaggatattgaattgtggctatatgaagtagaaggtcacttggcttcggatgattacggcaaagatcttaccaatgtgcagaacctccagaagaaacatgccctgctagaggcagatgtggctgctcaccaggaccgaattgatggcatcaccattcaggcccgccagttccaagatgctggccattttgatgcagaaaacatcaagaagaaacaggaagccctcgtggctcgctatgaggcactcaaggagcccatggttgcccggaagcagaagctggccgattctctgcggttgcagcagctcttccgggatgttgaggatgaggagacgtggattcgagagaaagagcccattgccgcatctaccaacagaggtaaggatttaattggggtccagaatctgctaaagaaacatcaagccttacaagcagaaattgctggacatgaaccacgcatcaaagcagttacacagaaggggaatgccatggtggaggaaggccattttgctgcagaggatgtgaaggccaagcttcacgagctgaaccaaaagtgggaggcactgaaagccaaagcttcccagcgtcggcaggacctggaggactctctgcaggcccagcagtactttgctgatgctaacgaggctgaatcctggatgcgggagaaggaacccattgtgggcagcactgactatggcaaggacgaagactctgctgaggctctactgaagaaacacgaagctttgatgtcagatctcagtgcctacggcagcagcatccaggctttgcgagaacaagcacagtcctgccggcaacaagtggcccccacggatgatgagactgggaaggagctggtcttggctctctacgactatcaggagaagagtccccgagaggtcaccatgaagaagggagatatccttaccttactcaacagcaccaacaaggattggtggaaagtggaagtgaacgatcgtcagggttttgtgccggctgcgtacgtgaagaaattggaccccgcccagtcagcctcccgggagaatctcctggaggagcaaggcagcatagcactgcggcaggagcagattgacaatcagacacgcataactaaggaggccggcagtgtatctctgcgtatgaagcaggtggaagaactatatcattctctgctggaactgggtgagaagcgtaaaggcatgttggagaagagttgcaagaagtttatgttgttccgtgaagcgaatgaactacagcaatggatcaatgagaaggaagccgctctgacaagtgaggaggtcggagcagacttggagcaggttgaggtgctccagaagaagtttgatgacttccagaaggacctgaaggccaatgagtcacggttgaaggacattaacaaggtagctgaagacctggagtctgaaggtcttatggcagaggaggtgcaggctgtgcaacaacaggaagtgtatggcatgatgcccagggatgaaactgattccaagacagcctccccgtggaagtctgctcgtctgatggttcacaccgtggccacctttaattccatcaaggagctgaatgagcgctggcggtccctacagcagctggccgaggaacggagccagctcttgggcagcgcccatgaagtacagaggttccacagagatgctgatgaaaccaaagaatggattgaagagaagaatcaagctctaaacacagacaattatggacatgatctcgccagtgtccaggccctgcaacgcaagcatgagggcttcgagagggaccttgcggctctcggtgacaaggtaaactcccttggtgaaacagcagagcgcctgatccagtcccatcccgagtcagcagaagacctgcaggaaaagtgcacagagttaaaccaggcctggagcagcctggggaaacgtgcagatcagcgcaaggcaaagttgggtgactcccacgacctgcagcgcttccttagcgatttccgggacctcatgtcttggatcaatggaatacgggggttggtgtcctcagatgagctagccaaggatgtcaccggagctgaggcattgctggagcgacaccaggaacaccggacagaaatcgatgccagggctggcactttccaggcatttgagcagtttggacagcagctgttggctcacggacactatgccagccctgagatcaagcagaaacttgatattcttgaccaggagcgtgcagacctggagaaggcctgggttcagcgcaggatgatgctggatcagtgccttgaactgcagctgttccatcgggactgtgagcaagctgagaactggatggctgcccgggaggccttcttgaataccgaagacaaaggagactcactggacagcgtagaggctctgatcaaaaaacatgaagactttgacaaagcgattaacgtccaggaagagaagattgctgctctgcaggcctttgccgaccagctcatcgctgccggccattatgccaagggagacatttctagccggcgcaatgaggtcttggacaggtggcgacgtctgaaagcccagatgattgagaaaaggtcaaagctaggagaatctcaaaccctccaacagttcagccgggatgtggatgagattgaggcttggatcagtgaaaaattgcaaacagcgagtgatgagtcgtacaaggatcccaccaacatccagagcaagcaccagaagcaccaggcttttgaagcagagctgcatgccaacgctgaccggatccgtggggttatcgacatgggcaactccctcattgaacgtggagcctgtgccggcagtgaggatgctgtcaaggcccgcctggctgccttagctgaccagtggcagttcttggtgcaaaagtcagcggaaaagagccagaaactgaaagaagccaacaagcagcagaacttcaacacagggatcaaggactttgacttctggctgtctgaggtggaggccctgctggcatccgaagattatggcaaagacctggcttctgtgaacaacctgctgaaaaagcatcaactgctggaagcagatatatctgcccatgaggatcgcctgaaggacctgaacagccaggcagacagcctgatgaccagcagtgccttcgacacctcccaagtaaaggacaagagggacaccatcaacgggcgcttccagaagatcaagagcatggcggcctcccggcgagccaagctgaatgaatcccatcgcctgcaccagttcttccgggacatggatgacgaggagtcctggatcaaggagaagaagctgctggtgggctcagaggactacggccgggacctaactggcgtgcagaacctgaggaagaagcacaagcggctggaagcagaactggctgcgcatgagccggctattcagggtgtcctggacactggcaagaagctgtccgatgacaacaccatcgggaaagaggagatccagcagcggctggcgcagtttgtggagcactggaaagagctgaagcagctggcagctgcccggggtcagcggctggaagagtccttggaatatcagcagtttgtagccaatgtggaagaggaagaagcctggatcaatgagaaaatgaccctggtggccagcgaagattatggcgacactcttgccgccatccagggcttactgaagaaacatgaagcttttgagacagacttcaccgtccacaaggatcgcgtgaatgatgtctgcaccaatggacaagacctcattaagaagaacaatcaccatgaggagaacatctcttcaaagatgaagggcctgaacgggaaagtgtcagacctggagaaagctgcagcccagagaaaggcgaagctggatgagaactcggccttccttcagttcaactggaaggcggacgtggtggagtcctggatcggtgaaaaggagaacagcttgaagacagatgattatggccgagacctgtcttctgtgcagacgctcctcaccaaacaggaaacttttgacgctgggctgcaggccttccagcaggaaggcattgccaacatcactgccctcaaagatcagcttctcgccgccaaacacgttcagtccaaggccatcgaggcccggcacgcctccctcatgaagaggtggagccagcttctggccaactcagccgcccgcaagaagaagcttctggaggctcagagtcacttccgcaaggtggaggacctcttcctgaccttcgccaaaaaggcttctgccttcaacagctggtttgaaaatgcagaggaggacttaacagaccccgtgcgctgcaactccttggaagaaatcaaagctttgcgcgaggcccacgacgccttccgctcctccctcagctctgcccaggctgacttcaaccagctggccgagctggaccgccagatcaagagcttccgcgtagcctccaacccctacacctggtttaccatggaggccctggaggagacctggaggaacctacagaaaatcatcaaggagagggagctggagctgcagaaggaacagcggcggcaggaggagaacgacaagctgcgccaggagtttgcccagcacgccaacgccttccaccagtggatccaagagaccaggacatacctcctcgatgggtcctgtatggtggaagagtcggggaccctcgaatcccagcttgaagctaccaaacgcaagcaccaggaaatccgagccatgagaagtcagctcaaaaagatcgaggacctgggggccgccatggaggaggccctcatcctggacaacaagtacacggagcacagcaccgtgggcctcgcccagcagtgggaccagctggaccagctgggcatgcgcatgcagcacaacctggagcagcagatccaggccaggaacacaacaggtgtgactgaggaggccctcaaagaattcagcatgatgtttaaacactttgacaaggacaagtctggcaggctgaaccatcaggagttcaaatcttgcctgcgctccctgggctatgacctgcccatggtggaggaaggggaacctgaccctgagttcgaggcaatcctggacacggtggatccgaacaggtaaattaattaaggccaggtgctgtgagcctctgcccggggcacccacctgccctccctgctcaggctcttgcttcccccgctcctagagatggccatgtctccttgcaagaatacatggctttcatgatcagccgcgaaactgagaacgtcaagtccagcgaggagattgagagcgccttccgggccctcagctcagagggaaagccttacgtgaccaaggaggagctctaccagaacctgacccgggaacaagccgactactgcgtctcccacatgaagccctacgtggacggcaagggccgcgagctccccaccgcgttcgactacgtggagttcacccgctcgcttttcgtgaactgagccactccctgggtcacccacccctcgctgcttgccctgcgtcgccttgctgcatgtccgctcctctgtgtgctctcactttccactgtaaccttaagcctgcttagcttggaataagacttaggagaaaatggtgcttcactaacccgcttccggtccagtcacaatcatcatgtcactgtggggacccagatctgtgtcttgaagcagctgccctcattccgacttcagaaaatcgaagcagctggctcctccccttgttctctctcccaccctcccccaaatctgttttcatgtaaaagacaaataaatgatgacttcccccaaa

SEQ ID NO: 374304 - DNA, 8047 bp, Homo sapiens
cgccactacccgctgcggagtgaacggtgtggagcggaggccgcggaggctcctcggtccttcagcacccctcggcccgacgcacccacgcccctcaccccccgagagccgaaaatggacccaagtggggtcaaagtgctggaaacagcagaggacatccaggagaggcggcagcaggtcctagaccgataccaccgcttcaaggaactctcaacccttaggcgtcagaagctggaagattcctatcgattccagttctttcaaagagatgctgaagagctggagaaatggatacaggaaaaacttcagattgcatctgatgagaattataaagacccaaccaacttgcagggaaagcttcagaagcatcaagcatttgaagctgaagtgcaggccaactcaggagccattgttaagctggatgaaactggaaacctgatgatctcagaagggcattttgcatctgaaaccatacggacccgtttgatggagctgcaccgccagtgggaattacttttggagaagatgcgagaaaaaggaatcaaactgctgcaggcccagaagttggtgcagtacttacgagaatgtgaggacgtgatggactggatcaatgacaaggaagcaattgttacttctgaagagctgggccaggatctggagcatgtagaggttttacagaagaaatttgaagagtttcaaacagatatggctgctcatgaagaaagagttaatgaagtgaaccagtttgctgccaaactcatacaggagcagcaccctgaggaggaactgatcaagactaagcaggatgaagtcaatgcagcctggcagcggctgaagggcctggctctgcagaggcaggggaagctctttggggcagcagaagttcagcgctttaacagggatgtggatgagactatcagttggattaaggaaaaggagcagttaatggcctctgatgattttggccgagacctggcaagtgttcaggctctgcttcggaagcacgagggtctggagagagatcttgctgctctagaagacaaggtcaaagccctgtgtgctgaggctgaccgcctgcaacagtcccaccctctgagtgcaacacagattcaagtgaagcgagaggaactgattacaaactgggagcagatccgcaccttggcggcagagagacatgcacggctcaatgattcatacaggcttcaacgcttccttgctgacttccgtgacctcaccagctgggtgactgagatgaaagccctcatcaatgcagatgagcttgccagtgatgtggctggggctgaagccctgctagatagacaccaagagcacaagggtgaaattgatgcccatgaagacagcttcaaatctgcagatgaatctggacaggcactgcttgctgctggtcactatgcctcagatgaagtgagggagaagctgaccgtcctttccgaggagagagcggcgctgctggagctgtgggagctgcgcaggcagcagtacgagcagtgcatggacctgcagctcttctaccgggacactgagcaggtggacaactggatgagcaagcaggaggcgttcctgttgaatgaagacttgggagattccttggatagtgtggaagcgcttcttaagaagcacgaagactttgagaaatcccttagtgcccaggaggaaaagattacagcattagatgaatttgcaaccaagctaattcagaacaaccactatgcaatggaagatgtggccactcgccgagatgctctgttgagccgccgcaatgcccttcacgagagagccatgcgtcgccgggcccagctagccgattctttccatctgcagcagtttttccgtgattctgatgagctcaagagttgggtcaatgagaagatgaaaactgccacagatgaagcttataaagatccatccaacctacaaggaaaagtacagaagcatcaggcttttgaggctgagctctcagcaaaccagagccgaattgatgccttggagaaagctggccaaaagctgattgatgtcaaccactatgccaaggatgaagtggcagctcgtatgaatgaggtgatcagtttgtggaagaaactgctagaggccactgaactgaaaggaataaagcttcgtgaagccaaccagcaacagcaatttaatcgcaatgttgaggatattgaattgtggctatatgaagtagaaggtcacttggcttcggatgattacggcaaagatcttaccaatgtgcagaacctccagaagaaacatgccctgctagaggcagatgtggctgctcaccaggaccgaattgatggcatcaccattcaggcccgccagttccaagatgctggccattttgatgcagaaaacatcaagaagaaacaggaagccctcgtggctcgctatgaggcactcaaggagcccatggttgcccggaagcagaagctggccgattctctgcggttgcagcagctcttccgggatgttgaggatgaggagacgtggattcgagagaaagagcccattgccgcatctaccaacagaggtaaggatttaattggggtccagaatctgctaaagaaacatcaagccttacaagcagaaattgctggacatgaaccacgcatcaaagcagttacacagaaggggaatgccatggtggaggaaggccattttgctgcagaggatgtgaaggccaagcttcacgagctgaaccaaaagtgggaggcactgaaagccaaagcttcccagcgtcggcaggacctggaggactctctgcaggcccagcagtactttgctgatgctaacgaggctgaatcctggatgcgggagaaggaacccattgtgggcagcactgactatggcaaggacgaagactctgctgaggctctactgaagaaacacgaagctttgatgtcagatctcagtgcctacggcagcagcatccaggctttgcgagaacaagcacagtcctgccggcaacaagtggcccccacggatgatgagactgggaaggagctggtcttggctctctacgactatcaggagaagagtccccgagaggtcaccatgaagaagggagatatccttaccttactcaacagcaccaacaaggattggtggaaagtggaagtgaacgatcgtcagggttttgtgccggctgcgtacgtgaagaaattggaccccgcccagtcagcctcccgggagaatctcctggaggagcaaggcagcatagcactgcggcaggagcagattgacaatcagacacgcataactaaggaggccggcagtgtatctctgcgtatgaagcaggtggaagaactatatcattctctgctggaactgggtgagaagcgtaaaggcatgttggagaagagttgcaagaagtttatgttgttccgtgaagcgaatgaactacagcaatggatcaatgagaaggaagccgctctgacaagtgaggaggtcggagcagacttggagcaggttgaggtgctccagaagaagtttgatgacttccagaaggacctgaaggccaatgagtcacggttgaaggacattaacaaggtagctgaagacctggagtctgaaggtcttatggcagaggaggtgcaggctgtgcaacaacaggaagtgtatggcatgatgcccagggatgaaactgattccaagacagcctccccgtggaagtctgctcgtctgatggttcacaccgtggccacctttaattccatcaaggagctgaatgagcgctggcggtccctacagcagctggccgaggaacggagccagctcttgggcagcgcccatgaagtacagaggttccacagagatgctgatgaaaccaaagaatggattgaagagaagaatcaagctctaaacacagacaattatggacatgatctcgccagtgtccaggccctgcaacgcaagcatgagggcttcgagagggaccttgcggctctcggtgacaaggtaaactcccttggtgaaacagcagagcgcctgatccagtcccatcccgagtcagcagaagacctgcaggaaaagtgcacagagttaaaccaggcctggagcagcctggggaaacgtgcagatcagcgcaaggcaaagttgggtgactcccacgacctgcagcgcttccttagcgatttccgggacctcatgtcttggatcaatggaatacgggggttggtgtcctcagatgagctagccaaggatgtcaccggagctgaggcattgctggagcgacaccaggaacaccggacagaaatcgatgccagggctggcactttccaggcatttgagcagtttggacagcagctgttggctcacggacactatgccagccctgagatcaagcagaaacttgatattcttgaccaggagcgtgcagacctggagaaggcctgggttcagcgcaggatgatgctggatcagtgccttgaactgcagctgttccatcgggactgtgagcaagctgagaactggatggctgcccgggaggccttcttgaataccgaagacaaaggagactcactggacagcgtagaggctctgatcaaaaaacatgaagactttgacaaagcgattaacgtccaggaagagaagattgctgctctgcaggcctttgccgaccagctcatcgctgccggccattatgccaagggagacatttctagccggcgcaatgaggtcttggacaggtggcgacgtctgaaagcccagatgattgagaaaaggtcaaagctaggagaatctcaaaccctccaacagttcagccgggatgtggatgagattgaggcttggatcagtgaaaaattgcaaacagcgagtgatgagtcgtacaaggatcccaccaacatccagagcaagcaccagaagcaccaggcttttgaagcagagctgcatgccaacgctgaccggatccgtggggttatcgacatgggcaactccctcattgaacgtggagcctgtgccggcagtgaggatgctgtcaaggcccgcctggctgccttagctgaccagtggcagttcttggtgcaaaagtcagcggaaaagagccagaaactgaaagaagccaacaagcagcagaacttcaacacagggatcaaggactttgacttctggctgtctgaggtggaggccctgctggcatccgaagattatggcaaagacctggcttctgtgaacaacctgctgaaaaagcatcaactgctggaagcagatatatctgcccatgaggatcgcctgaaggacctgaacagccaggcagacagcctgatgaccagcagtgccttcgacacctcccaagtaaaggacaagagggacaccatcaacgggcgcttccagaagatcaagagcatggcggcctcccggcgagccaagctgaatgaatcccatcgcctgcaccagttcttccgggacatggatgacgaggagtcctggatcaaggagaagaagctgctggtgggctcagaggactacggccgggacctaactggcgtgcagaacctgaggaagaagcacaagcggctggaagcagaactggctgcgcatgagccggctattcagggtgtcctggacactggcaagaagctgtccgatgacaacaccatcgggaaagaggagatccagcagcggctggcgcagtttgtggagcactggaaagagctgaagcagctggcagctgcccggggtcagcggctggaagagtccttggaatatcagcagtttgtagccaatgtggaagaggaagaagcctggatcaatgagaaaatgaccctggtggccagcgaagattatggcgacactcttgccgccatccagggcttactgaagaaacatgaagcttttgagacagacttcaccgtccacaaggatcgcgtgaatgatgtctgcaccaatggacaagacctcattaagaagaacaatcaccatgaggagaacatctcttcaaagatgaagggcctgaacgggaaagtgtcagacctggagaaagctgcagcccagagaaaggcgaagctggatgagaactcggccttccttcagttcaactggaaggcggacgtggtggagtcctggatcggtgaaaaggagaacagcttgaagacagatgattatggccgagacctgtcttctgtgcagacgctcctcaccaaacaggaaacttttgacgctgggctgcaggccttccagcaggaaggcattgccaacatcactgccctcaaagatcagcttctcgccgccaaacacgttcagtccaaggccatcgaggcccggcacgcctccctcatgaagaggtggagccagcttctggccaactcagccgcccgcaagaagaagcttctggaggctcagagtcacttccgcaaggtggaggacctcttcctgaccttcgccaaaaaggcttctgccttcaacagctggtttgaaaatgcagaggaggacttaacagaccccgtgcgctgcaactccttggaagaaatcaaagctttgcgcgaggcccacgacgccttccgctcctccctcagctctgcccaggctgacttcaaccagctggccgagctggaccgccagatcaagagcttccgcgtagcctccaacccctacacctggtttaccatggaggccctggaggagacctggaggaacctacagaaaatcatcaaggagagggagctggagctgcagaaggaacagcggcggcaggaggagaacgacaagctgcgccaggagtttgcccagcacgccaacgccttccaccagtggatccaagagaccaggacatacctcctcgatgggtcctgtatggtggaagagtcggggaccctcgaatcccagcttgaagctaccaaacgcaagcaccaggaaatccgagccatgagaagtcagctcaaaaagatcgaggacctgggggccgccatggaggaggccctcatcctggacaacaagtacacggagcacagcaccgtgggcctcgcccagcagtgggaccagctggaccagctgggcatgcgcatgcagcacaacctggagcagcagatccaggccaggaacacaacaggtgtgactgaggaggccctcaaagaattcagcatgatgtttaaacactttgacaaggacaagtctggcaggctgaaccatcaggagttcaaatcttgcctgcgctccctgggctatgacctgcccatggtggaggaaggggaacctgaccctgagttcgaggcaatcctggacacggtggatccgaacagagatggccatgtctccttgcaagaatacatggctttcatgatcagccgcgaaactgagaacgtcaagtccagcgaggagattgagagcgccttccgggccctcagctcagagggaaagccttacgtgaccaaggaggagctctaccagaacctgacccgggaacaagccgactactgcgtctcccacatgaagccctacgtggacggcaagggccgcgagctccccaccgcgttcgactacgtggagttcacccgctcgcttttcgtgaactgagccactccctgggtcacccacccctcgctgcttgccctgcgtcgccttgctgcatgtccgctcctctgtgtgctctcactttccactgtaaccttaagcctgcttagcttggaataagacttaggagaaaatggtgcttcactggttttgaaaatggagaaaaagagtgaggaactgagaaacatggatggccttgggaacgtggaaaagggtcactgaaatgggacgacatgaactcaaggaggctatttatgaccatgtcatttgcaacatgaagaaagcttatctggagtgaaagtaaatgagaccaacagagatgagagacccggagaaatcctggttacactgcttgaatcctacacatactaacaaaaggccacatgaggacacagtgagaagctggaagtctacaacccagaagagagccctcaacagaacctaaccatgctggtaccctgatctcagacatccagcctccagaagagtgaaaaaatataattcttatttctaagca

SEQ ID NO: 374305 - DNA, 2007 bp, Homo sapiens
tgggtagtagtaatagcaactgaactagaagacgggctgcagggagctcgtcatggcacagatggaggccaggcctgggtgcagggaggggcctgctaatgtgggttctgaggctgtagttaggaagattgggatttatctgtacacaaaaaatggtttgtctgggttttgatgtttttcctttctaatccatctccactgaggagggcagtatattttccacacttcgttttctaggtgaaaaggagaacagcttgaagacagatgattatggccgagacctgtcttctgtgcagacgctcctcaccaaacaggaaacttttgacgctgggctgcaggccttccagcaggaaggcattgccaacatcactgccctcaaagatcagcttctcgccgccaaacacgttcagtccaaggccatcgaggcccggcacgcctccctcatgaagaggtggagccagcttctggccaactcagccgcccgcaagaagaagcttctggaggctcagagtcacttccgcaaggtggaggacctcttcctgaccttcgccaaaaaggcttctgccttcaacagctggtttgaaaatgcagaggaggacttaacagaccccgtgcgctgcaactccttggaagaaatcaaagctttgcgcgaggcccacgacgccttccgctcctccctcagctctgcccaggctgacttcaaccagctggccgagctggaccgccagatcaagagcttccgcgtagcctccaacccctacacctggtttaccatggaggccctggaggagacctggaggaacctacagaaaatcatcaaggagagggagctggagctgcagaaggaacagcggcggcaggaggagaacgacaagctgcgccaggagtttgcccagcacgccaacgccttccaccagtggatccaagagaccaggacatacctcctcgatgggtcctgtatggtggaagagtcggggaccctcgaatcccagcttgaagctaccaaacgcaagcaccaggaaatccgagccatgagaagtcagctcaaaaagatcgaggacctgggggccgccatggaggaggccctcatcctggacaacaagtacacggagcacagcaccgtgggcctcgcccagcagtgggaccagctggaccagctgggcatgcgcatgcagcacaacctggagcagcagatccaggccaggaacacaacaggtgtgactgaggaggccctcaaagaattcagcatgatgtttaaacactttgacaaggacaagtctggcaggctgaaccatcaggagttcaaatcttgcctgcgctccctgggctatgacctgcccatggtggaggaaggggaacctgaccctgagttcgaggcaatcctggacacggtggatccgaacagagatggccatgtctccttgcaagaatacatggctttcatgatcagccgcgaaactgagaacgtcaagtccagcgaggagattgagagcgccttccgggccctcagctcagagggaaagccttacgtgaccaaggaggagctctaccagaacctgacccgggaacaagccgactactgcgtctcccacatgaagccctacgtggacggcaagggccgcgagctccccaccgcgttcgactacgtggagttcacccgctcgcttttcgtgaactgagccactccctgggtcacccacccctcgctgcttgccctgcgtcgccttgctgcatgtccgctcctctgtgtgctctcactttccactgtaaccttaagcctgcttagcttggaataagacttaggagaaaatggtgcttcactaacccgcttccggtccagtcacaatcatcatgtcactgtggggacccagatctgtgtcttgaagcagctgccctcattccgacttcagaaaatcgaagcagctggctcctccccttgttctctctcccaccctcccccaaatctgttttcatgtaaaagacaaataaatgatgacttcccccaaa

SEQ ID NO: 374306 - DNA, 1752 bp, Homo sapiens
ggcatgccaacatcactgccttcctgctggaaggcctgcagcccagcgtcaaaagtttccggttcggtgaggagcgtctgcaggccttccagcaggaaggcattgccaacatcactgccctcaaagatcagcttctcgccgccaaacacgttcagtccaaggccatcgaggcccggcacgcctccctcatgaagaggtggagccagcttctggccaactcagccgcccgcaagaagaagcttctggaggctcagagtcacttccgcaaggtggaggacctcttcctgaccttcgccaaaaaggcttctgccttcaacagctggtttgaaaatgcagaggaggacttaacagaccccgtgcgctgcaactccttggaagaaatcaaagctttgcgcgaggcccacgacgccttccgctcctccctcagctctgcccaggctgacttcaaccagctggccgagctggaccgccagatcaagagcttccgcgtagcctccaacccctacacctggtttaccatggaggccctggaggagacctggaggaacctacagaaaatcatcaaggagagggagctggagctgcagaaggaacagcggcggcaggaggagaacgacaagctgcgccaggagtttgcccagcacgccaacgccttccaccagtggatccaagagaccaggacatacctcctcgatgggtcctgtatggtggaagagtcggggaccctcgaatcccagcttgaagctaccaaacgcaagcaccaggaaatccgagccatgagaagtcagctcaaaaagatcgaggacctgggggccgccatggaggaggccctcatcctggacaacaagtacacggagcacagcaccgtgggcctcgcccagcagtgggaccagctggaccagctgggcatgcgcatgcagcacaacctggagcagcagatccaggccaggaacacaacaggtgtgactgaggaggccctcaaagaattcagcatgatgtttaaacactttgacaaggacaagtctggcaggctgaaccatcaggagttcaaatcttgcctgcgctccctgggctatgacctgcccatggtggaggaaggggaacctgaccctgagttcgaggcaatcctggacacggtggatccgaacagagatggccatgtctccttgcaagaatacatggctttcatgatcagccgcgaaactgagaacgtcaagtccagcgaggagattgagagcgccttccgggccctcagctcagagggaaagccttacgtgaccaaggaggagctctaccagaacctgacccgggaacaagccgactactgcgtctcccacatgaagccctacgtggacggcaagggccgcgagctccccaccgcgttcgactacgtggagttcacccgctcgcttttcgtgaactgagccactccctgggtcacccacccctcgctgcttgccctgcgtcgccttgctgcatgtccgctcctctgtgtgctctcactttccactgtaaccttaagcctgcttagcttggaataagacttaggagaaaatggtgcttcactaacccgcttccggtccagtcacaatcatcatgtcactgtggggacccagatctgtgtcttgaagcagctgccctcattccgacttcagaaaatcgaagcagctggctcctccccttgttctctctcccaccctcccccaaatctgttttcatgtaaaagacaaataaatgatgacttcccccaaa

SEQ ID NO: 374307 - DNA, 7643 bp, Homo sapiens
cgccactacccgctgcggagtgaacggtgtggagcggaggccgcggaggctcctcggtccttcagcacccctcggcccgacgcacccacgcccctcaccccccgagagccgaaaatggacccaagtggggtcaaagtgctggaaacagcagaggacatccaggagaggcggcagcaggtcctagaccgataccaccgcttcaaggaactctcaacccttaggcgtcagaagctggaagattcctatcgattccagttctttcaaagagatgctgaagagctggagaaatggatacaggaaaaacttcagattgcatctgatgagaattataaagacccaaccaacttgcagggaaagcttcagaagcatcaagcatttgaagctgaagtgcaggccaactcaggagccattgttaagctggatgaaactggaaacctgatgatctcagaagggcattttgcatctgaaaccatacggacccgtttgatggagctgcaccgccagtgggaattacttttggagaagatgcgagaaaaaggaatcaaactgctgcaggcccagaagttggtgcagtacttacgagaatgtgaggacgtgatggactggatcaatgacaaggaagcaattgttacttctgaagagctgggccaggatctggagcatgtagaggttttacagaagaaatttgaagagtttcaaacagatatggctgctcatgaagaaagagttaatgaagtgaaccagtttgctgccaaactcatacaggagcagcaccctgaggaggaactgatcaagactaagcaggatgaagtcaatgcagcctggcagcggctgaagggcctggctctgcagaggcaggggaagctctttggggcagcagaagttcagcgctttaacagggatgtggatgagactatcagttggattaaggaaaaggagcagttaatggcctctgatgattttggccgagacctggcaagtgttcaggctctgcttcggaagcacgagggtctggagagagatcttgctgctctagaagacaaggtcaaagccctgtgtgctgaggctgaccgcctgcaacagtcccaccctctgagtgcaacacagattcaagtgaagcgagaggaactgattacaaactgggagcagatccgcaccttggcggcagagagacatgcacggctcaatgattcatacaggcttcaacgcttccttgctgacttccgtgacctcaccagctgggtgactgagatgaaagccctcatcaatgcagatgagcttgccagtgatgtggctggggctgaagccctgctagatagacaccaagagcacaagggtgaaattgatgcccatgaagacagcttcaaatctgcagatgaatctggacaggcactgcttgctgctggtcactatgcctcagatgaagtgagggagaagctgaccgtcctttccgaggagagagcggcgctgctggagctgtgggagctgcgcaggcagcagtacgagcagtgcatggacctgcagctcttctaccgggacactgagcaggtggacaactggatgagcaagcaggaggcgttcctgttgaatgaagacttgggagattccttggatagtgtggaagcgcttcttaagaagcacgaagactttgagaaatcccttagtgcccaggaggaaaagattacagcattagatgaatttgcaaccaagctaattcagaacaaccactatgcaatggaagatgtggccactcgccgagatgctctgttgagccgccgcaatgcccttcacgagagagccatgcgtcgccgggcccagctagccgattctttccatctgcagcagtttttccgtgattctgatgagctcaagagttgggtcaatgagaagatgaaaactgccacagatgaagcttataaagatccatccaacctacaaggaaaagtacagaagcatcaggcttttgaggctgagctctcagcaaaccagagccgaattgatgccttggagaaagctggccaaaagctgattgatgtcaaccactatgccaaggatgaagtggcagctcgtatgaatgaggtgatcagtttgtggaagaaactgctagaggccactgaactgaaaggaataaagcttcgtgaagccaaccagcaacagcaatttaatcgcaatgttgaggatattgaattgtggctatatgaagtagaaggtcacttggcttcggatgattacggcaaagatcttaccaatgtgcagaacctccagaagaaacatgccctgctagaggcagatgtggctgctcaccaggaccgaattgatggcatcaccattcaggcccgccagttccaagatgctggccattttgatgcagaaaacatcaagaagaaacaggaagccctcgtggctcgctatgaggcactcaaggagcccatggttgcccggaagcagaagctggccgattctctgcggttgcagcagctcttccgggatgttgaggatgaggagacgtggattcgagagaaagagcccattgccgcatctaccaacagaggtaaggatttaattggggtccagaatctgctaaagaaacatcaagccttacaagcagaaattgctggacatgaaccacgcatcaaagcagttacacagaaggggaatgccatggtggaggaaggccattttgctgcagaggatgtgaaggccaagcttcacgagctgaaccaaaagtgggaggcactgaaagccaaagcttcccagcgtcggcaggacctggaggactctctgcaggcccagcagtactttgctgatgctaacgaggctgaatcctggatgcgggagaaggaacccattgtgggcagcactgactatggcaaggacgaagactctgctgaggctctactgaagaaacacgaagctttgatgtcagatctcagtgcctacggcagcagcatccaggctttgcgagaacaagcacagtcctgccggcaacaagtggcccccacggatgatgagactgggaaggagctggtcttggctctctacgactatcaggagaagagtccccgagaggtcaccatgaagaagggagatatccttaccttactcaacagcaccaacaaggattggtggaaagtggaagtgaacgatcgtcagggttttgtgccggctgcgtacgtgaagaaattggaccccgcccagtcagcctcccgggagaatctcctggaggagcaaggcagcatagcactgcggcaggagcagattgacaatcagacacgcataactaaggaggccggcagtgtatctctgcgtatgaagcaggtggaagaactatatcattctctgctggaactgggtgagaagcgtaaaggcatgttggagaagagttgcaagaagtttatgttgttccgtgaagcgaatgaactacagcaatggatcaatgagaaggaagccgctctgacaagtgaggaggtcggagcagacttggagcaggttgaggtgctccagaagaagtttgatgacttccagaaggacctgaaggccaatgagtcacggttgaaggacattaacaaggtagctgaagacctggagtctgaaggtcttatggcagaggaggtgcaggctgtgcaacaacaggaagtgtatggcatgatgcccagggatgaaactgattccaagacagcctccccgtggaagtctgctcgtctgatggttcacaccgtggccacctttaattccatcaaggagctgaatgagcgctggcggtccctacagcagctggccgaggaacggagccagctcttgggcagcgcccatgaagtacagaggttccacagagatgctgatgaaaccaaagaatggattgaagagaagaatcaagctctaaacacagacaattatggacatgatctcgccagtgtccaggccctgcaacgcaagcatgagggcttcgagagggaccttgcggctctcggtgacaaggtaaactcccttggtgaaacagcagagcgcctgatccagtcccatcccgagtcagcagaagacctgcaggaaaagtgcacagagttaaaccaggcctggagcagcctggggaaacgtgcagatcagcgcaaggcaaagttgggtgactcccacgacctgcagcgcttccttagcgatttccgggacctcatgtcttggatcaatggaatacgggggttggtgtcctcagatgagctagccaaggatgtcaccggagctgaggcattgctggagcgacaccaggaacaccggacagaaatcgatgccagggctggcactttccaggcatttgagcagtttggacagcagctgttggctcacggacactatgccagccctgagatcaagcagaaacttgatattcttgaccaggagcgtgcagacctggagaaggcctgggttcagcgcaggatgatgctggatcagtgccttgaactgcagctgttccatcgggactgtgagcaagctgagaactggatggctgcccgggaggccttcttgaataccgaagacaaaggagactcactggacagcgtagaggctctgatcaaaaaacatgaagactttgacaaagcgattaacgtccaggaagagaagattgctgctctgcaggcctttgccgaccagctcatcgctgccggccattatgccaagggagacatttctagccggcgcaatgaggtcttggacaggtggcgacgtctgaaagcccagatgattgagaaaaggtcaaagctaggagaatctcaaaccctccaacagttcagccgggatgtggatgagattgaggcttggatcagtgaaaaattgcaaacagcgagtgatgagtcgtacaaggatcccaccaacatccagagcaagcaccagaagcaccaggcttttgaagcagagctgcatgccaacgctgaccggatccgtggggttatcgacatgggcaactccctcattgaacgtggagcctgtgccggcagtgaggatgctgtcaaggcccgcctggctgccttagctgaccagtggcagttcttggtgcaaaagtcagcggaaaagagccagaaactgaaagaagccaacaagcagcagaacttcaacacagggatcaaggactttgacttctggctgtctgaggtggaggccctgctggcatccgaagattatggcaaagacctggcttctgtgaacaacctgctgaaaaagcatcaactgctggaagcagatatatctgcccatgaggatcgcctgaaggacctgaacagccaggcagacagcctgatgaccagcagtgccttcgacacctcccaagtaaaggacaagagggacaccatcaacgggcgcttccagaagatcaagagcatggcggcctcccggcgagccaagctgaatgaatcccatcgcctgcaccagttcttccgggacatggatgacgaggagtcctggatcaaggagaagaagctgctggtgggctcagaggactacggccgggacctaactggcgtgcagaacctgaggaagaagcacaagcggctggaagcagaactggctgcgcatgagccggctattcagggtgtcctggacactggcaagaagctgtccgatgacaacaccatcgggaaagaggagatccagcagcggctggcgcagtttgtggagcactggaaagagctgaagcagctggcagctgcccggggtcagcggctggaagagtccttggaatatcagcagtttgtagccaatgtggaagaggaagaagcctggatcaatgagaaaatgaccctggtggccagcgaagattatggcgacactcttgccgccatccagggcttactgaagaaacatgaagcttttgagacagacttcaccgtccacaaggatcgcgtgaatgatgtctgcaccaatggacaagacctcattaagaagaacaatcaccatgaggagaacatctcttcaaagatgaagggcctgaacgggaaagtgtcagacctggagaaagctgcagcccagagaaaggcgaagctggatgagaactcggccttccttcagttcaactggaaggcggacgtggtggagtcctggatcggtgaaaaggagaacagcttgaagacagatgattatggccgagacctgtcttctgtgcagacgctcctcaccaaacaggaaacttttgacgctgggctgcaggccttccagcaggaaggcattgccaacatcactgccctcaaagatcagcttctcgccgccaaacacgttcagtccaaggccatcgaggcccggcacgcctccctcatgaagaggtggagccagcttctggccaactcagccgcccgcaagaagaagcttctggaggctcagagtcacttccgcaaggtggaggacctcttcctgaccttcgccaaaaaggcttctgccttcaacagctggtttgaaaatgcagaggaggacttaacagaccccgtgcgctgcaactccttggaagaaatcaaagctttgcgcgaggcccacgacgccttccgctcctccctcagctctgcccaggctgacttcaaccagctggccgagctggaccgccagatcaagagcttccgcgtagcctccaacccctacacctggtttaccatggaggccctggaggagacctggaggaacctacagaaaatcatcaaggagagggagctggagctgcagaaggaacagcggcggcaggaggagaacgacaagctgcgccaggagtttgcccagcacgccaacgccttccaccagtggatccaagagaccaggacatacctcctcgatgggtcctgtatggtggaagagtcggggaccctcgaatcccagcttgaagctaccaaacgcaagcaccaggaaatccgagccatgagaagtcagctcaaaaagatcgaggacctgggggccgccatggaggaggccctcatcctggacaacaagtacacggagcacagcaccgtgggcctcgcccagcagtgggaccagctggaccagctgggcatgcgcatgcagcacaacctggagcagcagatccaggccaggaacacaacaggtgtgactgaggaggccctcaaagaattcagcatgatgtttaaacactttgacaaggacaagtctggcaggctgaaccatcaggagttcaaatcttgcctgcgctccctgggctatgacctgcccatggtggaggaaggggaacctgaccctgagttcgaggcaatcctggacacggtggatccgaacagagatggccatgtctccttgcaagaatacatggctttcatgatcagccgcgaaactgagaacgtcaagtccagcgaggagattgagagcgccttccgggccctcagctcagagggaaagccttacgtgaccaaggaggagctctaccaggtatgggcctcaggaggtgggtgaagaggtgtcctttggaaaactaaagtcaaatttgtggcagagctgagtctggggtaacaggccctgcgctgggtattctccccatttacaaatcaaactcagtatgggacagaagtcccggatctgcttgtagaagcagctccgagcccccagcatcctgagacctgggaggtcgggtttgaagtgggtgcagctggctcaggcaccaggtg

SEQ ID NO: 374308 - DNA, 1525 bp, Homo sapiens
  misc_feature (42)..(42): n is a, c, g, or t
caacggggggggaaccaaaacttcggctaaggtacgaggccngtggaggacctcttcctgaccttcgccaaaaaggcttctgccttcaacagctggtttgaaaatgcagaggaggacttaacagaccccgtgcgctgcaactccttggaagaaatcaaagctttgcgcgaggcccacgacgccttccgctcctccctcagctctgcccaggctgacttcaaccagctggccgagctggaccgccagatcaagagcttccgcgtagcctccaacccctacacctggtttaccatggaggccctggaggagacctggaggaacctacagaaaatcatcaaggagagggagctggagctgcagaaggaacagcggcggcaggaggagaacgacaagctgcgccaggagtttgcccagcacgccaacgccttccaccagtggatccaagagaccaggacatacctcctcgatgggtcctgtatggtggaagagtcggggaccctcgaatcccagcttgaagctaccaaacgcaagcaccaggaaatccgagccatgagaagtcagctcaaaaagatcgaggacctgggggccgccatggaggaggccctcatcctggacaacaagtacacggagcacagcaccgtgggcctcgcccagcagtgggaccagctggaccagctgggcatgcgcatgcagcacaacctggagcagcagatccaggccaggaacacaacaggtgtgactgaggaggccctcaaagaattcagcatgatgtttaaacactttgacaaggacaagtctggcaggctgaaccatcaggagttcaaatcttgcctgcgctccctgggctatgacctgcccatggtggaggaaggggaacctgaccctgagttcgaggcaatcctggacacggtggatccgaacagagatggccatgtctccttgcaagaatacatggctttcatgatcagccgcgaaactgagaacgtcaagtccagcgaggagattgagagcgccttccgggccctcagctcagagggaaagccttacgtgaccaaggaggagctctaccagaacctgacccgggaacaagccgactactgcgtctcccacatgaagccctacgtggacggcaagggccgcgagctccccaccgcgttcgactacgtggagttcacccgctcgcttttcgtgaactgagccactccctgggtcacccacccctcgctgcttgccctgcgtcgccttgctgcatgtccgctcctctgtgtgctctcactttccactgtaaccttaagcctgcttagcttggaataagacttaggagaaaatggtgcttcactaacccgcttccggtccagtcacaatcatcatgtcactgtggggacccagatctgtgtcttgaagcagctgccctcattccgacttcagaaaatcgaagcagctggctcctccccttgttctctctcccaccctcccccaaatctgttttcatgtaaaagacaaataaatgatgacttcccccaaa

SEQ ID NO: 374309 - DNA, 7246 bp, Homo sapiens
cgccactacccgctgcggagtgaacggtgtggagcggaggccgcggaggctcctcggtccttcagcacccctcggcccgacgcacccacgcccctcaccccccgagagccgaaaatggacccaagtggggtcaaagtgctggaaacagcagaggacatccaggagaggcggcagcaggtcctagaccgataccaccgcttcaaggaactctcaacccttaggcgtcagaagctggaagattcctatcgattccagttctttcaaagagatgctgaagagctggagaaatggatacaggaaaaacttcagattgcatctgatgagaattataaagacccaaccaacttgcagggaaagcttcagaagcatcaagcatttgaagctgaagtgcaggccaactcaggagccattgttaagctggatgaaactggaaacctgatgatctcagaagggcattttgcatctgaaaccatacggacccgtttgatggagctgcaccgccagtgggaattacttttggagaagatgcgagaaaaaggaatcaaactgctgcaggcccagaagttggtgcagtacttacgagaatgtgaggacgtgatggactggatcaatgacaaggaagcaattgttacttctgaagagctgggccaggatctggagcatgtagaggttttacagaagaaatttgaagagtttcaaacagatatggctgctcatgaagaaagagttaatgaagtgaaccagtttgctgccaaactcatacaggagcagcaccctgaggaggaactgatcaagactaagcaggatgaagtcaatgcagcctggcagcggctgaagggcctggctctgcagaggcaggggaagctctttggggcagcagaagttcagcgctttaacagggatgtggatgagactatcagttggattaaggaaaaggagcagttaatggcctctgatgattttggccgagacctggcaagtgttcaggctctgcttcggaagcacgagggtctggagagagatcttgctgctctagaagacaaggtcaaagccctgtgtgctgaggctgaccgcctgcaacagtcccaccctctgagtgcaacacagattcaagtgaagcgagaggaactgattacaaactgggagcagatccgcaccttggcggcagagagacatgcacggctcaatgattcatacaggcttcaacgcttccttgctgacttccgtgacctcaccagctgggtgactgagatgaaagccctcatcaatgcagatgagcttgccagtgatgtggctggggctgaagccctgctagatagacaccaagagcacaagggtgaaattgatgcccatgaagacagcttcaaatctgcagatgaatctggacaggcactgcttgctgctggtcactatgcctcagatgaagtgagggagaagctgaccgtcctttccgaggagagagcggcgctgctggagctgtgggagctgcgcaggcagcagtacgagcagtgcatggacctgcagctcttctaccgggacactgagcaggtggacaactggatgagcaagcaggaggcgttcctgttgaatgaagacttgggagattccttggatagtgtggaagcgcttcttaagaagcacgaagactttgagaaatcccttagtgcccaggaggaaaagattacagcattagatgaatttgcaaccaagctaattcagaacaaccactatgcaatggaagatgtggccactcgccgagatgctctgttgagccgccgcaatgcccttcacgagagagccatgcgtcgccgggcccagctagccgattctttccatctgcagcagtttttccgtgattctgatgagctcaagagttgggtcaatgagaagatgaaaactgccacagatgaagcttataaagatccatccaacctacaaggaaaagtacagaagcatcaggcttttgaggctgagctctcagcaaaccagagccgaattgatgccttggagaaagctggccaaaagctgattgatgtcaaccactatgccaaggatgaagtggcagctcgtatgaatgaggtgatcagtttgtggaagaaactgctagaggccactgaactgaaaggaataaagcttcgtgaagccaaccagcaacagcaatttaatcgcaatgttgaggatattgaattgtggctatatgaagtagaaggtcacttggcttcggatgattacggcaaagatcttaccaatgtgcagaacctccagaagaaacatgccctgctagaggcagatgtggctgctcaccaggaccgaattgatggcatcaccattcaggcccgccagttccaagatgctggccattttgatgcagaaaacatcaagaagaaacaggaagccctcgtggctcgctatgaggcactcaaggagcccatggttgcccggaagcagaagctggccgattctctgcggttgcagcagctcttccgggatgttgaggatgaggagacgtggattcgagagaaagagcccattgccgcatctaccaacagaggtaaggatttaattggggtccagaatctgctaaagaaacatcaagccttacaagcagaaattgctggacatgaaccacgcatcaaagcagttacacagaaggggaatgccatggtggaggaaggccattttgctgcagaggatgtgaaggccaagcttcacgagctgaaccaaaagtgggaggcactgaaagccaaagcttcccagcgtcggcaggacctggaggactctctgcaggcccagcagtactttgctgatgctaacgaggctgaatcctggatgcgggagaaggaacccattgtgggcagcactgactatggcaaggacgaagactctgctgaggctctactgaagaaacacgaagctttgatgtcagatctcagtgcctacggcagcagcatccaggctttgcgagaacaagcacagtcctgccggcaacaagtggcccccacggatgatgagactgggaaggagctggtcttggctctctacgactatcaggagaagagtccccgagaggtcaccatgaagaagggagatatccttaccttactcaacagcaccaacaaggattggtggaaagtggaagtgaacgatcgtcagggttttgtgccggctgcgtacgtgaagaaattggaccccgcccagtcagcctcccgggagaatctcctggaggagcaaggcagcatagcactgcggcaggagcagattgacaatcagacacgcataactaaggaggccggcagtgtatctctgcgtatgaagcaggtggaagaactatatcattctctgctggaactgggtgagaagcgtaaaggcatgttggagaagagttgcaagaagtttatgttgttccgtgaagcgaatgaactacagcaatggatcaatgagaaggaagccgctctgacaagtgaggaggtcggagcagacttggagcaggttgaggtgctccagaagaagtttgatgacttccagaaggacctgaaggccaatgagtcacggttgaaggacattaacaaggtagctgaagacctggagtctgaaggtcttatggcagaggaggtgcaggctgtgcaacaacaggaagtgtatggcatgatgcccagggatgaaactgattccaagacagcctccccgtggaagtctgctcgtctgatggttcacaccgtggccacctttaattccatcaaggagctgaatgagcgctggcggtccctacagcagctggccgaggaacggagccagctcttgggcagcgcccatgaagtacagaggttccacagagatgctgatgaaaccaaagaatggattgaagagaagaatcaagctctaaacacagacaattatggacatgatctcgccagtgtccaggccctgcaacgcaagcatgagggcttcgagagggaccttgcggctctcggtgacaaggtaaactcccttggtgaaacagcagagcgcctgatccagtcccatcccgagtcagcagaagacctgcaggaaaagtgcacagagttaaaccaggcctggagcagcctggggaaacgtgcagatcagcgcaaggcaaagttgggtgactcccacgacctgcagcgcttccttagcgatttccgggacctcatgtcttggatcaatggaatacgggggttggtgtcctcagatgagctagccaaggatgtcaccggagctgaggcattgctggagcgacaccaggaacaccggacagaaatcgatgccagggctggcactttccaggcatttgagcagtttggacagcagctgttggctcacggacactatgccagccctgagatcaagcagaaacttgatattcttgaccaggagcgtgcagacctggagaaggcctgggttcagcgcaggatgatgctggatcagtgccttgaactgcagctgttccatcgggactgtgagcaagctgagaactggatggctgcccgggaggccttcttgaataccgaagacaaaggagactcactggacagcgtagaggctctgatcaaaaaacatgaagactttgacaaagcgattaacgtccaggaagagaagattgctgctctgcaggcctttgccgaccagctcatcgctgccggccattatgccaagggagacatttctagccggcgcaatgaggtcttggacaggtggcgacgtctgaaagcccagatgattgagaaaaggtcaaagctaggagaatctcaaaccctccaacagttcagccgggatgtggatgagattgaggcttggatcagtgaaaaattgcaaacagcgagtgatgagtcgtacaaggatcccaccaacatccagagcaagcaccagaagcaccaggcttttgaagcagagctgcatgccaacgctgaccggatccgtggggttatcgacatgggcaactccctcattgaacgtggagcctgtgccggcagtgaggatgctgtcaaggcccgcctggctgccttagctgaccagtggcagttcttggtgcaaaagtcagcggaaaagagccagaaactgaaagaagccaacaagcagcagaacttcaacacagggatcaaggactttgacttctggctgtctgaggtggaggccctgctggcatccgaagattatggcaaagacctggcttctgtgaacaacctgctgaaaaagcatcaactgctggaagcagatatatctgcccatgaggatcgcctgaaggacctgaacagccaggcagacagcctgatgaccagcagtgccttcgacacctcccaagtaaaggacaagagggacaccatcaacgggcgcttccagaagatcaagagcatggcggcctcccggcgagccaagctgaatgaatcccatcgcctgcaccagttcttccgggacatggatgacgaggagtcctggatcaaggagaagaagctgctggtgggctcagaggactacggccgggacctaactggcgtgcagaacctgaggaagaagcacaagcggctggaagcagaactggctgcgcatgagccggctattcagggtgtcctggacactggcaagaagctgtccgatgacaacaccatcgggaaagaggagatccagcagcggctggcgcagtttgtggagcactggaaagagctgaagcagctggcagctgcccggggtcagcggctggaagagtccttggaatatcagcagtttgtagccaatgtggaagaggaagaagcctggatcaatgagaaaatgaccctggtggccagcgaagattatggcgacactcttgccgccatccagggcttactgaagaaacatgaagcttttgagacagacttcaccgtccacaaggatcgcgtgaatgatgtctgcaccaatggacaagacctcattaagaagaacaatcaccatgaggagaacatctcttcaaagatgaagggcctgaacgggaaagtgtcagacctggagaaagctgcagcccagagaaaggcgaagctggatgagaactcggccttccttcagttcaactggaaggcggacgtggtggagtcctggatcggtgaaaaggagaacagcttgaagacagatgattatggccgagacctgtcttctgtgcagacgctcctcaccaaacaggaaacttttgacgctgggctgcaggccttccagcaggaaggcattgccaacatcactgccctcaaagatcagcttctcgccgccaaacacgttcagtccaaggccatcgaggcccggcacgcctccctcatgaagaggtggagccagcttctggccaactcagccgcccgcaagaagaagcttctggaggctcagagtcacttccgcaaggtggaggacctcttcctgaccttcgccaaaaaggcttctgccttcaacagctggtttgaaaatgcagaggaggacttaacagaccccgtgcgctgcaactccttggaagaaatcaaagctttgcgcgaggcccacgacgccttccgctcctccctcagctctgcccaggctgacttcaaccagctggccgagctggaccgccagatcaagagcttccgcgtagcctccaacccctacacctggtttaccatggaggccctggaggagacctggaggaacctacagaaaatcatcaaggagagggagctggagctgcagaaggaacagcggcggcaggaggagaacgacaagctgcgccaggagtttgcccagcacgccaacgccttccaccagtggatccaagagaccaggacatacctcctcgatgggtcctgtatggtggaagagtcggggaccctcgaatcccagcttgaagctaccaaacgcaagcaccaggaaatccgagccatgagaagtcagctcaaaaagatcgaggacctgggggccgccatggaggaggccctcatcctggacaacaagtacacggagcacagcaccgtgggcctcgcccagcagtgggaccagctggaccagctgggcatgcgcatgcagcacaacctggagcagcagatccaggccaggaacacaacaggtgtgactgaggaggccctcaaagaattcagcatgatgtttaaacactttgacaaggacaagcaaggatgtgtttgtctgatttcccgttacagccccagcacttagctgagtgactggcacctagtaagcactcagtaactgtttgctgaataaatggaagaatggtcaaaaggct

SEQ ID NO: 374310 - DNA, 1193 bp, Homo sapiens
agggtaaaacgacggccggggagccgcgaatcttgctcttggttgtttcctgagggaaaacgcccgccaggggatccccaatcagggccggggcttgtaccagggggtaaaagagacccggacatacctcctagatgggtcctggctggtgccagaggcgaaaaccctcgaatcccagcttgaagctaccaaacgcaagcaccaggaaatccgagccatgagaagtcagctcaaaaagatcgaggacctgggggccgccatggaggaggccctcatcctggacaacaagtacacggagcacagcaccgtgggcctcgcccagcagtgggaccagctggaccagctgggcatgcgcatgcagcacaacctggagcagcagatccaggccaggaacacaacaggtgtgactgaggaggccctcaaagaattcagcatgatgtttaaacactttgacaaggacaagtctggcaggctgaaccatcaggagttcaaatcttgcctgcgctccctgggctatgacctgcccatggtggaggaaggggaacctgaccctgagttcgaggcaatcctggacacggtggatccgaacagagatggccatgtctccttgcaagaatacatggctttcatgatcagccgcgaaactgagaacgtcaagtccagcgaggagattgagagcgccttccgggccctcagctcagagggaaagccttacgtgaccaaggaggagctctaccagaacctgacccgggaacaagccgactactgcgtctcccacatgaagccctacgtggacggcaagggccgcgagctccccaccgcgttcgactacgtggagttcacccgctcgcttttcgtgaactgagccactccctgggtcacccacccctcgctgcttgccctgcgtcgccttgctgcatgtccgctcctctgtgtgctctcactttccactgtaaccttaagcctgcttagcttggaataagacttaggagaaaatggtgcttcactaacccgcttccggtccagtcacaatcatcatgtcactgtggggacccagatctgtgtcttgaagcagctgccctcattccgacttcagaaaatcgaagcagctggctcctccccttgttctctctcccaccctcccccaaatctgttttcatgtaaaagacaaataaatgatgacttcccccaaa

SEQ ID NO: 374311 - DNA, 6333 bp, Homo sapiens
cgccactacccgctgcggagtgaacggtgtggagcggaggccgcggaggctcctcggtccttcagcacccctcggcccgacgcacccacgcccctcaccccccgagagccgaaaatggacccaagtggggtcaaagtgctggaaacagcagaggacatccaggagaggcggcagcaggtcctagaccgataccaccgcttcaaggaactctcaacccttaggcgtcagaagctggaagattcctatcgattccagttctttcaaagagatgctgaagagctggagaaatggatacaggaaaaacttcagattgcatctgatgagaattataaagacccaaccaacttgcagggaaagcttcagaagcatcaagcatttgaagctgaagtgcaggccaactcaggagccattgttaagctggatgaaactggaaacctgatgatctcagaagggcattttgcatctgaaaccatacggacccgtttgatggagctgcaccgccagtgggaattacttttggagaagatgcgagaaaaaggaatcaaactgctgcaggcccagaagttggtgcagtacttacgagaatgtgaggacgtgatggactggatcaatgacaaggaagcaattgttacttctgaagagctgggccaggatctggagcatgtagaggttttacagaagaaatttgaagagtttcaaacagatatggctgctcatgaagaaagagttaatgaagtgaaccagtttgctgccaaactcatacaggagcagcaccctgaggaggaactgatcaagactaagcaggatgaagtcaatgcagcctggcagcggctgaagggcctggctctgcagaggcaggggaagctctttggggcagcagaagttcagcgctttaacagggatgtggatgagactatcagttggattaaggaaaaggagcagttaatggcctctgatgattttggccgagacctggcaagtgttcaggctctgcttcggaagcacgagggtctggagagagatcttgctgctctagaagacaaggtcaaagccctgtgtgctgaggctgaccgcctgcaacagtcccaccctctgagtgcaacacagattcaagtgaagcgagaggaactgattacaaactgggagcagatccgcaccttggcggcagagagacatgcacggctcaatgattcatacaggcttcaacgcttccttgctgacttccgtgacctcaccagctgggtgactgagatgaaagccctcatcaatgcagatgagcttgccagtgatgtggctggggctgaagccctgctagatagacaccaagagcacaagggtgaaattgatgcccatgaagacagcttcaaatctgcagatgaatctggacaggcactgcttgctgctggtcactatgcctcagatgaagtgagggagaagctgaccgtcctttccgaggagagagcggcgctgctggagctgtgggagctgcgcaggcagcagtacgagcagtgcatggacctgcagctcttctaccgggacactgagcaggtggacaactggatgagcaagcaggaggcgttcctgttgaatgaagacttgggagattccttggatagtgtggaagcgcttcttaagaagcacgaagactttgagaaatcccttagtgcccaggaggaaaagattacagcattagatgaatttgcaaccaagctaattcagaacaaccactatgcaatggaagatgtggccactcgccgagatgctctgttgagccgccgcaatgcccttcacgagagagccatgcgtcgccgggcccagctagccgattctttccatctgcagcagtttttccgtgattctgatgagctcaagagttgggtcaatgagaagatgaaaactgccacagatgaagcttataaagatccatccaacctacaaggaaaagtacagaagcatcaggcttttgaggctgagctctcagcaaaccagagccgaattgatgccttggagaaagctggccaaaagctgattgatgtcaaccactatgccaaggatgaagtggcagctcgtatgaatgaggtgatcagtttgtggaagaaactgctagaggccactgaactgaaaggaataaagcttcgtgaagccaaccagcaacagcaatttaatcgcaatgttgaggatattgaattgtggctatatgaagtagaaggtcacttggcttcggatgattacggcaaagatcttaccaatgtgcagaacctccagaagaaacatgccctgctagaggcagatgtggctgctcaccaggaccgaattgatggcatcaccattcaggcccgccagttccaagatgctggccattttgatgcagaaaacatcaagaagaaacaggaagccctcgtggctcgctatgaggcactcaaggagcccatggttgcccggaagcagaagctggccgattctctgcggttgcagcagctcttccgggatgttgaggatgaggagacgtggattcgagagaaagagcccattgccgcatctaccaacagaggtaaggatttaattggggtccagaatctgctaaagaaacatcaagccttacaagcagaaattgctggacatgaaccacgcatcaaagcagttacacagaaggggaatgccatggtggaggaaggccattttgctgcagaggatgtgaaggccaagcttcacgagctgaaccaaaagtgggaggcactgaaagccaaagcttcccagcgtcggcaggacctggaggactctctgcaggcccagcagtactttgctgatgctaacgaggctgaatcctggatgcgggagaaggaacccattgtgggcagcactgactatggcaaggacgaagactctgctgaggctctactgaagaaacacgaagctttgatgtcagatctcagtgcctacggcagcagcatccaggctttgcgagaacaagcacagtcctgccggcaacaagtggcccccacggatgatgagactgggaaggagctggtcttggctctctacgactatcaggagaagagtccccgagaggtcaccatgaagaagggagatatccttaccttactcaacagcaccaacaaggattggtggaaagtggaagtgaacgatcgtcagggttttgtgccggctgcgtacgtgaagaaattggaccccgcccagtcagcctcccgggagaatctcctggaggagcaaggcagcatagcactgcggcaggagcagattgacaatcagacacgcataactaaggaggccggcagtgtatctctgcgtatgaagcaggtggaagaactatatcattctctgctggaactgggtgagaagcgtaaaggcatgttggagaagagttgcaagaagtttatgttgttccgtgaagcgaatgaactacagcaatggatcaatgagaaggaagccgctctgacaagtgaggaggtcggagcagacttggagcaggttgaggtgctccagaagaagtttgatgacttccagaaggacctgaaggccaatgagtcacggttgaaggacattaacaaggtagctgaagacctggagtctgaaggtcttatggcagaggaggtgcaggctgtgcaacaacaggaagtgtatggcatgatgcccagggatgaaactgattccaagacagcctccccgtggaagtctgctcgtctgatggttcacaccgtggccacctttaattccatcaaggagctgaatgagcgctggcggtccctacagcagctggccgaggaacggagccagctcttgggcagcgcccatgaagtacagaggttccacagagatgctgatgaaaccaaagaatggattgaagagaagaatcaagctctaaacacagacaattatggacatgatctcgccagtgtccaggccctgcaacgcaagcatgagggcttcgagagggaccttgcggctctcggtgacaaggtaaactcccttggtgaaacagcagagcgcctgatccagtcccatcccgagtcagcagaagacctgcaggaaaagtgcacagagttaaaccaggcctggagcagcctggggaaacgtgcagatcagcgcaaggcaaagttgggtgactcccacgacctgcagcgcttccttagcgatttccgggacctcatgtcttggatcaatggaatacgggggttggtgtcctcagatgagctagccaaggatgtcaccggagctgaggcattgctggagcgacaccaggaacaccggacagaaatcgatgccagggctggcactttccaggcatttgagcagtttggacagcagctgttggctcacggacactatgccagccctgagatcaagcagaaacttgatattcttgaccaggagcgtgcagacctggagaaggcctgggttcagcgcaggatgatgctggatcagtgccttgaactgcagctgttccatcgggactgtgagcaagctgagaactggatggctgcccgggaggccttcttgaataccgaagacaaaggagactcactggacagcgtagaggctctgatcaaaaaacatgaagactttgacaaagcgattaacgtccaggaagagaagattgctgctctgcaggcctttgccgaccagctcatcgctgccggccattatgccaagggagacatttctagccggcgcaatgaggtcttggacaggtggcgacgtctgaaagcccagatgattgagaaaaggtcaaagctaggagaatctcaaaccctccaacagttcagccgggatgtggatgagattgaggcttggatcagtgaaaaattgcaaacagcgagtgatgagtcgtacaaggatcccaccaacatccagagcaagcaccagaagcaccaggcttttgaagcagagctgcatgccaacgctgaccggatccgtggggttatcgacatgggcaactccctcattgaacgtggagcctgtgccggcagtgaggatgctgtcaaggcccgcctggctgccttagctgaccagtggcagttcttggtgcaaaagtcagcggaaaagagccagaaactgaaagaagccaacaagcagcagaacttcaacacagggatcaaggactttgacttctggctgtctgaggtggaggccctgctggcatccgaagattatggcaaagacctggcttctgtgaacaacctgctgaaaaagcatcaactgctggaagcagatatatctgcccatgaggatcgcctgaaggacctgaacagccaggcagacagcctgatgaccagcagtgccttcgacacctcccaagtaaaggacaagagggacaccatcaacgggcgcttccagaagatcaagagcatggcggcctcccggcgagccaagctgaatgaatcccatcgcctgcaccagttcttccgggacatggatgacgaggagtcctggatcaaggagaagaagctgctggtgggctcagaggactacggccgggacctaactggcgtgcagaacctgaggaagaagcacaagcggctggaagcagaactggctgcgcatgagccggctattcagggtgtcctggacactggcaagaagctgtccgatgacaacaccatcgggaaagaggagatccagcagcggctggcgcagtttgtggagcactggaaagagctgaagcagctggcagctgcccggggtcagcggctggaagagtccttggaatatcagcagtttgtagccaatgtggaagaggaagaagcctggatcaatgagaaaatgaccctggtggccagcgaagattatggcgacactcttgccgccatccagggcttactgaagaaacatgaagcttttgagacagacttcaccgtccacaaggatcgcgtgaatgatgtctgcaccaatggacaagacctcattaagaagaacaatcaccatgaggagaacatctcttcaaagatgaagggcctgaacgggaaagtgtcagacctggagaaagctgcagcccagagaaaggcgaagctggatgagaactcggccttccttcagttcaactggaaggcggacgtggtggagtcctggatcggtgaaaaggagaacagcttgaagacagatgattatggccgagacctgtcttctgtgcagacgctcctcaccaaacaggaaacttttgacgctgggctgcaggccttccagcaggaaggcattgccaacatcactgccctcaaagatcagcttctcgccgccaaacacgttcagtccaaggcagtgtaggcccagtccgaaagttgtatgacgacgtgcagtcagaagctggcaagctcgcag

SEQ ID NO: 374312 - DNA, 6211 bp, Homo sapiens
cgccactacccgctgcggagtgaacggtgtggagcggaggccgcggaggctcctcggtccttcagcacccctcggcccgacgcacccacgcccctcaccccccgagagccgaaaatggacccaagtggggtcaaagtgctggaaacagcagaggacatccaggagaggcggcagcaggtcctagaccgataccaccgcttcaaggaactctcaacccttaggcgtcagaagctggaagattcctatcgattccagttctttcaaagagatgctgaagagctggagaaatggatacaggaaaaacttcagattgcatctgatgagaattataaagacccaaccaacttgcagggaaagcttcagaagcatcaagcatttgaagctgaagtgcaggccaactcaggagccattgttaagctggatgaaactggaaacctgatgatctcagaagggcattttgcatctgaaaccatacggacccgtttgatggagctgcaccgccagtgggaattacttttggagaagatgcgagaaaaaggaatcaaactgctgcaggcccagaagttggtgcagtacttacgagaatgtgaggacgtgatggactggatcaatgacaaggaagcaattgttacttctgaagagctgggccaggatctggagcatgtagaggttttacagaagaaatttgaagagtttcaaacagatatggctgctcatgaagaaagagttaatgaagtgaaccagtttgctgccaaactcatacaggagcagcaccctgaggaggaactgatcaagactaagcaggatgaagtcaatgcagcctggcagcggctgaagggcctggctctgcagaggcaggggaagctctttggggcagcagaagttcagcgctttaacagggatgtggatgagactatcagttggattaaggaaaaggagcagttaatggcctctgatgattttggccgagacctggcaagtgttcaggctctgcttcggaagcacgagggtctggagagagatcttgctgctctagaagacaaggtcaaagccctgtgtgctgaggctgaccgcctgcaacagtcccaccctctgagtgcaacacagattcaagtgaagcgagaggaactgattacaaactgggagcagatccgcaccttggcggcagagagacatgcacggctcaatgattcatacaggcttcaacgcttccttgctgacttccgtgacctcaccagctgggtgactgagatgaaagccctcatcaatgcagatgagcttgccagtgatgtggctggggctgaagccctgctagatagacaccaagagcacaagggtgaaattgatgcccatgaagacagcttcaaatctgcagatgaatctggacaggcactgcttgctgctggtcactatgcctcagatgaagtgagggagaagctgaccgtcctttccgaggagagagcggcgctgctggagctgtgggagctgcgcaggcagcagtacgagcagtgcatggacctgcagctcttctaccgggacactgagcaggtggacaactggatgagcaagcaggaggcgttcctgttgaatgaagacttgggagattccttggatagtgtggaagcgcttcttaagaagcacgaagactttgagaaatcccttagtgcccaggaggaaaagattacagcattagatgaatttgcaaccaagctaattcagaacaaccactatgcaatggaagatgtggccactcgccgagatgctctgttgagccgccgcaatgcccttcacgagagagccatgcgtcgccgggcccagctagccgattctttccatctgcagcagtttttccgtgattctgatgagctcaagagttgggtcaatgagaagatgaaaactgccacagatgaagcttataaagatccatccaacctacaaggaaaagtacagaagcatcaggcttttgaggctgagctctcagcaaaccagagccgaattgatgccttggagaaagctggccaaaagctgattgatgtcaaccactatgccaaggatgaagtggcagctcgtatgaatgaggtgatcagtttgtggaagaaactgctagaggccactgaactgaaaggaataaagcttcgtgaagccaaccagcaacagcaatttaatcgcaatgttgaggatattgaattgtggctatatgaagtagaaggtcacttggcttcggatgattacggcaaagatcttaccaatgtgcagaacctccagaagaaacatgccctgctagaggcagatgtggctgctcaccaggaccgaattgatggcatcaccattcaggcccgccagttccaagatgctggccattttgatgcagaaaacatcaagaagaaacaggaagccctcgtggctcgctatgaggcactcaaggagcccatggttgcccggaagcagaagctggccgattctctgcggttgcagcagctcttccgggatgttgaggatgaggagacgtggattcgagagaaagagcccattgccgcatctaccaacagaggtaaggatttaattggggtccagaatctgctaaagaaacatcaagccttacaagcagaaattgctggacatgaaccacgcatcaaagcagttacacagaaggggaatgccatggtggaggaaggccattttgctgcagaggatgtgaaggccaagcttcacgagctgaaccaaaagtgggaggcactgaaagccaaagcttcccagcgtcggcaggacctggaggactctctgcaggcccagcagtactttgctgatgctaacgaggctgaatcctggatgcgggagaaggaacccattgtgggcagcactgactatggcaaggacgaagactctgctgaggctctactgaagaaacacgaagctttgatgtcagatctcagtgcctacggcagcagcatccaggctttgcgagaacaagcacagtcctgccggcaacaagtggcccccacggatgatgagactgggaaggagctggtcttggctctctacgactatcaggagaagagtccccgagaggtcaccatgaagaagggagatatccttaccttactcaacagcaccaacaaggattggtggaaagtggaagtgaacgatcgtcagggttttgtgccggctgcgtacgtgaagaaattggaccccgcccagtcagcctcccgggagaatctcctggaggagcaaggcagcatagcactgcggcaggagcagattgacaatcagacacgcataactaaggaggccggcagtgtatctctgcgtatgaagcaggtggaagaactatatcattctctgctggaactgggtgagaagcgtaaaggcatgttggagaagagttgcaagaagtttatgttgttccgtgaagcgaatgaactacagcaatggatcaatgagaaggaagccgctctgacaagtgaggaggtcggagcagacttggagcaggttgaggtgctccagaagaagtttgatgacttccagaaggacctgaaggccaatgagtcacggttgaaggacattaacaaggtagctgaagacctggagtctgaaggtcttatggcagaggaggtgcaggctgtgcaacaacaggaagtgtatggcatgatgcccagggatgaaactgattccaagacagcctccccgtggaagtctgctcgtctgatggttcacaccgtggccacctttaattccatcaaggagctgaatgagcgctggcggtccctacagcagctggccgaggaacggagccagctcttgggcagcgcccatgaagtacagaggttccacagagatgctgatgaaaccaaagaatggattgaagagaagaatcaagctctaaacacagacaattatggacatgatctcgccagtgtccaggccctgcaacgcaagcatgagggcttcgagagggaccttgcggctctcggtgacaaggtaaactcccttggtgaaacagcagagcgcctgatccagtcccatcccgagtcagcagaagacctgcaggaaaagtgcacagagttaaaccaggcctggagcagcctggggaaacgtgcagatcagcgcaaggcaaagttgggtgactcccacgacctgcagcgcttccttagcgatttccgggacctcatgtcttggatcaatggaatacgggggttggtgtcctcagatgagctagccaaggatgtcaccggagctgaggcattgctggagcgacaccaggaacaccggacagaaatcgatgccagggctggcactttccaggcatttgagcagtttggacagcagctgttggctcacggacactatgccagccctgagatcaagcagaaacttgatattcttgaccaggagcgtgcagacctggagaaggcctgggttcagcgcaggatgatgctggatcagtgccttgaactgcagctgttccatcgggactgtgagcaagctgagaactggatggctgcccgggaggccttcttgaataccgaagacaaaggagactcactggacagcgtagaggctctgatcaaaaaacatgaagactttgacaaagcgattaacgtccaggaagagaagattgctgctctgcaggcctttgccgaccagctcatcgctgccggccattatgccaagggagacatttctagccggcgcaatgaggtcttggacaggtggcgacgtctgaaagcccagatgattgagaaaaggtcaaagctaggagaatctcaaaccctccaacagttcagccgggatgtggatgagattgaggcttggatcagtgaaaaattgcaaacagcgagtgatgagtcgtacaaggatcccaccaacatccagagcaagcaccagaagcaccaggcttttgaagcagagctgcatgccaacgctgaccggatccgtggggttatcgacatgggcaactccctcattgaacgtggagcctgtgccggcagtgaggatgctgtcaaggcccgcctggctgccttagctgaccagtggcagttcttggtgcaaaagtcagcggaaaagagccagaaactgaaagaagccaacaagcagcagaacttcaacacagggatcaaggactttgacttctggctgtctgaggtggaggccctgctggcatccgaagattatggcaaagacctggcttctgtgaacaacctgctgaaaaagcatcaactgctggaagcagatatatctgcccatgaggatcgcctgaaggacctgaacagccaggcagacagcctgatgaccagcagtgccttcgacacctcccaagtaaaggacaagagggacaccatcaacgggcgcttccagaagatcaagagcatggcggcctcccggcgagccaagctgaatgaatcccatcgcctgcaccagttcttccgggacatggatgacgaggagtcctggatcaaggagaagaagctgctggtgggctcagaggactacggccgggacctaactggcgtgcagaacctgaggaagaagcacaagcggctggaagcagaactggctgcgcatgagccggctattcagggtgtcctggacactggcaagaagctgtccgatgacaacaccatcgggaaagaggagatccagcagcggctggcgcagtttgtggagcactggaaagagctgaagcagctggcagctgcccggggtcagcggctggaagagtccttggaatatcagcagtttgtagccaatgtggaagaggaagaagcctggatcaatgagaaaatgaccctggtggccagcgaagattatggcgacactcttgccgccatccagggcttactgaagaaacatgaagcttttgagacagacttcaccgtccacaaggatcgcgtgaatgatgtctgcaccaatggacaagacctcattaagaagaacaatcaccatgaggagaacatctcttcaaagatgaagggcctgaacgggaaagtgtcagacctggagaaagctgcagcccagagaaaggcgaagctggatgagaactcggccttccttcagttcaactggaaggcggacgtggtggagtcctggatcggtgaaaaggagaacagcttgaagacagatgattatggccgagacctgtcttctgtgcagacgctcctcaccaaacaggaaacttttgacgctggcctacagcacatgccggtaccggctc

SEQ ID NO: 374313 - DNA, 844 bp, Homo sapiens
atgtacacagagcagagcatgtaagcacacagggagaagacagccatccacaagccaaggagagaggcctcagcagaaaccagcctgatgtttaaacactttgacaaggacaagtctggcaggctgaaccatcaggagttcaaatcttgcctgcgctccctgggctatgacctgcccatggtggaggaaggggaacctgaccctgagttcgaggcaatcctggacacggtggatccgaacagagatggccatgtctccttgcaagaatacatggctttcatgatcagccgcgaaactgagaacgtcaagtccagcgaggagattgagagcgccttccgggccctcagctcagagggaaagccttacgtgaccaaggaggagctctaccagaacctgacccgggaacaagccgactactgcgtctcccacatgaagccctacgtggacggcaagggccgcgagctccccaccgcgttcgactacgtggagttcacccgctcgcttttcgtgaactgagccactccctgggtcacccacccctcgctgcttgccctgcgtcgccttgctgcatgtccgctcctctgtgtgctctcactttccactgtaaccttaagcctgcttagcttggaataagacttaggagaaaatggtgcttcactaacccgcttccggtccagtcacaatcatcatgtcactgtggggacccagatctgtgtcttgaagcagctgccctcattccgacttcagaaaatcgaagcagctggctcctccccttgttctctctcccaccctcccccaaatctgttttcatgtaaaagacaaataaatgatgacttcccccaaa

SEQ ID NO: 374314 - DNA, 5765 bp, Homo sapiens
cgccactacccgctgcggagtgaacggtgtggagcggaggccgcggaggctcctcggtccttcagcacccctcggcccgacgcacccacgcccctcaccccccgagagccgaaaatggacccaagtggggtcaaagtgctggaaacagcagaggacatccaggagaggcggcagcaggtcctagaccgataccaccgcttcaaggaactctcaacccttaggcgtcagaagctggaagattcctatcgattccagttctttcaaagagatgctgaagagctggagaaatggatacaggaaaaacttcagattgcatctgatgagaattataaagacccaaccaacttgcagggaaagcttcagaagcatcaagcatttgaagctgaagtgcaggccaactcaggagccattgttaagctggatgaaactggaaacctgatgatctcagaagggcattttgcatctgaaaccatacggacccgtttgatggagctgcaccgccagtgggaattacttttggagaagatgcgagaaaaaggaatcaaactgctgcaggcccagaagttggtgcagtacttacgagaatgtgaggacgtgatggactggatcaatgacaaggaagcaattgttacttctgaagagctgggccaggatctggagcatgtagaggttttacagaagaaatttgaagagtttcaaacagatatggctgctcatgaagaaagagttaatgaagtgaaccagtttgctgccaaactcatacaggagcagcaccctgaggaggaactgatcaagactaagcaggatgaagtcaatgcagcctggcagcggctgaagggcctggctctgcagaggcaggggaagctctttggggcagcagaagttcagcgctttaacagggatgtggatgagactatcagttggattaaggaaaaggagcagttaatggcctctgatgattttggccgagacctggcaagtgttcaggctctgcttcggaagcacgagggtctggagagagatcttgctgctctagaagacaaggtcaaagccctgtgtgctgaggctgaccgcctgcaacagtcccaccctctgagtgcaacacagattcaagtgaagcgagaggaactgattacaaactgggagcagatccgcaccttggcggcagagagacatgcacggctcaatgattcatacaggcttcaacgcttccttgctgacttccgtgacctcaccagctgggtgactgagatgaaagccctcatcaatgcagatgagcttgccagtgatgtggctggggctgaagccctgctagatagacaccaagagcacaagggtgaaattgatgcccatgaagacagcttcaaatctgcagatgaatctggacaggcactgcttgctgctggtcactatgcctcagatgaagtgagggagaagctgaccgtcctttccgaggagagagcggcgctgctggagctgtgggagctgcgcaggcagcagtacgagcagtgcatggacctgcagctcttctaccgggacactgagcaggtggacaactggatgagcaagcaggaggcgttcctgttgaatgaagacttgggagattccttggatagtgtggaagcgcttcttaagaagcacgaagactttgagaaatcccttagtgcccaggaggaaaagattacagcattagatgaatttgcaaccaagctaattcagaacaaccactatgcaatggaagatgtggccactcgccgagatgctctgttgagccgccgcaatgcccttcacgagagagccatgcgtcgccgggcccagctagccgattctttccatctgcagcagtttttccgtgattctgatgagctcaagagttgggtcaatgagaagatgaaaactgccacagatgaagcttataaagatccatccaacctacaaggaaaagtacagaagcatcaggcttttgaggctgagctctcagcaaaccagagccgaattgatgccttggagaaagctggccaaaagctgattgatgtcaaccactatgccaaggatgaagtggcagctcgtatgaatgaggtgatcagtttgtggaagaaactgctagaggccactgaactgaaaggaataaagcttcgtgaagccaaccagcaacagcaatttaatcgcaatgttgaggatattgaattgtggctatatgaagtagaaggtcacttggcttcggatgattacggcaaagatcttaccaatgtgcagaacctccagaagaaacatgccctgctagaggcagatgtggctgctcaccaggaccgaattgatggcatcaccattcaggcccgccagttccaagatgctggccattttgatgcagaaaacatcaagaagaaacaggaagccctcgtggctcgctatgaggcactcaaggagcccatggttgcccggaagcagaagctggccgattctctgcggttgcagcagctcttccgggatgttgaggatgaggagacgtggattcgagagaaagagcccattgccgcatctaccaacagaggtaaggatttaattggggtccagaatctgctaaagaaacatcaagccttacaagcagaaattgctggacatgaaccacgcatcaaagcagttacacagaaggggaatgccatggtggaggaaggccattttgctgcagaggatgtgaaggccaagcttcacgagctgaaccaaaagtgggaggcactgaaagccaaagcttcccagcgtcggcaggacctggaggactctctgcaggcccagcagtactttgctgatgctaacgaggctgaatcctggatgcgggagaaggaacccattgtgggcagcactgactatggcaaggacgaagactctgctgaggctctactgaagaaacacgaagctttgatgtcagatctcagtgcctacggcagcagcatccaggctttgcgagaacaagcacagtcctgccggcaacaagtggcccccacggatgatgagactgggaaggagctggtcttggctctctacgactatcaggagaagagtccccgagaggtcaccatgaagaagggagatatccttaccttactcaacagcaccaacaaggattggtggaaagtggaagtgaacgatcgtcagggttttgtgccggctgcgtacgtgaagaaattggaccccgcccagtcagcctcccgggagaatctcctggaggagcaaggcagcatagcactgcggcaggagcagattgacaatcagacacgcataactaaggaggccggcagtgtatctctgcgtatgaagcaggtggaagaactatatcattctctgctggaactgggtgagaagcgtaaaggcatgttggagaagagttgcaagaagtttatgttgttccgtgaagcgaatgaactacagcaatggatcaatgagaaggaagccgctctgacaagtgaggaggtcggagcagacttggagcaggttgaggtgctccagaagaagtttgatgacttccagaaggacctgaaggccaatgagtcacggttgaaggacattaacaaggtagctgaagacctggagtctgaaggtcttatggcagaggaggtgcaggctgtgcaacaacaggaagtgtatggcatgatgcccagggatgaaactgattccaagacagcctccccgtggaagtctgctcgtctgatggttcacaccgtggccacctttaattccatcaaggagctgaatgagcgctggcggtccctacagcagctggccgaggaacggagccagctcttgggcagcgcccatgaagtacagaggttccacagagatgctgatgaaaccaaagaatggattgaagagaagaatcaagctctaaacacagacaattatggacatgatctcgccagtgtccaggccctgcaacgcaagcatgagggcttcgagagggaccttgcggctctcggtgacaaggtaaactcccttggtgaaacagcagagcgcctgatccagtcccatcccgagtcagcagaagacctgcaggaaaagtgcacagagttaaaccaggcctggagcagcctggggaaacgtgcagatcagcgcaaggcaaagttgggtgactcccacgacctgcagcgcttccttagcgatttccgggacctcatgtcttggatcaatggaatacgggggttggtgtcctcagatgagctagccaaggatgtcaccggagctgaggcattgctggagcgacaccaggaacaccggacagaaatcgatgccagggctggcactttccaggcatttgagcagtttggacagcagctgttggctcacggacactatgccagccctgagatcaagcagaaacttgatattcttgaccaggagcgtgcagacctggagaaggcctgggttcagcgcaggatgatgctggatcagtgccttgaactgcagctgttccatcgggactgtgagcaagctgagaactggatggctgcccgggaggccttcttgaataccgaagacaaaggagactcactggacagcgtagaggctctgatcaaaaaacatgaagactttgacaaagcgattaacgtccaggaagagaagattgctgctctgcaggcctttgccgaccagctcatcgctgccggccattatgccaagggagacatttctagccggcgcaatgaggtcttggacaggtggcgacgtctgaaagcccagatgattgagaaaaggtcaaagctaggagaatctcaaaccctccaacagttcagccgggatgtggatgagattgaggcttggatcagtgaaaaattgcaaacagcgagtgatgagtcgtacaaggatcccaccaacatccagagcaagcaccagaagcaccaggcttttgaagcagagctgcatgccaacgctgaccggatccgtggggttatcgacatgggcaactccctcattgaacgtggagcctgtgccggcagtgaggatgctgtcaaggcccgcctggctgccttagctgaccagtggcagttcttggtgcaaaagtcagcggaaaagagccagaaactgaaagaagccaacaagcagcagaacttcaacacagggatcaaggactttgacttctggctgtctgaggtggaggccctgctggcatccgaagattatggcaaagacctggcttctgtgaacaacctgctgaaaaagcatcaactgctggaagcagatatatctgcccatgaggatcgcctgaaggacctgaacagccaggcagacagcctgatgaccagcagtgccttcgacacctcccaagtaaaggacaagagggacaccatcaacgggcgcttccagaagatcaagagcatggcggcctcccggcgagccaagctgaatgaatcccatcgcctgcaccagttcttccgggacatggatgacgaggagtcctggatcaaggagaagaagctgctggtgggctcagaggactacggccgggacctaactggcgtgcagaacctgaggaagaagcacaagcggctggaagcagaactggctgcgcatgagccggctattcagggtgtcctggacactggcaagaagctgtccgatgacaacaccatcgggaaagaggagatccagcagcggctggcgcagtttgtggagcactggaaagagctgaagcagctggcagctgcccggggtcagcggctgtaagagaacctggacagtcagcagtttgtaatcgtcatagcagagtgtctgca

SEQ ID NO: 374315 - DNA, 5496 bp, Homo sapiens
cgccactacccgctgcggagtgaacggtgtggagcggaggccgcggaggctcctcggtccttcagcacccctcggcccgacgcacccacgcccctcaccccccgagagccgaaaatggacccaagtggggtcaaagtgctggaaacagcagaggacatccaggagaggcggcagcaggtcctagaccgataccaccgcttcaaggaactctcaacccttaggcgtcagaagctggaagattcctatcgattccagttctttcaaagagatgctgaagagctggagaaatggatacaggaaaaacttcagattgcatctgatgagaattataaagacccaaccaacttgcagggaaagcttcagaagcatcaagcatttgaagctgaagtgcaggccaactcaggagccattgttaagctggatgaaactggaaacctgatgatctcagaagggcattttgcatctgaaaccatacggacccgtttgatggagctgcaccgccagtgggaattacttttggagaagatgcgagaaaaaggaatcaaactgctgcaggcccagaagttggtgcagtacttacgagaatgtgaggacgtgatggactggatcaatgacaaggaagcaattgttacttctgaagagctgggccaggatctggagcatgtagaggttttacagaagaaatttgaagagtttcaaacagatatggctgctcatgaagaaagagttaatgaagtgaaccagtttgctgccaaactcatacaggagcagcaccctgaggaggaactgatcaagactaagcaggatgaagtcaatgcagcctggcagcggctgaagggcctggctctgcagaggcaggggaagctctttggggcagcagaagttcagcgctttaacagggatgtggatgagactatcagttggattaaggaaaaggagcagttaatggcctctgatgattttggccgagacctggcaagtgttcaggctctgcttcggaagcacgagggtctggagagagatcttgctgctctagaagacaaggtcaaagccctgtgtgctgaggctgaccgcctgcaacagtcccaccctctgagtgcaacacagattcaagtgaagcgagaggaactgattacaaactgggagcagatccgcaccttggcggcagagagacatgcacggctcaatgattcatacaggcttcaacgcttccttgctgacttccgtgacctcaccagctgggtgactgagatgaaagccctcatcaatgcagatgagcttgccagtgatgtggctggggctgaagccctgctagatagacaccaagagcacaagggtgaaattgatgcccatgaagacagcttcaaatctgcagatgaatctggacaggcactgcttgctgctggtcactatgcctcagatgaagtgagggagaagctgaccgtcctttccgaggagagagcggcgctgctggagctgtgggagctgcgcaggcagcagtacgagcagtgcatggacctgcagctcttctaccgggacactgagcaggtggacaactggatgagcaagcaggaggcgttcctgttgaatgaagacttgggagattccttggatagtgtggaagcgcttcttaagaagcacgaagactttgagaaatcccttagtgcccaggaggaaaagattacagcattagatgaatttgcaaccaagctaattcagaacaaccactatgcaatggaagatgtggccactcgccgagatgctctgttgagccgccgcaatgcccttcacgagagagccatgcgtcgccgggcccagctagccgattctttccatctgcagcagtttttccgtgattctgatgagctcaagagttgggtcaatgagaagatgaaaactgccacagatgaagcttataaagatccatccaacctacaaggaaaagtacagaagcatcaggcttttgaggctgagctctcagcaaaccagagccgaattgatgccttggagaaagctggccaaaagctgattgatgtcaaccactatgccaaggatgaagtggcagctcgtatgaatgaggtgatcagtttgtggaagaaactgctagaggccactgaactgaaaggaataaagcttcgtgaagccaaccagcaacagcaatttaatcgcaatgttgaggatattgaattgtggctatatgaagtagaaggtcacttggcttcggatgattacggcaaagatcttaccaatgtgcagaacctccagaagaaacatgccctgctagaggcagatgtggctgctcaccaggaccgaattgatggcatcaccattcaggcccgccagttccaagatgctggccattttgatgcagaaaacatcaagaagaaacaggaagccctcgtggctcgctatgaggcactcaaggagcccatggttgcccggaagcagaagctggccgattctctgcggttgcagcagctcttccgggatgttgaggatgaggagacgtggattcgagagaaagagcccattgccgcatctaccaacagaggtaaggatttaattggggtccagaatctgctaaagaaacatcaagccttacaagcagaaattgctggacatgaaccacgcatcaaagcagttacacagaaggggaatgccatggtggaggaaggccattttgctgcagaggatgtgaaggccaagcttcacgagctgaaccaaaagtgggaggcactgaaagccaaagcttcccagcgtcggcaggacctggaggactctctgcaggcccagcagtactttgctgatgctaacgaggctgaatcctggatgcgggagaaggaacccattgtgggcagcactgactatggcaaggacgaagactctgctgaggctctactgaagaaacacgaagctttgatgtcagatctcagtgcctacggcagcagcatccaggctttgcgagaacaagcacagtcctgccggcaacaagtggcccccacggatgatgagactgggaaggagctggtcttggctctctacgactatcaggagaagagtccccgagaggtcaccatgaagaagggagatatccttaccttactcaacagcaccaacaaggattggtggaaagtggaagtgaacgatcgtcagggttttgtgccggctgcgtacgtgaagaaattggaccccgcccagtcagcctcccgggagaatctcctggaggagcaaggcagcatagcactgcggcaggagcagattgacaatcagacacgcataactaaggaggccggcagtgtatctctgcgtatgaagcaggtggaagaactgtgagtaggctgagagtcttgcagagcaccaatgtccactgctaccctatccattctccctctgccgcttctcttgaaggcctttgtccatccagaaagatgaggtggtgggaggaactgcctgtccgtgcagcagctttggctcacaagggaagaggtcgcggtgcagctgtgtcggtcgatgactgcttatctcattggttgcttccatgtgcagctgtgtgttcagagtggtgttggttctccctcctgttggtttttgtggtggaccagccactatcagcagcaaacctgaaggcctgttctatagttttccttagtaggaaggaaatcatatgcttctcttaaagtgctctgattcttggtaactcattgcttttttattttactttgggacacttagatttgatgatgattctagttttttttaatttttagttttttattgtttgttgttttcgtgttcaaagataatatttcagccttttgtattttagttcccgagggttagaatattctttgattcttaagaaatctttcaagtaacagaatggcacagatactcagtactgtgcctgattttccttctgaacttgccaaaactttctgagagctgaatgtatcattttagaaatgtcctactaatatggagataaaacatcctatatgaggatattttaaagctcagtgtaccctcccccacctcaccccagcctgggggctcttcagagaattataaaagacagaaaaaccctctgtatacattctgcccagcaagttcatctcgtctctccactgtagttgcatgagccctgtgttactgtgctaagcgcttggtttcagtcccttgtggttgtgttgttctaagtgcagaatcggcctggggataagtgtgcctggctgttctagccacctggttgtgaacagtacagtgtgcgcatatctctcaggctgtggcgtgggtacttgggatcctcgtcttcatctgataactctgttactagggcatcatcattacaaactcgtagcctggaatccacatcttggagacacctcgtggtttgcctttatgttagcatctacagctaactgccttccttgtccctcttgtcaccctcttgaattccatcagatatcattctctgctggaactgggtgagaagcgtaaaggcatgttggagaagagttgcaagaagtttatgttgttccgtgaagcgaatgaactacagcaatggatcaatgagaaggaagccgctctgacaagtgaggaggtcggagcagacttggagcaggttgaggtgctccagaagaagtttgatgacttccagaaggacctgaaggccaatgagtcacggttgaaggacattaacaaggtagctgaagacctggagtctgaaggtcttatggcagaggaggtgcaggctgtgcaacaacaggaagtgtatggcatgatgcccagggtaagtttcgggtgctgtgtgtggatcttgaacatgagaaggacttaaatcttgggaagaatatcaagccaagaacttcttcatcagaattgctgttcctgaacctcagatgccttttgtgtgtaaagatttgtggaaaactccaaaaattgatttctttttttttgagacggagtctcactctgtcaaccaggctggagtgcagtggtgtgatcttggctcactgcaacctccacctcccaggttcaagcgattctcccatctcagcttcctgagtagctggaattccacgcatgtggcaccacacccagctaatttttgtatttttagtagagatggggtttcaccatgttgtccaggctggtctcgaactcccaacctcaggtgatctgcccacctcagcttcccagagtgctgggattacagacgtgagccaccacgcccagcccagaaattgatttctatttgccattctccaaaagacaaaaaaagttggttttttttttttttcggtcttttgtttgtttgtttgttttttaagagatagggtcttgctttgttgcccagactggaggtcagtggcttttcacagctgcagttatagcctactgcagcctcgaactcttggcctcaagcaatcctcccacctcagcctcccaggtatctaggacaacaggcatgcaacacaaagcacagctctaaaaaaa

SEQ ID NO: 374316 - DNA, 3673 bp, Homo sapiens
cgccactacccgctgcggagtgaacggtgtggagcggaggccgcggaggctcctcggtccttcagcacccctcggcccgacgcacccacgcccctcaccccccgagagccgaaaatggacccaagtggggtcaaagtgctggaaacagcagaggacatccaggagaggcggcagcaggtcctagaccgataccaccgcttcaaggaactctcaacccttaggcgtcagaagctggaagattcctatcgattccagttctttcaaagagatgctgaagagctggagaaatggatacaggaaaaacttcagattgcatctgatgagaattataaagacccaaccaacttgcagggaaagcttcagaagcatcaagcatttgaagctgaagtgcaggccaactcaggagccattgttaagctggatgaaactggaaacctgatgatctcagaagggcattttgcatctgaaaccatacggacccgtttgatggagctgcaccgccagtgggaattacttttggagaagatgcgagaaaaaggaatcaaactgctgcaggcccagaagttggtgcagtacttacgagaatgtgaggacgtgatggactggatcaatgacaaggaagcaattgttacttctgaagagctgggccaggatctggagcatgtagaggttttacagaagaaatttgaagagtttcaaacagatatggctgctcatgaagaaagagttaatgaagtgaaccagtttgctgccaaactcatacaggagcagcaccctgaggaggaactgatcaagactaagcaggatgaagtcaatgcagcctggcagcggctgaagggcctggctctgcagaggcaggggaagctctttggggcagcagaagttcagcgctttaacagggatgtggatgagactatcagttggattaaggaaaaggagcagttaatggcctctgatgattttggccgagacctggcaagtgttcaggctctgcttcggaagcacgagggtctggagagagatcttgctgctctagaagacaaggtcaaagccctgtgtgctgaggctgaccgcctgcaacagtcccaccctctgagtgcaacacagattcaagtgaagcgagaggaactgattacaaactgggagcagatccgcaccttggcggcagagagacatgcacggctcaatgattcatacaggcttcaacgcttccttgctgacttccgtgacctcaccagctgggtgactgagatgaaagccctcatcaatgcagatgagcttgccagtgatgtggctggggctgaagccctgctagatagacaccaagagcacaagggtgaaattgatgcccatgaagacagcttcaaatctgcagatgaatctggacaggcactgcttgctgctggtcactatgcctcagatgaagtgagggagaagctgaccgtcctttccgaggagagagcggcgctgctggagctgtgggagctgcgcaggcagcagtacgagcagtgcatggacctgcagctcttctaccgggacactgagcaggtggacaactggatgagcaagcaggaggcgttcctgttgaatgaagacttgggagattccttggatagtgtggaagcgcttcttaagaagcacgaagactttgagaaatcccttagtgcccaggaggaaaagattacagcattagatgaatttgcaaccaagctaattcagaacaaccactatgcaatggaagatgtggccactcgccgagatgctctgttgagccgccgcaatgcccttcacgagagagccatgcgtcgccgggcccagctagccgattctttccatctgcagcagtttttccgtgattctgatgagctcaagagttgggtcaatgagaagatgaaaactgccacagatgaagcttataaagatccatccaacctacaaggaaaagtacagaagcatcaggcttttgaggctgagctctcagcaaaccagagccgaattgatgccttggagaaagctggccaaaagctgattgatgtcaaccactatgccaaggatgaagtggcagctcgtatgaatgaggtgatcagtttgtggaagaaactgctagaggccactgaactgaaaggaataaagcttcgtgaagccaaccagcaacagcaatttaatcgcaatgttgaggatattgaattgtggctatatgaagtagaaggtcacttggcttcggatgattacggcaaagatcttaccaatgtgcagaacctccagaagaaacatgccctgctagaggcagatgtggctgctcaccaggaccgaattgatggcatcaccattcaggcccgccagttccaagatgctggccattttgatgcagaaaacatcaagaagaaacaggaagccctcgtggctcgctatgaggcactcaaggagcccatggttgcccggaagcagaagctggccgattctctgcggttgcagcagctcttccgggatgttgaggatgaggagacgtggattcgagagaaagagcccattgccgcatctaccaacagaggtaaggatttaattggggtccagaatctgctaaagaaacatcaagccttacaagcagaaattgctggacatgaaccacgcatcaaagcagttacacagaaggggaatgccatggtggaggaaggccattttgctgcagaggatgtgaaggccaagcttcacgagctgaaccaaaagtgggaggcactgaaagccaaagcttcccagcgtcggcaggacctggaggactctctgcaggcccagcagtactttgctgatgctaacgaggctgaatcctggatgcgggagaaggaacccattgtgggcagcactgactatggcaaggacgaagactctgctgaggctctactgaagaaacacgaagctttgatgtcagatctcagtgcctacggcagcagcatccaggctttgcgagaacaagcacagtcctgccggcaacaagtggcccccacggatgatgagactgggaaggagctggtcttggctctctacgactatcaggagaagagtccccgagaggtcaccatgaagaagggagatatccttaccttactcaacagcaccaacaaggattggtggaaagtggaagtgaacgatcgtcagggttttgtgccggctgcgtacgtgaagaaattggaccccgcccagtcagcctcccgggagaatctcctggaggagcaaggcagcatagcactgcggcaggagcagattgacaatcaatatcattctctgctggaactgggtgagaagcgtaaaggcatgttggagaagagttgcaagaagtttatgttgttccgtgaagcgaatgaactacagcaatggatcaatgagaaggaagccgctctgacaagtgaggaggtcggagcagacttggagcaggttgaggtgctccagaagaagtttgatgacttccagaaggacctgaaggccaatgagtcacggttgaaggacattaacaaggtagctgaagacctggagtctgaaggtcttatggcagaggaggtgcaggctgtgcaacaacaggaagtgtatggcatgatgcccagggatgaaactgattccaagacagccaacagccaacagccatttaggtaacagccatttaggtaacagccattatagg

SEQ ID NO: 374317 - DNA, 3580 bp, Homo sapiens
cgccactacccgctgcggagtgaacggtgtggagcggaggccgcggaggctcctcggtccttcagcacccctcggcccgacgcacccacgcccctcaccccccgagagccgaaaatggacccaagtggggtcaaagtgctggaaacagcagaggacatccaggagaggcggcagcaggtcctagaccgataccaccgcttcaaggaactctcaacccttaggcgtcagaagctggaagattcctatcgattccagttctttcaaagagatgctgaagagctggagaaatggatacaggaaaaacttcagattgcatctgatgagaattataaagacccaaccaacttgcagggaaagcttcagaagcatcaagcatttgaagctgaagtgcaggccaactcaggagccattgttaagctggatgaaactggaaacctgatgatctcagaagggcattttgcatctgaaaccatacggacccgtttgatggagctgcaccgccagtgggaattacttttggagaagatgcgagaaaaaggaatcaaactgctgcaggcccagaagttggtgcagtacttacgagaatgtgaggacgtgatggactggatcaatgacaaggaagcaattgttacttctgaagagctgggccaggatctggagcatgtagaggttttacagaagaaatttgaagagtttcaaacagatatggctgctcatgaagaaagagttaatgaagtgaaccagtttgctgccaaactcatacaggagcagcaccctgaggaggaactgatcaagactaagcaggatgaagtcaatgcagcctggcagcggctgaagggcctggctctgcagaggcaggggaagctctttggggcagcagaagttcagcgctttaacagggatgtggatgagactatcagttggattaaggaaaaggagcagttaatggcctctgatgattttggccgagacctggcaagtgttcaggctctgcttcggaagcacgagggtctggagagagatcttgctgctctagaagacaaggtcaaagccctgtgtgctgaggctgaccgcctgcaacagtcccaccctctgagtgcaacacagattcaagtgaagcgagaggaactgattacaaactgggagcagatccgcaccttggcggcagagagacatgcacggctcaatgattcatacaggcttcaacgcttccttgctgacttccgtgacctcaccagctgggtgactgagatgaaagccctcatcaatgcagatgagcttgccagtgatgtggctggggctgaagccctgctagatagacaccaagagcacaagggtgaaattgatgcccatgaagacagcttcaaatctgcagatgaatctggacaggcactgcttgctgctggtcactatgcctcagatgaagtgagggagaagctgaccgtcctttccgaggagagagcggcgctgctggagctgtgggagctgcgcaggcagcagtacgagcagtgcatggacctgcagctcttctaccgggacactgagcaggtggacaactggatgagcaagcaggaggcgttcctgttgaatgaagacttgggagattccttggatagtgtggaagcgcttcttaagaagcacgaagactttgagaaatcccttagtgcccaggaggaaaagattacagcattagatgaatttgcaaccaagctaattcagaacaaccactatgcaatggaagatgtggccactcgccgagatgctctgttgagccgccgcaatgcccttcacgagagagccatgcgtcgccgggcccagctagccgattctttccatctgcagcagtttttccgtgattctgatgagctcaagagttgggtcaatgagaagatgaaaactgccacagatgaagcttataaagatccatccaacctacaaggaaaagtacagaagcatcaggcttttgaggctgagctctcagcaaaccagagccgaattgatgccttggagaaagctggccaaaagctgattgatgtcaaccactatgccaaggatgaagtggcagctcgtatgaatgaggtgatcagtttgtggaagaaactgctagaggccactgaactgaaaggaataaagcttcgtgaagccaaccagcaacagcaatttaatcgcaatgttgaggatattgaattgtggctatatgaagtagaaggtcacttggcttcggatgattacggcaaagatcttaccaatgtgcagaacctccagaagaaacatgccctgctagaggcagatgtggctgctcaccaggaccgaattgatggcatcaccattcaggcccgccagttccaagatgctggccattttgatgcagaaaacatcaagaagaaacaggaagccctcgtggctcgctatgaggcactcaaggagcccatggttgcccggaagcagaagctggccgattctctgcggttgcagcagctcttccgggatgttgaggatgaggagacgtggattcgagagaaagagcccattgccgcatctaccaacagaggtaaggatttaattggggtccagaatctgctaaagaaacatcaagccttacaagcagaaattgctggacatgaaccacgcatcaaagcagttacacagaaggggaatgccatggtggaggaaggccattttgctgcagaggatgtgaaggccaagcttcacgagctgaaccaaaagtgggaggcactgaaagccaaagcttcccagcgtcggcaggacctggaggactctctgcaggcccagcagtactttgctgatgctaacgaggctgaatcctggatgcgggagaaggaacccattgtgggcagcactgactatggcaaggacgaagactctgctgaggctctactgaagaaacacgaagctttgatgtcagatctcagtgcctacggcagcagcatccaggctttgcgagaacaagcacagtcctgccggcaacaagtggcccccacggatgatgagactgggaaggagctggtcttggctctctacgactatcaggagaagagtccccgagaggtcaccatgaagaagggagatatccttaccttactcaacagcaccaacaaggattggtggaaagtggaagtgaacgatcgtcagggttttgtgccggctgcgtacgtgaagaaattggaccccgcccagtcagcctcccgggagaatctcctggaggagcaaggcagcatagcactgcggcaggagcagattgacaatcagacacgcataactaaggaggccggcagtgtatctctgcgtatgaagcaggtggaagaactatatcattctctgctggaactgggtgagaagcgtaaaggcatgttggagaagagttgcaagaagtttatgttgttccgtgaagcgaatgaactacagcaatggtttaacacaggagaaaaagtaagaaacaatgaggacgtcggagcggacggggcccagcaggcggcgctccgaaagaaggttgataagctaccatgaagaacgtcgaagcaaccagtgagctcacgggcgatagcgagcacaatcagga

SEQ ID NO: 374318 - DNA, 3359 bp, Homo sapiens
cgccactacccgctgcggagtgaacggtgtggagcggaggccgcggaggctcctcggtccttcagcacccctcggcccgacgcacccacgcccctcaccccccgagagccgaaaatggacccaagtggggtcaaagtgctggaaacagcagaggacatccaggagaggcggcagcaggtcctagaccgataccaccgcttcaaggaactctcaacccttaggcgtcagaagctggaagattcctatcgattccagttctttcaaagagatgctgaagagctggagaaatggatacaggaaaaacttcagattgcatctgatgagaattataaagacccaaccaacttgcagggaaagcttcagaagcatcaagcatttgaagctgaagtgcaggccaactcaggagccattgttaagctggatgaaactggaaacctgatgatctcagaagggcattttgcatctgaaaccatacggacccgtttgatggagctgcaccgccagtgggaattacttttggagaagatgcgagaaaaaggaatcaaactgctgcaggcccagaagttggtgcagtacttacgagaatgtgaggacgtgatggactggatcaatgacaaggaagcaattgttacttctgaagagctgggccaggatctggagcatgtagaggttttacagaagaaatttgaagagtttcaaacagatatggctgctcatgaagaaagagttaatgaagtgaaccagtttgctgccaaactcatacaggagcagcaccctgaggaggaactgatcaagactaagcaggatgaagtcaatgcagcctggcagcggctgaagggcctggctctgcagaggcaggggaagctctttggggcagcagaagttcagcgctttaacagggatgtggatgagactatcagttggattaaggaaaaggagcagttaatggcctctgatgattttggccgagacctggcaagtgttcaggctctgcttcggaagcacgagggtctggagagagatcttgctgctctagaagacaaggtcaaagccctgtgtgctgaggctgaccgcctgcaacagtcccaccctctgagtgcaacacagattcaagtgaagcgagaggaactgattacaaactgggagcagatccgcaccttggcggcagagagacatgcacggctcaatgattcatacaggcttcaacgcttccttgctgacttccgtgacctcaccagctgggtgactgagatgaaagccctcatcaatgcagatgagcttgccagtgatgtggctggggctgaagccctgctagatagacaccaagagcacaagggtgaaattgatgcccatgaagacagcttcaaatctgcagatgaatctggacaggcactgcttgctgctggtcactatgcctcagatgaagtgagggagaagctgaccgtcctttccgaggagagagcggcgctgctggagctgtgggagctgcgcaggcagcagtacgagcagtgcatggacctgcagctcttctaccgggacactgagcaggtggacaactggatgagcaagcaggaggcgttcctgttgaatgaagacttgggagattccttggatagtgtggaagcgcttcttaagaagcacgaagactttgagaaatcccttagtgcccaggaggaaaagattacagcattagatgaatttgcaaccaagctaattcagaacaaccactatgcaatggaagatgtggccactcgccgagatgctctgttgagccgccgcaatgcccttcacgagagagccatgcgtcgccgggcccagctagccgattctttccatctgcagcagtttttccgtgattctgatgagctcaagagttgggtcaatgagaagatgaaaactgccacagatgaagcttataaagatccatccaacctacaaggaaaagtacagaagcatcaggcttttgaggctgagctctcagcaaaccagagccgaattgatgccttggagaaagctggccaaaagctgattgatgtcaaccactatgccaaggatgaagtggcagctcgtatgaatgaggtgatcagtttgtggaagaaactgctagaggccactgaactgaaaggaataaagcttcgtgaagccaaccagcaacagcaatttaatcgcaatgttgaggatattgaattgtggctatatgaagtagaaggtcacttggcttcggatgattacggcaaagatcttaccaatgtgcagaacctccagaagaaacatgccctgctagaggcagatgtggctgctcaccaggaccgaattgatggcatcaccattcaggcccgccagttccaagatgctggccattttgatgcagaaaacatcaagaagaaacaggaagccctcgtggctcgctatgaggcactcaaggagcccatggttgcccggaagcagaagctggccgattctctgcggttgcagcagctcttccgggatgttgaggatgaggagacgtggattcgagagaaagagcccattgccgcatctaccaacagaggtaaggatttaattggggtccagaatctgctaaagaaacatcaagccttacaagcagaaattgctggacatgaaccacgcatcaaagcagttacacagaaggggaatgccatggtggaggaaggccattttgctgcagaggatgtgaaggccaagcttcacgagctgaaccaaaagtgggaggcactgaaagccaaagcttcccagcgtcggcaggacctggaggactctctgcaggcccagcagtactttgctgatgctaacgaggctgaatcctggatgcgggagaaggaacccattgtgggcagcactgactatggcaaggacgaagactctgctgaggctctactgaagaaacacgaagctttgatgtcagatctcagtgcctacggcagcagcatccaggctttgcgagaacaagcacagtcctgccggcaacaagtggcccccacggatgatgagactgggaaggagctggtcttggctctctacgactatcaggagaagagtccccgagaggtcaccatgaagaagggagatatccttaccttactcaacagcaccaacaaggattggtggaaagtggaagtgaacgatcgtcagggttttgtgccggctgcgtacgtgaagaaattgaactttctacacaattgtctaccacagaacctctaaaatattcgtttcactgtacaactcaaaggccttaaaaattgacaccatgaaagattggattcactgtaaagactgatatattgttttagttttattatgtttactttaaaatgtgatctcaaggtgtagaaattgaa

SEQ ID NO: 374319 - DNA, 2866 bp, Homo sapiens
cgccactacccgctgcggagtgaacggtgtggagcggaggccgcggaggctcctcggtccttcagcacccctcggcccgacgcacccacgcccctcaccccccgagagccgaaaatggacccaagtggggtcaaagtgctggaaacagcagaggacatccaggagaggcggcagcaggtcctagaccgataccaccgcttcaaggaactctcaacccttaggcgtcagaagctggaagattcctatcgattccagttctttcaaagagatgctgaagagctggagaaatggatacaggaaaaacttcagattgcatctgatgagaattataaagacccaaccaacttgcagggaaagcttcagaagcatcaagcatttgaagctgaagtgcaggccaactcaggagccattgttaagctggatgaaactggaaacctgatgatctcagaagggcattttgcatctgaaaccatacggacccgtttgatggagctgcaccgccagtgggaattacttttggagaagatgcgagaaaaaggaatcaaactgctgcaggcccagaagttggtgcagtacttacgagaatgtgaggacgtgatggactggatcaatgacaaggaagcaattgttacttctgaagagctgggccaggatctggagcatgtagaggttttacagaagaaatttgaagagtttcaaacagatatggctgctcatgaagaaagagttaatgaagtgaaccagtttgctgccaaactcatacaggagcagcaccctgaggaggaactgatcaagactaagcaggatgaagtcaatgcagcctggcagcggctgaagggcctggctctgcagaggcaggggaagctctttggggcagcagaagttcagcgctttaacagggatgtggatgagactatcagttggattaaggaaaaggagcagttaatggcctctgatgattttggccgagacctggcaagtgttcaggctctgcttcggaagcacgagggtctggagagagatcttgctgctctagaagacaaggtcaaagccctgtgtgctgaggctgaccgcctgcaacagtcccaccctctgagtgcaacacagattcaagtgaagcgagaggaactgattacaaactgggagcagatccgcaccttggcggcagagagacatgcacggctcaatgattcatacaggcttcaacgcttccttgctgacttccgtgacctcaccagctgggtgactgagatgaaagccctcatcaatgcagatgagcttgccagtgatgtggctggggctgaagccctgctagatagacaccaagagcacaagggtgaaattgatgcccatgaagacagcttcaaatctgcagatgaatctggacaggcactgcttgctgctggtcactatgcctcagatgaagtgagggagaagctgaccgtcctttccgaggagagagcggcgctgctggagctgtgggagctgcgcaggcagcagtacgagcagtgcatggacctgcagctcttctaccgggacactgagcaggtggacaactggatgagcaagcaggaggcgttcctgttgaatgaagacttgggagattccttggatagtgtggaagcgcttcttaagaagcacgaagactttgagaaatcccttagtgcccaggaggaaaagattacagcattagatgaatttgcaaccaagctaattcagaacaaccactatgcaatggaagatgtggccactcgccgagatgctctgttgagccgccgcaatgcccttcacgagagagccatgcgtcgccgggcccagctagccgattctttccatctgcagcagtttttccgtgattctgatgagctcaagagttgggtcaatgagaagatgaaaactgccacagatgaagcttataaagatccatccaacctacaaggaaaagtacagaagcatcaggcttttgaggctgagctctcagcaaaccagagccgaattgatgccttggagaaagctggccaaaagctgattgatgtcaaccactatgccaaggatgaagtggcagctcgtatgaatgaggtgatcagtttgtggaagaaactgctagaggccactgaactgaaaggaataaagcttcgtgaagccaaccagcaacagcaatttaatcgcaatgttgaggatattgaattgtggctatatgaagtagaaggtcacttggcttcggatgattacggcaaagatcttaccaatgtgcagaacctccagaagaaacatgccctgctagaggcagatgtggctgctcaccaggaccgaattgatggcatcaccattcaggcccgccagttccaagatgctggccattttgatgcagaaaacatcaagaagaaacaggaagccctcgtggctcgctatgaggcactcaaggagcccatggttgcccggaagcagaagctggccgattctctgcggttgcagcagctcttccgggatgttgaggatgaggagacgtggattcgagagaaagagcccattgccgcatctaccaacagaggtaaggatttaattggggtccagaatctgctaaagaaacatcaagccttacaagcagaaattgctggacatgaaccacgcatcaaagcagttacacagaaggtggtcccgggttacccgggacctcctttgtttgcagcctaaattctcatcacctggtggtcccaaatacttgaaagtatagatttaatttgaagtggtttcagaccagggatgcctgctatgtgcctgacaaaagcaaatgcatccctctctggaggaggcctcttaggcctcaaagaatacccagagggaatttttcaacgatgacaagctc

SEQ ID NO: 374320 - DNA, 1742 bp, Homo sapiens
cgccactacccgctgcggagtgaacggtgtggagcggaggccgcggaggctcctcggtccttcagcacccctcggcccgacgcacccacgcccctcaccccccgagagccgaaaatggacccaagtggggtcaaagtgctggaaacagcagaggacatccaggagaggcggcagcaggtcctagaccgataccaccgcttcaaggaactctcaacccttaggcgtcagaagctggaagattcctatcgattccagttctttcaaagagatgctgaagagctggagaaatggatacaggaaaaacttcagattgcatctgatgagaattataaagacccaaccaacttgcagggaaagcttcagaagcatcaagcatttgaagctgaagtgcaggccaactcaggagccattgttaagctggatgaaactggaaacctgatgatctcagaagggcattttgcatctgaaaccatacggacccgtttgatggagctgcaccgccagtgggaattacttttggagaagatgcgagaaaaaggaatcaaactgctgcaggcccagaagttggtgcagtacttacgagaatgtgaggacgtgatggactggatcaatgacaaggaagcaattgttacttctgaagagctgggccaggatctggagcatgtagaggttttacagaagaaatttgaagagtttcaaacagatatggctgctcatgaagaaagagttaatgaagtgaaccagtttgctgccaaactcatacaggagcagcaccctgaggaggaactgatcaagactaagcaggatgaagtcaatgcagcctggcagcggctgaagggcctggctctgcagaggcaggggaagctctttggggcagcagaagttcagcgctttaacagggatgtggatgagactatcagttggattaaggaaaaggagcagttaatggcctctgatgattttggccgagacctggcaagtgttcaggctctgcttcggaagcacgagggtctggagagagatcttgctgctctagaagacaaggtcaaagccctgtgtgctgaggctgaccgcctgcaacagtcccaccctctgagtgcaacacagattcaagtgaagcgagaggaactgattacaaactgggagcagatccgcaccttggcggcagagagacatgcacggctcaatgattcatacaggcttcaacgcttccttgctgacttccgtgacctcaccagctgggtgactgagatgaaagccctcatcaatgcagatgagcttgccagtgatgtggctggggctgaagccctgctagatagacaccaagagcacaagggtgaaattgatgcccatgaagacagcttcaaatctgcagatgaatctggacaggcactgcttgctgctggtcactatgcctcagatgaagtgagggagaagctgaccgtcctttccgaggagagagcggcgctgctggagctgtgggagctgcgcaggcagcagtacgagcagtgcatggacctgcagctcttctaccgggacactgagcaggtggacaactggatgagcaagcaggaggcgttcctgttgaatgaagacttgggagattccttggatagtgtggaagcgcttcttaagaagcacgaagactttgagaaatcccttagtgcccaggaggaaaagattacagtaagaccccttcttgtcagtgctttcaaatgacccttatagtaagccagagtctt

SEQ ID NO: 374321 - DNA, 970 bp, Homo sapiens
ggccgcattcggaccggtccctacaaacaagggggtgattagtatgttgggacaaacacgctgttgctaaatggaaacactgacctcacagtgcatcctcctgccaacacacacacacacacacctctcacacatgcacgcttacacacacacacacacacacacacacacacacacatacacacacacacacacacgctctctctctctctctctctctctctctgtcagtgtgttatcggtgtggagcggaggccgcggaggctcctcggtccttcagcacccctcggcccgacgcacccacgcccctcaccccccgagagccggtgagaggggcagccggggagctccgggagggagcggggccccgggcagccgacccccgggtgggagctgggcagctcttcaggcggggcggggccggcgcgcggacaggtgagccgggcgggccgcggggctgcctccattcggctgagtgggggaagccgctgccgctgcttttgtggcgcgtgggctgcggaggagcagccgggccgaggctcggcgccgccgctggaatgtcactgacggggggagggggcgcgaggccgccgggtccctcccaaccacccccaagcctggctgcggcgcggccctgccctgccccatccggctgcggcaggtgggtgggggctccctcgtcgggatcttcgccagccgcctccctgcagaacgctccccgcaccgcccccggtcccttccctcggccgggagcgacttctgcagctcgttcttccgaatcgcaccagcaatgccggccagccgtagagggaggaagagcccggggagcccgagcatagcgtaaacggctctctgaccttaatttcatcctgcatggcgaatctctgccgtctctctgaacgcagaagggtctgagactggccgtctccttttctttccttgtaataaacatttttctttcttcctaaaa

SEQ ID NO: 374322 - DNA, 656 bp, Homo sapiens
atccgcccgccttggcctcccagagtgctgggattacaggcgtgagccaccacgcctggccttggtttgtattcttaccagtagtctgggtcataaatataagaggaaaaagatcaaatacgtggctaaattgcctgttagcactcagtaaaatttctttctaagggtagtccagtctgttccctgaccttgctgggttcaagtgattctcctgcctcagcctcccaagtagctgggactacaggtgcgtgccaccatgcccggctaatttttgtatttttagtagagacggggtttcaccatgttggccaggctggtcttaaactcctgacctcaggtgatccacctgccttggcctcccaaagtgctgggattacaggtgtgagccaccgctcccagccccaatatttcctcttaaagagctcagaatctagtgctgggtgggggtgggctactgaggtgggccagaagagaagggacagtgcttcagctccctctgaccctcaccactctaggagcaccagaaggtggagctgctgcggaaggccgtgcaggcccaccgaggctacaccgaccgggtaagtgagcccgcttgtgcctactcacttgtcccttagtgtcagccatctgtctgtccctctgactgtccgtcccga

SEQ ID NO: 374323 - DNA, 217 bp, Homo sapiens
ttgcagtgagctgagattgtgcattgtgctccagcctgggtgacaagaatgaaactccatctcagtaaataaataaataaataaataaataaattttttttagtgtcctgtaatcaaggcagttgtacttggcatttcttaacctgaatgtgtctcgcctttagagatgctgatgaaaccaaagaatggattgaagagaagaatcaagctctaaaca

SEQ ID NO: 374324 - DNA, 650 bp, Homo sapiens
gtaagtttgtaggttcttcatgctcctcctttttggtacatgaatgtctcttctaagatgttccagttaagtctcttcaactggatatccctttgggagtgaacactagagactcacaggggatccttgtctttcagctgttgagccgccgcaatgcccttcacgagagagccatgcgtcgccgggcccagctagccgattctttccatctgcagcagtttttccgtgattctgatgagctcaagagttgggtcaatgagaagatgaaaactgccacagatgaagcttataaagtaatgtactgttagtgttgccatgtagcactcgattagtaagctaaacacagctctcacaaataaattgtagctaaaggacgaaataagggattccagaaaccccactacttaatgtaagccaactgttttatacattcctccataaagataagtatgaaggtagtgcaagggaacttgacgttctcaggttcaagatagaaagaacccccttcttttattcacaggatccatccaacctacaaggaaaagtacagaagcatcaggcttttgaggctgagctctcagcaaaccagagccgaattgatgccttggagaaagctggccaaaagctgattgatgtcaaccactatgcca

SEQ ID NO: 374325 - DNA, 151 bp, Homo sapiens
ggtgctttgtttcatggtcaattgcttggctgcctaaattcctctttctttgaataggatgaaactgattccaagacagcctccccgtggaaggtaagaactcctttgcaaattattgttttcaagagttttgcgagatcatgaaatatgt

SEQ ID NO: 374326 - DNA, 370 bp, Homo sapiens
cccatggtcccagctattcgggaggctgaggtaggagaattgcttgagccgaagaggttgaggctgcagtgagctgagattacgccactgcactccagcctgggcaactgagcaagaccctgtctcaaaaaaaaggacttccagttcatctactcctgagctagtacatttccttcctcctttgctaactccccaagagatgaaccctaaaatatttcatacaaactccaattgccttctgttaaaaacgttggcatttaccccagttctttatgtttgctgccactccctgcctctgagaaccccttccccctgaaaagacataacctagcaggaactggtttggaaaaaatttttttggtatttttag

SEQ ID NO: 374327 - DNA, 586 bp, Homo sapiens
ggccgcattcggaccggtccctacaaacaagggggtgattagtatgttgggacaaacacgctgttgctaaatggaaacactgacctcacagtgcatcctcctgccaacacacacacacacacacctctcacacatgcacgcttacacacacacacacacacacacacacacacacacatacacacacacacacacacgctctctctctctctctctctctctctctgtcagtgtgttatcggtgtggagcggaggccgcggaggctcctcggtccttcagcacccctcggcccgacgcacccacgcccctcaccccccgagagccgaacgctccccgcaccgcccccggtcccttccctcggccgggagcgacttctgcagctcgttcttccgaatcgcaccagcaatgccggccagccgtagagggaggaagagcccggggagcccgagcatagcgtaaacggctctctgaccttaatttcatcctgcatggcgaatctctgccgtctctctgaacgcagaagggtctgagactggccgtctccttttctttccttgtaataaacatttttctttcttcctaaaa

SEQ ID NO: 374328 - DNA, 8198 bp, Homo sapiens
cgccactacccgctgcggagtgaacggtgtggagcggaggccgcggaggctcctcggtccttcagcacccctcggcccgacgcacccacgcccctcaccccccgagagccgaaaatggacccaagtggggtcaaagtgctggaaacagcagaggacatccaggagaggcggcagcaggtcctagaccgataccaccgcttcaaggaactctcaacccttaggcgtcagaagctggaagattcctatcgattccagttctttcaaagagatgctgaagagctggagaaatggatacaggaaaaacttcagattgcatctgatgagaattataaagacccaaccaacttgcagggaaagcttcagaagcatcaagcatttgaagctgaagtgcaggccaactcaggagccattgttaagctggatgaaactggaaacctgatgatctcagaagggcattttgcatctgaaaccatacggacccgtttgatggagctgcaccgccagtgggaattacttttggagaagatgcgagaaaaaggaatcaaactgctgcaggcccagaagttggtgcagtacttacgagaatgtgaggacgtgatggactggatcaatgacaaggaagcaattgttacttctgaagagctgggccaggatctggagcatgtagaggttttacagaagaaatttgaagagtttcaaacagatatggctgctcatgaagaaagagttaatgaagtgaaccagtttgctgccaaactcatacaggagcagcaccctgaggaggaactgatcaagactaagcaggatgaagtcaatgcagcctggcagcggctgaagggcctggctctgcagaggcaggggaagctctttggggcagcagaagttcagcgctttaacagggatgtggatgagactatcagttggattaaggaaaaggagcagttaatggcctctgatgattttggccgagacctggcaagtgttcaggctctgcttcggaagcacgagggtctggagagagatcttgctgctctagaagacaaggtcaaagccctgtgtgctgaggctgaccgcctgcaacagtcccaccctctgagtgcaacacagattcaagtgaagcgagaggaactgattacaaactgggagcagatccgcaccttggcggcagagagacatgcacggctcaatgattcatacaggcttcaacgcttccttgctgacttccgtgacctcaccagctgggtgactgagatgaaagccctcatcaatgcagatgagcttgccagtgatgtggctggggctgaagccctgctagatagacaccaagagcacaagggtgaaattgatgcccatgaagacagcttcaaatctgcagatgaatctggacaggcactgcttgctgctggtcactatgcctcagatgaagtgagggagaagctgaccgtcctttccgaggagagagcggcgctgctggagctgtgggagctgcgcaggcagcagtacgagcagtgcatggacctgcagctcttctaccgggacactgagcaggtggacaactggatgagcaagcaggaggcgttcctgttgaatgaagacttgggagattccttggatagtgtggaagcgcttcttaagaagcacgaagactttgagaaatcccttagtgcccaggaggaaaagattacagcattagatgaatttgcaaccaagctaattcagaacaaccactatgcaatggaagatgtggccactcgccgagatgctctgttgagccgccgcaatgcccttcacgagagagccatgcgtcgccgggcccagctagccgattctttccatctgcagcagtttttccgtgattctgatgagctcaagagttgggtcaatgagaagatgaaaactgccacagatgaagcttataaagatccatccaacctacaaggaaaagtacagaagcatcaggcttttgaggctgagctctcagcaaaccagagccgaattgatgccttggagaaagctggccaaaagctgattgatgtcaaccactatgccaaggatgaagtggcagctcgtatgaatgaggtgatcagtttgtggaagaaactgctagaggccactgaactgaaaggaataaagcttcgtgaagccaaccagcaacagcaatttaatcgcaatgttgaggatattgaattgtggctatatgaagtagaaggtcacttggcttcggatgattacggcaaagatcttaccaatgtgcagaacctccagaagaaacatgccctgctagaggcagatgtggctgctcaccaggaccgaattgatggcatcaccattcaggcccgccagttccaagatgctggccattttgatgcagaaaacatcaagaagaaacaggaagccctcgtggctcgctatgaggcactcaaggagcccatggttgcccggaagcagaagctggccgattctctgcggttgcagcagctcttccgggatgttgaggatgaggagacgtggattcgagagaaagagcccattgccgcatctaccaacagaggtaaggatttaattggggtccagaatctgctaaagaaacatcaagccttacaagcagaaattgctggacatgaaccacgcatcaaagcagttacacagaaggggaatgccatggtggaggaaggccattttgctgcagaggatgtgaaggccaagcttcacgagctgaaccaaaagtgggaggcactgaaagccaaagcttcccagcgtcggcaggacctggaggactctctgcaggcccagcagtactttgctgatgctaacgaggctgaatcctggatgcgggagaaggaacccattgtgggcagcactgactatggcaaggacgaagactctgctgaggctctactgaagaaacacgaagctttgatgtcagatctcagtgcctacggcagcagcatccaggctttgcgagaacaagcacagtcctgccggcaacaagtggcccccacggatgatgagactgggaaggagctggtcttggctctctacgactatcaggagaagagtccccgagaggtcaccatgaagaagggagatatccttaccttactcaacagcaccaacaaggattggtggaaagtggaagtgaacgatcgtcagggttttgtgccggctgcgtacgtgaagaaattggaccccgcccagtcagcctcccgggagaatctcctggaggagcaaggcagcatagcactgcggcaggagcagattgacaatcagacacgcataactaaggaggccggcagtgtatctctgcgtatgaagcaggtggaagaactatatcattctctgctggaactgggtgagaagcgtaaaggcatgttggagaagagttgcaagaagtttatgttgttccgtgaagcgaatgaactacagcaatggatcaatgagaaggaagccgctctgacaagtgaggaggtcggagcagacttggagcaggttgaggtgctccagaagaagtttgatgacttccagaaggacctgaaggccaatgagtcacggttgaaggacattaacaaggtagctgaagacctggagtctgaaggtcttatggcagaggaggtgcaggctgtgcaacaacaggaagtgtatggcatgatgcccagggatgaaactgattccaagacagcctccccgtggaagtctgctcgtctgatggttcacaccgtggccacctttaattccatcaaggagctgaatgagcgctggcggtccctacagcagctggccgaggaacggagccagctcttgggcagcgcccatgaagtacagaggttccacagagatgctgatgaaaccaaagaatggattgaagagaagaatcaagctctaaacacagacaattatggacatgatctcgccagtgtccaggccctgcaacgcaagcatgagggcttcgagagggaccttgcggctctcggtgacaaggtaaactcccttggtgaaacagcagagcgcctgatccagtcccatcccgagtcagcagaagacctgcaggaaaagtgcacagagttaaaccaggcctggagcagcctggggaaacgtgcagatcagcgcaaggcaaagttgggtgactcccacgacctgcagcgcttccttagcgatttccgggacctcatgtcttggatcaatggaatacgggggttggtgtcctcagatgagctagccaaggatgtcaccggagctgaggcattgctggagcgacaccaggaacaccggacagaaatcgatgccagggctggcactttccaggcatttgagcagtttggacagcagctgttggctcacggacactatgccagccctgagatcaagcagaaacttgatattcttgaccaggagcgtgcagacctggagaaggcctgggttcagcgcaggatgatgctggatcagtgccttgaactgcagctgttccatcgggactgtgagcaagctgagaactggatggctgcccgggaggccttcttgaataccgaagacaaaggagactcactggacagcgtagaggctctgatcaaaaaacatgaagactttgacaaagcgattaacgtccaggaagagaagattgctgctctgcaggcctttgccgaccagctcatcgctgccggccattatgccaagggagacatttctagccggcgcaatgaggtcttggacaggtggcgacgtctgaaagcccagatgattgagaaaaggtcaaagctaggagaatctcaaaccctccaacagttcagccgggatgtggatgagattgaggcttggatcagtgaaaaattgcaaacagcgagtgatgagtcgtacaaggatcccaccaacatccagagcaagcaccagaagcaccaggcttttgaagcagagctgcatgccaacgctgaccggatccgtggggttatcgacatgggcaactccctcattgaacgtggagcctgtgccggcagtgaggatgctgtcaaggcccgcctggctgccttagctgaccagtggcagttcttggtgcaaaagtcagcggaaaagagccagaaactgaaagaagccaacaagcagcagaacttcaacacagggatcaaggactttgacttctggctgtctgaggtggaggccctgctggcatccgaagattatggcaaagacctggcttctgtgaacaacctgctgaaaaagcatcaactgctggaagcagatatatctgcccatgaggatcgcctgaaggacctgaacagccaggcagacagcctgatgaccagcagtgccttcgacacctcccaagtaaaggacaagagggacaccatcaacgggcgcttccagaagatcaagagcatggcggcctcccggcgagccaagctgaatgaatcccatcgcctgcaccagttcttccgggacatggatgacgaggagtcctggatcaaggagaagaagctgctggtgggctcagaggactacggccgggacctaactggcgtgcagaacctgaggaagaagcacaagcggctggaagcagaactggctgcgcatgagccggctattcagggtgtcctggacactggcaagaagctgtccgatgacaacaccatcgggaaagaggagatccagcagcggctggcgcagtttgtggagcactggaaagagctgaagcagctggcagctgcccggggtcagcggctggaagagtccttggaatatcagcagtttgtagccaatgtggaagaggaagaagcctggatcaatgagaaaatgaccctggtggccagcgaagattatggcgacactcttgccgccatccagggcttactgaagaaacatgaagcttttgagacagacttcaccgtccacaaggatcgcgtgaatgatgtctgcaccaatggacaagacctcattaagaagaacaatcaccatgaggagaacatctcttcaaagatgaagggcctgaacgggaaagtgtcagacctggagaaagctgcagcccagagaaaggcgaagctggatgagaactcggccttccttcagttcaactggaaggcggacgtggtggagtcctggatcggtgaaaaggagaacagcttgaagacagatgattatggccgagacctgtcttctgtgcagacgctcctcaccaaacaggaaacttttgacgctgggctgcaggccttccagcaggaaggcattgccaacatcactgccctcaaagatcagcttctcgccgccaaacacgttcagtccaaggccatcgaggcccggcacgcctccctcatgaagaggtggagccagcttctggccaactcagccgcccgcaagaagaagcttctggaggctcagagtcacttccgcaaggtggaggacctcttcctgaccttcgccaaaaaggcttctgccttcaacagctggtttgaaaatgcagaggaggacttaacagaccccgtgcgctgcaactccttggaagaaatcaaagctttgcgcgaggcccacgacgccttccgctcctccctcagctctgcccaggctgacttcaaccagctggccgagctggaccgccagatcaagagcttccgcgtagcctccaacccctacacctggtttaccatggaggccctggaggagacctggaggaacctacagaaaatcatcaaggagagggagctggagctgcagaaggaacagcggcggcaggaggagaacgacaagctgcgccaggagtttgcccagcacgccaacgccttccaccagtggatccaagagaccaggacatacctcctcgatgggtcctgtatggtggaagagtcggggaccctcgaatcccagcttgaagctaccaaacgcaagcaccaggaaatccgagccatgagaagtcagctcaaaaagatcgaggacctgggggccgccatggaggaggccctcatcctggacaacaagtacacggagcacagcaccgtgggcctcgcccagcagtgggaccagctggaccagctgggcatgcgcatgcagcacaacctggagcagcagatccaggccaggaacacaacaggtgtgactgaggaggccctcaaagaattcagcatgatgtttaaacactttgacaaggacaagtctggcaggctgaaccatcaggagttcaaatcttgcctgcgctccctgggctatgacctgcccatggtggaggaaggggaacctgaccctgagttcgaggcaatcctggacacggtggatccgaacagagatggccatgtctccttgcaagaatacatggctttcatgatcagccgcgaaactgagaacgtcaagtccagcgaggagattgagagcgccttccgggccctcagctcagagggaaagccttacgtgaccaaggaggagctctaccagaacctgacccgggaacaagccgactactgcgtctcccacatgaagccctacgtggacggcaagggccgcgagctccccaccgcgttcgactacgtggagttcacccgctcgcttttcgtgaactgagccactccctgggtcacccacccctcgctgcttgccctgcgtcgccttgctgcatgtccgctcctctgtgtgctctcactttccactgtaaccttaagcctgcttagcttggaataagacttaggagaaaatggtgcttcactaacccgcttccggtccagtcacaatcatcatgtcactgtggggacccagatctgtgtcttgaagcagctgccctcattccgacttcagaaaatcgaagcagctggctcctccccttgttctctctcccaccctcccccaaatctgttttcatgtaaaagacaaataaatgatgacttcccccaaaaaaaaaaaaaaaaaaaaaaaaaaaaaaaaaaaaaaaaaaaaaaaaaggggggggggggcaaaaatttccccgggggggcccattttaagcgagcaccccgcgtgttcgtgtggaaacgaaagggggccccccatgaggagggacccgcctaataagaaagaccggagccgggggccgcggccttaaaaacaaaccgcgcgccaggaggacaacaaacgagtgcagtgagcaactcgtggagaaaaggacaccaacactcggcggcggggaacaccaactgggaaccacactccctgacgaattaaggcccgagggaaaataacctgagggctacagg

SEQ ID NO: 374329 - DNA, 7321 bp, Homo sapiens
ctggttgtcaggtctgggaagaccttcacttgcactgctgctaccccgagtcaagacccgctaacgccaccctctcaaaatccggaaacacattccggcccgaggtccacctgctgccgccgccgtcggtaggagctggccctgaacgagctggtgacgctgacgtgcctggcacgcggcttcggccccaaggacgtgctggttcgctggctgcaggggtcacaggagcagcaccctgaggaggaactgatcaagactaagcaggatgaagtcaatgcagcctggcagcggctgaagggcctggctctgcagaggcaggggaagctctttggggcagcagaagttcagcgctttaacagggatgtggatgagactatcagttggattaaggaaaaggagcagttaatggcctctgatgattttggccgagacctggcaagtgttcaggctctgcttcggaagcacgagggtctggagagagatcttgctgctctagaagacaaggtcaaagccctgtgtgctgaggctgaccgcctgcaacagtcccaccctctgagtgcaacacagattcaagtgaagcgagaggaactgattacaaactgggagcagatccgcaccttggcggcagagagacatgcacggctcaatgattcatacaggcttcaacgcttccttgctgacttccgtgacctcaccagctgggtgactgagatgaaagccctcatcaatgcagatgagcttgccagtgatgtggctggggctgaagccctgctagatagacaccaagagcacaagggtgaaattgatgcccatgaagacagcttcaaatctgcagatgaatctggacaggcactgcttgctgctggtcactatgcctcagatgaagtgagggagaagctgaccgtcctttccgaggagagagcggcgctgctggagctgtgggagctgcgcaggcagcagtacgagcagtgcatggacctgcagctcttctaccgggacactgagcaggtggacaactggatgagcaagcaggaggcgttcctgttgaatgaagacttgggagattccttggatagtgtggaagcgcttcttaagaagcacgaagactttgagaaatcccttagtgcccaggaggaaaagattacagcattagatgaatttgcaaccaagctaattcagaacaaccactatgcaatggaagatgtggccactcgccgagatgctctgttgagccgccgcaatgcccttcacgagagagccatgcgtcgccgggcccagctagccgattctttccatctgcagcagtttttccgtgattctgatgagctcaagagttgggtcaatgagaagatgaaaactgccacagatgaagcttataaagatccatccaacctacaaggaaaagtacagaagcatcaggcttttgaggctgagctctcagcaaaccagagccgaattgatgccttggagaaagctggccaaaagctgattgatgtcaaccactatgccaaggatgaagtggcagctcgtatgaatgaggtgatcagtttgtggaagaaactgctagaggccactgaactgaaaggaataaagcttcgtgaagccaaccagcaacagcaatttaatcgcaatgttgaggatattgaattgtggctatatgaagtagaaggtcacttggcttcggatgattacggcaaagatcttaccaatgtgcagaacctccagaagaaacatgccctgctagaggcagatgtggctgctcaccaggaccgaattgatggcatcaccattcaggcccgccagttccaagatgctggccattttgatgcagaaaacatcaagaagaaacaggaagccctcgtggctcgctatgaggcactcaaggagcccatggttgcccggaagcagaagctggccgattctctgcggttgcagcagctcttccgggatgttgaggatgaggagacgtggattcgagagaaagagcccattgccgcatctaccaacagaggtaaggatttaattggggtccagaatctgctaaagaaacatcaagccttacaagcagaaattgctggacatgaaccacgcatcaaagcagttacacagaaggggaatgccatggtggaggaaggccattttgctgcagaggatgtgaaggccaagcttcacgagctgaaccaaaagtgggaggcactgaaagccaaagcttcccagcgtcggcaggacctggaggactctctgcaggcccagcagtactttgctgatgctaacgaggctgaatcctggatgcgggagaaggaacccattgtgggcagcactgactatggcaaggacgaagactctgctgaggctctactgaagaaacacgaagctttgatgtcagatctcagtgcctacggcagcagcatccaggctttgcgagaacaagcacagtcctgccggcaacaagtggcccccacggatgatgagactgggaaggagctggtcttggctctctacgactatcaggagaagagtccccgagaggtcaccatgaagaagggagatatccttaccttactcaacagcaccaacaaggattggtggaaagtggaagtgaacgatcgtcagggttttgtgccggctgcgtacgtgaagaaattggaccccgcccagtcagcctcccgggagaatctcctggaggagcaaggcagcatagcactgcggcaggagcagattgacaatcagacacgcataactaaggaggccggcagtgtatctctgcgtatgaagcaggtggaagaactatatcattctctgctggaactgggtgagaagcgtaaaggcatgttggagaagagttgcaagaagtttatgttgttccgtgaagcgaatgaactacagcaatggatcaatgagaaggaagccgctctgacaagtgaggaggtcggagcagacttggagcaggttgaggtgctccagaagaagtttgatgacttccagaaggacctgaaggccaatgagtcacggttgaaggacattaacaaggtagctgaagacctggagtctgaaggtcttatggcagaggaggtgcaggctgtgcaacaacaggaagtgtatggcatgatgcccagggatgaaactgattccaagacagcctccccgtggaagtctgctcgtctgatggttcacaccgtggccacctttaattccatcaaggagctgaatgagcgctggcggtccctacagcagctggccgaggaacggagccagctcttgggcagcgcccatgaagtacagaggttccacagagatgctgatgaaaccaaagaatggattgaagagaagaatcaagctctaaacacagacaattatggacatgatctcgccagtgtccaggccctgcaacgcaagcatgagggcttcgagagggaccttgcggctctcggtgacaaggtaaactcccttggtgaaacagcagagcgcctgatccagtcccatcccgagtcagcagaagacctgcaggaaaagtgcacagagttaaaccaggcctggagcagcctggggaaacgtgcagatcagcgcaaggcaaagttgggtgactcccacgacctgcagcgcttccttagcgatttccgggacctcatgtcttggatcaatggaatacgggggttggtgtcctcagatgagctagccaaggatgtcaccggagctgaggcattgctggagcgacaccaggaacaccggacagaaatcgatgccagggctggcactttccaggcatttgagcagtttggacagcagctgttggctcacggacactatgccagccctgagatcaagcagaaacttgatattcttgaccaggagcgtgcagacctggagaaggcctgggttcagcgcaggatgatgctggatcagtgccttgaactgcagctgttccatcgggactgtgagcaagctgagaactggatggctgcccgggaggccttcttgaataccgaagacaaaggagactcactggacagcgtagaggctctgatcaaaaaacatgaagactttgacaaagcgattaacgtccaggaagagaagattgctgctctgcaggcctttgccgaccagctcatcgctgccggccattatgccaagggagacatttctagccggcgcaatgaggtcttggacaggtggcgacgtctgaaagcccagatgattgagaaaaggtcaaagctaggagaatctcaaaccctccaacagttcagccgggatgtggatgagattgaggcttggatcagtgaaaaattgcaaacagcgagtgatgagtcgtacaaggatcccaccaacatccagagcaagcaccagaagcaccaggcttttgaagcagagctgcatgccaacgctgaccggatccgtggggttatcgacatgggcaactccctcattgaacgtggagcctgtgccggcagtgaggatgctgtcaaggcccgcctggctgccttagctgaccagtggcagttcttggtgcaaaagtcagcggaaaagagccagaaactgaaagaagccaacaagcagcagaacttcaacacagggatcaaggactttgacttctggctgtctgaggtggaggccctgctggcatccgaagattatggcaaagacctggcttctgtgaacaacctgctgaaaaagcatcaactgctggaagcagatatatctgcccatgaggatcgcctgaaggacctgaacagccaggcagacagcctgatgaccagcagtgccttcgacacctcccaagtaaaggacaagagggacaccatcaacgggcgcttccagaagatcaagagcatggcggcctcccggcgagccaagctgaatgaatcccatcgcctgcaccagttcttccgggacatggatgacgaggagtcctggatcaaggagaagaagctgctggtgggctcagaggactacggccgggacctaactggcgtgcagaacctgaggaagaagcacaagcggctggaagcagaactggctgcgcatgagccggctattcagggtgtcctggacactggcaagaagctgtccgatgacaacaccatcgggaaagaggagatccagcagcggctggcgcagtttgtggagcactggaaagagctgaagcagctggcagctgcccggggtcagcggctggaagagtccttggaatatcagcagtttgtagccaatgtggaagaggaagaagcctggatcaatgagaaaatgaccctggtggccagcgaagattatggcgacactcttgccgccatccagggcttactgaagaaacatgaagcttttgagacagacttcaccgtccacaaggatcgcgtgaatgatgtctgcaccaatggacaagacctcattaagaagaacaatcaccatgaggagaacatctcttcaaagatgaagggcctgaacgggaaagtgtcagacctggagaaagctgcagcccagagaaaggcgaagctggatgagaactcggccttccttcagttcaactggaaggcggacgtggtggagtcctggatcggtgaaaaggagaacagcttgaagacagatgattatggccgagacctgtcttctgtgcagacgctcctcaccaaacaggaaacttttgacgctgggctgcaggccttccagcaggaaggcattgccaacatcactgccctcaaagatcagcttctcgccgccaaacacgttcagtccaaggccatcgaggcccggcacgcctccctcatgaagaggtggagccagcttctggccaactcagccgcccgcaagaagaagcttctggaggctcagagtcacttccgcaaggtggaggacctcttcctgaccttcgccaaaaaggcttctgccttcaacagctggtttgaaaatgcagaggaggacttaacagaccccgtgcgctgcaactccttggaagaaatcaaagctttgcgcgaggcccacgacgccttccgctcctccctcagctctgcccaggctgacttcaaccagctggccgagctggaccgccagatcaagagcttccgcgtagcctccaacccctacacctggtttaccatggaggccctggaggagacctggaggaacctacagaaaatcatcaaggagagggagctggagctgcagaaggaacagcggcggcaggaggagaacgacaagctgcgccaggagtttgcccagcacgccaacgccttccaccagtggatccaagagaccaggacatacctcctcgatgggtcctgtatggtggaagagtcggggaccctcgaatcccagcttgaagctaccaaacgcaagcaccaggaaatccgagccatgagaagtcagctcaaaaagatcgaggacctgggggccgccatggaggaggccctcatcctggacaacaagtacacggagcacagcaccgtgggcctcgcccagcagtgggaccagctggaccagctgggcatgcgcatgcagcacaacctggagcagcagatccaggccaggaacacaacaggtgtgactgaggaggccctcaaagaattcagcatgatgtttaaacactttgacaaggacaagtctggcaggctgaaccatcaggagttcaaatcttgcctgcgctccctgggctatgacctgcccatggtggaggaaggggaacctgaccctgagttcgaggcaatcctggacacggtggatccgaacagagatggccatgtctccttgcaagaatacatggctttcatgatcagccgcgaaactgagaacgtcaagtccagcgaggagattgagagcgccttccgggccctcagctcagagggaaagccttacgtgaccaaggaggagctctaccagaacctgacccgggaacaagccgactactgcgtctcccacatgaagccctacgtggacggcaagggccgcgagctccccaccgcgttcgactacgtggagttcacccgctcgcttttcgtgaactgagccactccctgggtcacccacccctcgctgcttgccctgcgtcgccttgctgcatgtccgctcctctgtgtgctctcactttccactgtaaccttaagcctgcttagcttggaataagacttaggagaaaatggtgcttcactaacccgcttccggtccagtcacaatcatcatgtcactgtggggacccagatctgtgtcttgaagcagctgccctcattccgacttcagaaaatcgaagcagctggctcctccccttgttctctctcccaccctcccccaaatctgttttcatgtaaaagacaaataaatgatgacttcccccaaa

SEQ ID NO: 374330 - DNA, 7801 bp, Homo sapiens
cgccactacccgctgcggagtgaacggtgtggagcggaggccgcggaggctcctcggtccttcagcacccctcggcccgacgcacccacgcccctcaccccccgagagccgaaaatggacccaagtggggtcaaagtgctggaaacagcagaggacatccaggagaggcggcagcaggtcctagaccgataccaccgcttcaaggaactctcaacccttaggcgtcagaagctggaagattcctatcgattccagttctttcaaagagatgctgaagagctggagaaatggatacaggaaaaacttcagattgcatctgatgagaattataaagacccaaccaacttgcagggaaagcttcagaagcatcaagcatttgaagctgaagtgcaggccaactcaggagccattgttaagctggatgaaactggaaacctgatgatctcagaagggcattttgcatctgaaaccatacggacccgtttgatggagctgcaccgccagtgggaattacttttggagaagatgcgagaaaaaggaatcaaactgctgcaggcccagaagttggtgcagtacttacgagaatgtgaggacgtgatggactggatcaatgacaaggaagcaattgttacttctgaagagctgggccaggatctggagcatgtagaggttttacagaagaaatttgaagagtttcaaacagatatggctgctcatgaagaaagagttaatgaagtgaaccagtttgctgccaaactcatacaggagcagcaccctgaggaggaactgatcaagactaagcaggatgaagtcaatgcagcctggcagcggctgaagggcctggctctgcagaggcaggggaagctctttggggcagcagaagttcagcgctttaacagggatgtggatgagactatcagttggattaaggaaaaggagcagttaatggcctctgatgattttggccgagacctggcaagtgttcaggctctgcttcggaagcacgagggtctggagagagatcttgctgctctagaagacaaggtcaaagccctgtgtgctgaggctgaccgcctgcaacagtcccaccctctgagtgcaacacagattcaagtgaagcgagaggaactgattacaaactgggagcagatccgcaccttggcggcagagagacatgcacggctcaatgattcatacaggcttcaacgcttccttgctgacttccgtgacctcaccagctgggtgactgagatgaaagccctcatcaatgcagatgagcttgccagtgatgtggctggggctgaagccctgctagatagacaccaagagcacaagggtgaaattgatgcccatgaagacagcttcaaatctgcagatgaatctggacaggcactgcttgctgctggtcactatgcctcagatgaagtgagggagaagctgaccgtcctttccgaggagagagcggcgctgctggagctgtgggagctgcgcaggcagcagtacgagcagtgcatggacctgcagctcttctaccgggacactgagcaggtggacaactggatgagcaagcaggaggcgttcctgttgaatgaagacttgggagattccttggatagtgtggaagcgcttcttaagaagcacgaagactttgagaaatcccttagtgcccaggaggaaaagattacagcattagatgaatttgcaaccaagctaattcagaacaaccactatgcaatggaagatgtggccactcgccgagatgctctgttgagccgccgcaatgcccttcacgagagagccatgcgtcgccgggcccagctagccgattctttccatctgcagcagtttttccgtgattctgatgagctcaagagttgggtcaatgagaagatgaaaactgccacagatgaagcttataaagatccatccaacctacaaggaaaagtacagaagcatcaggcttttgaggctgagctctcagcaaaccagagccgaattgatgccttggagaaagctggccaaaagctgattgatgtcaaccactatgccaaggatgaagtggcagctcgtatgaatgaggtgatcagtttgtggaagaaactgctagaggccactgaactgaaaggaataaagcttcgtgaagccaaccagcaacagcaatttaatcgcaatgttgaggatattgaattgtggctatatgaagtagaaggtcacttggcttcggatgattacggcaaagatcttaccaatgtgcagaacctccagaagaaacatgccctgctagaggcagatgtggctgctcaccaggaccgaattgatggcatcaccattcaggcccgccagttccaagatgctggccattttgatgcagaaaacatcaagaagaaacaggaagccctcgtggctcgctatgaggcactcaaggagcccatggttgcccggaagcagaagctggccgattctctgcggttgcagcagctcttccgggatgttgaggatgaggagacgtggattcgagagaaagagcccattgccgcatctaccaacagaggtaaggatttaattggggtccagaatctgctaaagaaacatcaagccttacaagcagaaattgctggacatgaaccacgcatcaaagcagttacacagaaggggaatgccatggtggaggaaggccattttgctgcagaggatgtgaaggccaagcttcacgagctgaaccaaaagtgggaggcactgaaagccaaagcttcccagcgtcggcaggacctggaggactctctgcaggcccagcagtactttgctgatgctaacgaggctgaatcctggatgcgggagaaggaacccattgtgggcagcactgactatggcaaggacgaagactctgctgaggctctactgaagaaacacgaagctttgatgtcagatctcagtgcctacggcagcagcatccaggctttgcgagaacaagcacagtcctgccggcaacaagtggcccccacggatgatgagactgggaaggagctggtcttggctctctacgactatcaggagaagagtccccgagaggtcaccatgaagaagggagatatccttaccttactcaacagcaccaacaaggattggtggaaagtggaagtgaacgatcgtcagggttttgtgccggctgcgtacgtgaagaaattggaccccgcccagtcagcctcccgggagaatctcctggaggagcaaggcagcatagcactgcggcaggagcagattgacaatcaatatcattctctgctggaactgggtgagaagcgtaaaggcatgttggagaagagttgcaagaagtttatgttgttccgtgaagcgaatgaactacagcaatggatcaatgagaaggaagccgctctgacaagtgaggaggtcggagcagacttggagcaggttgaggtgctccagaagaagtttgatgacttccagaaggacctgaaggccaatgagtcacggttgaaggacattaacaaggtagctgaagacctggagtctgaaggtcttatggcagaggaggtgcaggctgtgcaacaacaggaagtgtatggcatgatgcccagggatgaaactgattccaagacagcctccccgtggaagtctgctcgtctgatggttcacaccgtggccacctttaattccatcaaggagctgaatgagcgctggcggtccctacagcagctggccgaggaacggagccagctcttgggcagcgcccatgaagtacagaggttccacagagatgctgatgaaaccaaagaatggattgaagagaagaatcaagctctaaacacagacaattatggacatgatctcgccagtgtccaggccctgcaacgcaagcatgagggcttcgagagggaccttgcggctctcggtgacaaggtaaactcccttggtgaaacagcagagcgcctgatccagtcccatcccgagtcagcagaagacctgcaggaaaagtgcacagagttaaaccaggcctggagcagcctggggaaacgtgcagatcagcgcaaggcaaagttgggtgactcccacgacctgcagcgcttccttagcgatttccgggacctcatgtcttggatcaatggaatacgggggttggtgtcctcagatgagctagccaaggatgtcaccggagctgaggcattgctggagcgacaccaggaacaccggacagaaatcgatgccagggctggcactttccaggcatttgagcagtttggacagcagctgttggctcacggacactatgccagccctgagatcaagcagaaacttgatattcttgaccaggagcgtgcagacctggagaaggcctgggttcagcgcaggatgatgctggatcagtgccttgaactgcagctgttccatcgggactgtgagcaagctgagaactggatggctgcccgggaggccttcttgaataccgaagacaaaggagactcactggacagcgtagaggctctgatcaaaaaacatgaagactttgacaaagcgattaacgtccaggaagagaagattgctgctctgcaggcctttgccgaccagctcatcgctgccggccattatgccaagggagacatttctagccggcgcaatgaggtcttggacaggtggcgacgtctgaaagcccagatgattgagaaaaggtcaaagctaggagaatctcaaaccctccaacagttcagccgggatgtggatgagattgaggcttggatcagtgaaaaattgcaaacagcgagtgatgagtcgtacaaggatcccaccaacatccagagcaagcaccagaagcaccaggcttttgaagcagagctgcatgccaacgctgaccggatccgtggggttatcgacatgggcaactccctcattgaacgtggagcctgtgccggcagtgaggatgctgtcaaggcccgcctggctgccttagctgaccagtggcagttcttggtgcaaaagtcagcggaaaagagccagaaactgaaagaagccaacaagcagcagaacttcaacacagggatcaaggactttgacttctggctgtctgaggtggaggccctgctggcatccgaagattatggcaaagacctggcttctgtgaacaacctgctgaaaaagcatcaactgctggaagcagatatatctgcccatgaggatcgcctgaaggacctgaacagccaggcagacagcctgatgaccagcagtgccttcgacacctcccaagtaaaggacaagagggacaccatcaacgggcgcttccagaagatcaagagcatggcggcctcccggcgagccaagctgaatgaatcccatcgcctgcaccagttcttccgggacatggatgacgaggagtcctggatcaaggagaagaagctgctggtgggctcagaggactacggccgggacctaactggcgtgcagaacctgaggaagaagcacaagcggctggaagcagaactggctgcgcatgagccggctattcagggtgtcctggacactggcaagaagctgtccgatgacaacaccatcgggaaagaggagatccagcagcggctggcgcagtttgtggagcactggaaagagctgaagcagctggcagctgcccggggtcagcggctggaagagtccttggaatatcagcagtttgtagccaatgtggaagaggaagaagcctggatcaatgagaaaatgaccctggtggccagcgaagattatggcgacactcttgccgccatccagggcttactgaagaaacatgaagcttttgagacagacttcaccgtccacaaggatcgcgtgaatgatgtctgcaccaatggacaagacctcattaagaagaacaatcaccatgaggagaacatctcttcaaagatgaagggcctgaacgggaaagtgtcagacctggagaaagctgcagcccagagaaaggcgaagctggatgagaactcggccttccttcagttcaactggaaggcggacgtggtggagtcctggatcggtgaaaaggagaacagcttgaagacagatgattatggccgagacctgtcttctgtgcagacgctcctcaccaaacaggaaacttttgacgctgggctgcaggccttccagcaggaaggcattgccaacatcactgccctcaaagatcagcttctcgccgccaaacacgttcagtccaaggccatcgaggcccggcacgcctccctcatgaagaggtggagccagcttctggccaactcagccgcccgcaagaagaagcttctggaggctcagagtcacttccgcaaggtggaggacctcttcctgaccttcgccaaaaaggcttctgccttcaacagctggtttgaaaatgcagaggaggacttaacagaccccgtgcgctgcaactccttggaagaaatcaaagctttgcgcgaggcccacgacgccttccgctcctccctcagctctgcccaggctgacttcaaccagctggccgagctggaccgccagatcaagagcttccgcgtagcctccaacccctacacctggtttaccatggaggccctggaggagacctggaggaacctacagaaaatcatcaaggagagggagctggagctgcagaaggaacagcggcggcaggaggagaacgacaagctgcgccaggagtttgcccagcacgccaacgccttccaccagtggatccaagagaccaggacatacctcctcgatgggtcctgtatggtggaagagtcggggaccctcgaatcccagcttgaagctaccaaacgcaagcaccaggaaatccgagccatgagaagtcagctcaaaaagatcgaggacctgggggccgccatggaggaggccctcatcctggacaacaagtacacggagcacagcaccgtgggcctcgcccagcagtgggaccagctggaccagctgggcatgcgcatgcagcacaacctggagcagcagatccaggccaggaacacaacaggtgtgactgaggaggccctcaaagaattcagcatgatgtttaaacactttgacaaggacaagtctggcaggctgaaccatcaggagttcaaatcttgcctgcgctccctgggctatgacctgcccatggtggaggaaggggaacctgaccctgagttcgaggcaatcctggacacggtggatccgaacagagatggccatgtctccttgcaagaatacatggctttcatgatcagccgcgaaactgagaacgtcaagtccagcgaggagattgagagcgccttccgggccctcagctcagagggaaagccttacgtgaccaaggaggagctctaccagaacctgacccgggaacaagccgactactgcgtctcccacatgaagccctacgtggacggcaagggccgcgagctccccaccgcgttcgactacgtggagttcacccgctcgcttttcgtgaactgagccactccctgggtcacccacccctcgctgcttgccctgcgtcgccttgctgcatgtccgctcctctgtgtgctctcactttccactgtaaccttaagcctgcttagcttggaataagacttaggagaaaatggtgcttcactaacccgcttccggtccagtcacaatcatcatgtcactgtggggacccagatctgtgtcttgaagcagctgccctcattccgacttcagaaaatcgaagcagctggctcctccccttgttctctctcccaccctcccccaaatctgttttcatgtaaaagacaaataaatgatgacttcccccaaa

SEQ ID NO: 374331 - DNA, 9010 bp, Homo sapiens
cgccactacccgctgcggagtgaacggtgtggagcggaggccgcggaggctcctcggtccttcagcacccctcggcccgacgcacccacgcccctcaccccccgagagccgaaaatggacccaagtggggtcaaagtgctggaaacagcagaggacatccaggagaggcggcagcaggtcctagaccgataccaccgcttcaaggaactctcaacccttaggcgtcagaagctggaagattcctatcgattccagttctttcaaagagatgctgaagagctggagaaatggatacaggaaaaacttcagattgcatctgatgagaattataaagacccaaccaacttgcagggaaagcttcagaagcatcaagcatttgaagctgaagtgcaggccaactcaggagccattgttaagctggatgaaactggaaacctgatgatctcagaagggcattttgcatctgaaaccatacggacccgtttgatggagctgcaccgccagtgggaattacttttggagaagatgcgagaaaaaggaatcaaactgctgcaggcccagaagttggtgcagtacttacgagaatgtgaggacgtgatggactggatcaatgacaaggaagcaattgttacttctgaagagctgggccaggatctggagcatgtagaggttttacagaagaaatttgaagagtttcaaacagatatggctgctcatgaagaaagagttaatgaagtgaaccagtttgctgccaaactcatacaggagcagcaccctgaggaggaactgatcaagactaagcaggatgaagtcaatgcagcctggcagcggctgaagggcctggctctgcagaggcaggggaagctctttggggcagcagaagttcagcgctttaacagggatgtggatgagactatcagttggattaaggaaaaggagcagttaatggcctctgatgattttggccgagacctggcaagtgttcaggctctgcttcggaagcacgagggtctggagagagatcttgctgctctagaagacaaggtcaaagccctgtgtgctgaggctgaccgcctgcaacagtcccaccctctgagtgcaacacagattcaagtgaagcgagaggaactgattacaaactgggagcagatccgcaccttggcggcagagagacatgcacggctcaatgattcatacaggcttcaacgcttccttgctgacttccgtgacctcaccagctgggtgactgagatgaaagccctcatcaatgcagatgagcttgccagtgatgtggctggggctgaagccctgctagatagacaccaagagcacaagggtgaaattgatgcccatgaagacagcttcaaatctgcagatgaatctggacaggcactgcttgctgctggtcactatgcctcagatgaagtgagggagaagctgaccgtcctttccgaggagagagcggcgctgctggagctgtgggagctgcgcaggcagcagtacgagcagtgcatggacctgcagctcttctaccgggacactgagcaggtggacaactggatgagcaagcaggaggcgttcctgttgaatgaagacttgggagattccttggatagtgtggaagcgcttcttaagaagcacgaagactttgagaaatcccttagtgcccaggaggaaaagattacagcattagatgaatttgcaaccaagctaattcagaacaaccactatgcaatggaagatgtggccactcgccgagatgctctgttgagccgccgcaatgcccttcacgagagagccatgcgtcgccgggcccagctagccgattctttccatctgcagcagtttttccgtgattctgatgagctcaagagttgggtcaatgagaagatgaaaactgccacagatgaagcttataaagatccatccaacctacaaggaaaagtacagaagcatcaggcttttgaggctgagctctcagcaaaccagagccgaattgatgccttggagaaagctggccaaaagctgattgatgtcaaccactatgccaaggatgaagtggcagctcgtatgaatgaggtgatcagtttgtggaagaaactgctagaggccactgaactgaaaggaataaagcttcgtgaagccaaccagcaacagcaatttaatcgcaatgttgaggatattgaattgtggctatatgaagtagaaggtcacttggcttcggatgattacggcaaagatcttaccaatgtgcagaacctccagaagaaacatgccctgctagaggcagatgtggctgctcaccaggaccgaattgatggcatcaccattcaggcccgccagttccaagatgctggccattttgatgcagaaaacatcaagaagaaacaggaagccctcgtggctcgctatgaggcactcaaggagcccatggttgcccggaagcagaagctggccgattctctgcggttgcagcagctcttccgggatgttgaggatgaggagacgtggattcgagagaaagagcccattgccgcatctaccaacagaggtaaggatttaattggggtccagaatctgctaaagaaacatcaagccttacaagcagaaattgctggacatgaaccacgcatcaaagcagttacacagaaggggaatgccatggtggaggaaggccattttgctgcagaggatgtgaaggccaagcttcacgagctgaaccaaaagtgggaggcactgaaagccaaagcttcccagcgtcggcaggacctggaggactctctgcaggcccagcagtactttgctgatgctaacgaggctgaatcctggatgcgggagaaggaacccattgtgggcagcactgactatggcaaggacgaagactctgctgaggctctactgaagaaacacgaagctttgatgtcagatctcagtgcctacggcagcagcatccaggctttgcgagaacaagcacagtcctgccggcaacaagtggcccccacggatgatgagactgggaaggagctggtcttggctctctacgactatcaggagaagagtccccgagaggtcaccatgaagaagggagatatccttaccttactcaacagcaccaacaaggattggtggaaagtggaagtgaacgatcgtcagggttttgtgccggctgcgtacgtgaagaaattggaccccgcccagtcagcctcccgggagaatctcctggaggagcaaggcagcatagcactgcggcaggagcagattgacaatcagacacgcataactaaggaggccggcagtgtatctctgcgtatgaagcaggtggaagaactgtgagtaggctgagagtcttgcagagcaccaatgtccactgctaccctatccattctccctctgccgcttctcttgaaggcctttgtccatccagaaagatgaggtggtgggaggaactgcctgtccgtgcagcagctttggctcacaagggaagaggtcgcggtgcagctgtgtcggtcgatgactgcttatctcattggttgcttccatgtgcagctgtgtgttcagagtggtgttggttctccctcctgttggtttttgtggtggaccagccactatcagcagcaaacctgaaggcctgttctatagttttccttagtaggaaggaaatcatatgcttctcttaaagtgctctgattcttggtaactcattgcttttttattttactttgggacacttagatttgatgatgattctagttttttttaatttttagttttttattgtttgttgttttcgtgttcaaagataatatttcagccttttgtattttagttcccgagggttagaatattctttgattcttaagaaatctttcaagtaacagaatggcacagatactcagtactgtgcctgattttccttctgaacttgccaaaactttctgagagctgaatgtatcattttagaaatgtcctactaatatggagataaaacatcctatatgaggatattttaaagctcagtgtaccctcccccacctcaccccagcctgggggctcttcagagaattataaaagacagaaaaaccctctgtatacattctgcccagcaagttcatctcgtctctccactgtagttgcatgagccctgtgttactgtgctaagcgcttggtttcagtcccttgtggttgtgttgttctaagtgcagaatcggcctggggataagtgtgcctggctgttctagccacctggttgtgaacagtacagtgtgcgcatatctctcaggctgtggcgtgggtacttgggatcctcgtcttcatctgataactctgttactagggcatcatcattacaaactcgtagcctggaatccacatcttggagacacctcgtggtttgcctttatgttagcatctacagctaactgccttccttgtccctcttgtcaccctcttgaattccatcagatatcattctctgctggaactgggtgagaagcgtaaaggcatgttggagaagagttgcaagaagtttatgttgttccgtgaagcgaatgaactacagcaatggatcaatgagaaggaagccgctctgacaagtgaggaggtcggagcagacttggagcaggttgaggtgctccagaagaagtttgatgacttccagaaggacctgaaggccaatgagtcacggttgaaggacattaacaaggtagctgaagacctggagtctgaaggtcttatggcagaggaggtgcaggctgtgcaacaacaggaagtgtatggcatgatgcccagggatgaaactgattccaagacagcctccccgtggaagtctgctcgtctgatggttcacaccgtggccacctttaattccatcaaggagctgaatgagcgctggcggtccctacagcagctggccgaggaacggagccagctcttgggcagcgcccatgaagtacagaggttccacagagatgctgatgaaaccaaagaatggattgaagagaagaatcaagctctaaacacagacaattatggacatgatctcgccagtgtccaggccctgcaacgcaagcatgagggcttcgagagggaccttgcggctctcggtgacaaggtaaactcccttggtgaaacagcagagcgcctgatccagtcccatcccgagtcagcagaagacctgcaggaaaagtgcacagagttaaaccaggcctggagcagcctggggaaacgtgcagatcagcgcaaggcaaagttgggtgactcccacgacctgcagcgcttccttagcgatttccgggacctcatgtcttggatcaatggaatacgggggttggtgtcctcagatgagctagccaaggatgtcaccggagctgaggcattgctggagcgacaccaggaacaccggacagaaatcgatgccagggctggcactttccaggcatttgagcagtttggacagcagctgttggctcacggacactatgccagccctgagatcaagcagaaacttgatattcttgaccaggagcgtgcagacctggagaaggcctgggttcagcgcaggatgatgctggatcagtgccttgaactgcagctgttccatcgggactgtgagcaagctgagaactggatggctgcccgggaggccttcttgaataccgaagacaaaggagactcactggacagcgtagaggctctgatcaaaaaacatgaagactttgacaaagcgattaacgtccaggaagagaagattgctgctctgcaggcctttgccgaccagctcatcgctgccggccattatgccaagggagacatttctagccggcgcaatgaggtcttggacaggtggcgacgtctgaaagcccagatgattgagaaaaggtcaaagctaggagaatctcaaaccctccaacagttcagccgggatgtggatgagattgaggcttggatcagtgaaaaattgcaaacagcgagtgatgagtcgtacaaggatcccaccaacatccaggctttccaagctgctggagcaagcaccagaagcaccaggcttttgaagcagagctgcatgccaacgctgaccggatccgtggggttatcgacatgggcaactccctcattgaacgtggagcctgtgccggcagtgaggatgctgtcaaggcccgcctggctgccttagctgaccagtggcagttcttggtgcaaaagtcagcggaaaagagccagaaactgaaagaagccaacaagcagcagaacttcaacacagggatcaaggactttgacttctggctgtctgaggtggaggccctgctggcatccgaagattatggcaaagacctggcttctgtgaacaacctgctgaaaaagcatcaactgctggaagcagatatatctgcccatgaggatcgcctgaaggacctgaacagccaggcagacagcctgatgaccagcagtgccttcgacacctcccaagtaaaggacaagagggacaccatcaacgggcgcttccagaagatcaagagcatggcggcctcccggcgagccaagctgaatgaatcccatcgcctgcaccagttcttccgggacatggatgacgaggagtcctggatcaaggagaagaagctgctggtgggctcagaggactacggccgggacctaactggcgtgcagaacctgaggaagaagcacaagcggctggaagcagaactggctgcgcatgagccggctattcagggtgtcctggacactggcaagaagctgtccgatgacaacaccatcgggaaagaggagatccagcagcggctggcgcagtttgtggagcactggaaagagctgaagcagctggcagctgcccggggtcagcggctggaagagtccttggaatatcagcagtttgtagccaatgtggaagaggaagaagcctggatcaatgagaaaatgaccctggtggccagcgaagattatggcgacactcttgccgccatccagggcttactgaagaaacatgaagcttttgagacagacttcaccgtccacaaggatcgcgtgaatgatgtctgcaccaatggacaagacctcattaagaagaacaatcaccatgaggagaacatctcttcaaagatgaagggcctgaacgggaaagtgtcagacctggagaaagctgcagcccagagaaaggcgaagctggatgagaactcggccttccttcagttcaactggaaggcggacgtggtggagtcctggatcggtgaaaaggagaacagcttgaagacagatgattatggccgagacctgtcttctgtgcagacgctcctcaccaaacaggaaacttttgacgctgggctgcaggccttccagcaggaaggcattgccaacatcactgccctcaaagatcagcttctcgccgccaaacacgttcagtccaaggccatcgaggcccggcacgcctccctcatgaagaggtggagccagcttctggccaactcagccgcccgcaagaagaagcttctggaggctcagagtcacttccgcaaggtggaggacctcttcctgaccttcgccaaaaaggcttctgccttcaacagctggtttgaaaatgcagaggaggacttaacagaccccgtgcgctgcaactccttggaagaaatcaaagctttgcgcgaggcccacgacgccttccgctcctccctcagctctgcccaggctgacttcaaccagctggccgagctggaccgccagatcaagagcttccgcgtagcctccaacccctacacctggtttaccatggaggccctggaggagacctggaggaacctacagaaaatcatcaaggagagggagctggagctgcagaaggaacagcggcggcaggaggagaacgacaagctgcgccaggagtttgcccagcacgccaacgccttccaccagtggatccaagagaccaggacatacctcctcgatgggtcctgtatggtggaagagtcggggaccctcgaatcccagcttgaagctaccaaacgcaagcaccaggaaatccgagccatgagaagtcagctcaaaaagatcgaggacctgggggccgccatggaggaggccctcatcctggacaacaagtacacggagcacagcaccgtgggcctcgcccagcagtgggaccagctggaccagctgggcatgcgcatgcagcacaacctggagcagcagatccaggccaggaacacaacaggtgtgactgaggaggccctcaaagaattcagcatgatgtttaaacactttgacaaggacaagtctggcaggctgaaccatcaggagttcaaatcttgcctgcgctccctgggctatgacctgcccatggtggaggaaggggaacctgaccctgagttcgaggcaatcctggacacggtggatccgaacagagatggccatgtctccttgcaagaatacatggctttcatgatcagccgcgaaactgagaacgtcaagtccagcgaggagattgagagcgccttccgggccctcagctcagagggaaagccttacgtgaccaaggaggagctctaccagaacctgacccgggaacaagccgactactgcgtctcccacatgaagccctacgtggacggcaagggccgcgagctccccaccgcgttcgactacgtggagttcacccgctcgcttttcgtgaactgagccactccctgggtcacccacccctcgctgcttgccctgcgtcgccttgctgcatgtccgctcctctgtgtgctctcactttccactgtaaccttaagcctgcttagcttggaataagacttaggagaaaatggtgcttcactaacccgcttccggtccagtcacaatcatcatgtcactgtggggacccagatctgtgtcttgaagcagctgccctcattccgacttcagaaaatcgaagcagctggctcctccccttgttctctctcccaccctcccccaaatctgttttcatgtaaaagacaaataaatgatgacttcccccaaa

SEQ ID NO: 374332 - DNA, 4946 bp, Homo sapiens
gtgcaccttgcatgctgcggtcgctctaaggcctccccggcttactggaccttcaacaagtggcccccacggatgatgagactgggaaggagctggtcttggctctctacgactatcaggagaagagtccccgagaggtcaccatgaagaagggagatatccttaccttactcaacagcaccaacaaggattggtggaaagtggaagtgaacgatcgtcagggttttgtgccggctgcgtacgtgaagaaattggaccccgcccagtcagcctcccgggagaatctcctggaggagcaaggcagcatagcactgcggcaggagcagattgacaatcagacacgcataactaaggaggccggcagtgtatctctgcgtatgaagcaggtggaagaactatatcattctctgctggaactgggtgagaagcgtaaaggcatgttggagaagagttgcaagaagtttatgttgttccgtgaagcgaatgaactacagcaatggatcaatgagaaggaagccgctctgacaagtgaggaggtcggagcagacttggagcaggttgaggtgctccagaagaagtttgatgacttccagaaggacctgaaggccaatgagtcacggttgaaggacattaacaaggtagctgaagacctggagtctgaaggtcttatggcagaggaggtgcaggctgtgcaacaacaggaagtgtatggcatgatgcccagggatgaaactgattccaagacagcctccccgtggaagtctgctcgtctgatggttcacaccgtggccacctttaattccatcaaggagctgaatgagcgctggcggtccctacagcagctggccgaggaacggagccagctcttgggcagcgcccatgaagtacagaggttccacagagatgctgatgaaaccaaagaatggattgaagagaagaatcaagctctaaacacagacaattatggacatgatctcgccagtgtccaggccctgcaacgcaagcatgagggcttcgagagggaccttgcggctctcggtgacaaggtaaactcccttggtgaaacagcagagcgcctgatccagtcccatcccgagtcagcagaagacctgcaggaaaagtgcacagagttaaaccaggcctggagcagcctggggaaacgtgcagatcagcgcaaggcaaagttgggtgactcccacgacctgcagcgcttccttagcgatttccgggacctcatgtcttggatcaatggaatacgggggttggtgtcctcagatgagctagccaaggatgtcaccggagctgaggcattgctggagcgacaccaggaacaccggacagaaatcgatgccagggctggcactttccaggcatttgagcagtttggacagcagctgttggctcacggacactatgccagccctgagatcaagcagaaacttgatattcttgaccaggagcgtgcagacctggagaaggcctgggttcagcgcaggatgatgctggatcagtgccttgaactgcagctgttccatcgggactgtgagcaagctgagaactggatggctgcccgggaggccttcttgaataccgaagacaaaggagactcactggacagcgtagaggctctgatcaaaaaacatgaagactttgacaaagcgattaacgtccaggaagagaagattgctgctctgcaggcctttgccgaccagctcatcgctgccggccattatgccaagggagacatttctagccggcgcaatgaggtcttggacaggtggcgacgtctgaaagcccagatgattgagaaaaggtcaaagctaggagaatctcaaaccctccaacagttcagccgggatgtggatgagattgaggcttggatcagtgaaaaattgcaaacagcgagtgatgagtcgtacaaggatcccaccaacatccaggctttccaagctgctggagcaagcaccagaagcaccaggcttttgaagcagagctgcatgccaacgctgaccggatccgtggggttatcgacatgggcaactccctcattgaacgtggagcctgtgccggcagtgaggatgctgtcaaggcccgcctggctgccttagctgaccagtggcagttcttggtgcaaaagtcagcggaaaagagccagaaactgaaagaagccaacaagcagcagaacttcaacacagggatcaaggactttgacttctggctgtctgaggtggaggccctgctggcatccgaagattatggcaaagacctggcttctgtgaacaacctgctgaaaaagcatcaactgctggaagcagatatatctgcccatgaggatcgcctgaaggacctgaacagccaggcagacagcctgatgaccagcagtgccttcgacacctcccaagtaaaggacaagagggacaccatcaacgggcgcttccagaagatcaagagcatggcggcctcccggcgagccaagctgaatgaatcccatcgcctgcaccagttcttccgggacatggatgacgaggagtcctggatcaaggagaagaagctgctggtgggctcagaggactacggccgggacctaactggcgtgcagaacctgaggaagaagcacaagcggctggaagcagaactggctgcgcatgagccggctattcagggtgtcctggacactggcaagaagctgtccgatgacaacaccatcgggaaagaggagatccagcagcggctggcgcagtttgtggagcactggaaagagctgaagcagctggcagctgcccggggtcagcggctggaagagtccttggaatatcagcagtttgtagccaatgtggaagaggaagaagcctggatcaatgagaaaatgaccctggtggccagcgaagattatggcgacactcttgccgccatccagggcttactgaagaaacatgaagcttttgagacagacttcaccgtccacaaggatcgcgtgaatgatgtctgcaccaatggacaagacctcattaagaagaacaatcaccatgaggagaacatctcttcaaagatgaagggcctgaacgggaaagtgtcagacctggagaaagctgcagcccagagaaaggcgaagctggatgagaactcggccttccttcagttcaactggaaggcggacgtggtggagtcctggatcggtgaaaaggagaacagcttgaagacagatgattatggccgagacctgtcttctgtgcagacgctcctcaccaaacaggaaacttttgacgctgggctgcaggccttccagcaggaaggcattgccaacatcactgccctcaaagatcagcttctcgccgccaaacacgttcagtccaaggccatcgaggcccggcacgcctccctcatgaagaggtggagccagcttctggccaactcagccgcccgcaagaagaagcttctggaggctcagagtcacttccgcaaggtggaggacctcttcctgaccttcgccaaaaaggcttctgccttcaacagctggtttgaaaatgcagaggaggacttaacagaccccgtgcgctgcaactccttggaagaaatcaaagctttgcgcgaggcccacgacgccttccgctcctccctcagctctgcccaggctgacttcaaccagctggccgagctggaccgccagatcaagagcttccgcgtagcctccaacccctacacctggtttaccatggaggccctggaggagacctggaggaacctacagaaaatcatcaaggagagggagctggagctgcagaaggaacagcggcggcaggaggagaacgacaagctgcgccaggagtttgcccagcacgccaacgccttccaccagtggatccaagagaccaggacatacctcctcgatgggtcctgtatggtggaagagtcggggaccctcgaatcccagcttgaagctaccaaacgcaagcaccaggaaatccgagccatgagaagtcagctcaaaaagatcgaggacctgggggccgccatggaggaggccctcatcctggacaacaagtacacggagcacagcaccgtgggcctcgcccagcagtgggaccagctggaccagctgggcatgcgcatgcagcacaacctggagcagcagatccaggccaggaacacaacaggtgtgactgaggaggccctcaaagaattcagcatgatgtttaaacactttgacaaggacaagtctggcaggctgaaccatcaggagttcaaatcttgcctgcgctccctgggctatgacctgcccatggtggaggaaggggaacctgaccctgagttcgaggcaatcctggacacggtggatccgaacagagatggccatgtctccttgcaagaatacatggctttcatgatcagccgcgaaactgagaacgtcaagtccagcgaggagattgagagcgccttccgggccctcagctcagagggaaagccttacgtgaccaaggaggagctctaccagaacctgacccgggaacaagccgactactgcgtctcccacatgaagccctacgtggacggcaagggccgcgagctccccaccgcgttcgactacgtggagttcacccgctcgcttttcgtgaactgagccactccctgggtcacccacccctcgctgcttgccctgcgtcgccttgctgcatgtccgctcctctgtgtgctctcactttccactgtaaccttaagcctgcttagcttggaataagacttaggagaaaatggtgcttcactaacccgcttccggtccagtcacaatcatcatgtcactgtggggacccagatctgtgtcttgaagcagctgccctcattccgacttcagaaaatcgaagcagctggctcctccccttgttctctctcccaccctcccccaaatctgttttcatgtaaaagacaaataaatgatgacttcccccaaa

SEQ ID NO: 374333 - DNA, 4181 bp, Homo sapiens
taggctagtagaggcgggtgtgaatcggccgagggctagctgaatgaatccatcgcctgcaccagttcttccgggacatggatgacgaggagtcctggatcaaggagaagaagctgctggtgggctcagaggactacggccgggacctaactggcgtgcagaacctgaggaagaagcacaagcggctggaagcagaactggctgcgcatgagccggctgtccaggccctgcaacgcaagcatgagggcttcgagagggaccttgcggctctcggtgacaaggtaaactcccttggtgaaacagcagagcgcctgatccagtcccatcccgagtcagcagaagacctgcaggaaaagtgcacagagttaaaccaggcctggagcagcctggggaaacgtgcagatcagcgcaaggcaaagttgggtgactcccacgacctgcagcgcttccttagcgatttccgggacctcatgtcttggatcaatggaatacgggggttggtgtcctcagatgagctagccaaggatgtcaccggagctgaggcattgctggagcgacaccaggaacaccggacagaaatcgatgccagggctggcactttccaggcatttgagcagtttggacagcagctgttggctcacggacactatgccagccctgagatcaagcagaaacttgatattcttgaccaggagcgtgcagacctggagaaggcctgggttcagcgcaggatgatgctggatcagtgccttgaactgcagctgttccatcgggactgtgagcaagctgagaactggatggctgcccgggaggccttcttgaataccgaagacaaaggagactcactggacagcgtagaggctctgatcaaaaaacatgaagactttgacaaagcgattaacgtccaggaagagaagattgctgctctgcaggcctttgccgaccagctcatcgctgccggccattatgccaagggagacatttctagccggcgcaatgaggtcttggacaggtggcgacgtctgaaagcccagatgattgagaaaaggtcaaagctaggagaatctcaaaccctccaacagttcagccgggatgtggatgagattgaggcttggatcagtgaaaaattgcaaacagcgagtgatgagtcgtacaaggatcccaccaacatccaggctttccaagctgctggagcaagcaccagaagcaccaggcttttgaagcagagctgcatgccaacgctgaccggatccgtggggttatcgacatgggcaactccctcattgaacgtggagcctgtgccggcagtgaggatgctgtcaaggcccgcctggctgccttagctgaccagtggcagttcttggtgcaaaagtcagcggaaaagagccagaaactgaaagaagccaacaagcagcagaacttcaacacagggatcaaggactttgacttctggctgtctgaggtggaggccctgctggcatccgaagattatggcaaagacctggcttctgtgaacaacctgctgaaaaagcatcaactgctggaagcagatatatctgcccatgaggatcgcctgaaggacctgaacagccaggcagacagcctgatgaccagcagtgccttcgacacctcccaagtaaaggacaagagggacaccatcaacgggcgcttccagaagatcaagagcatggcggcctcccggcgagccaagctgaatgaatcccatcgcctgcaccagttcttccgggacatggatgacgaggagtcctggatcaaggagaagaagctgctggtgggctcagaggactacggccgggacctaactggcgtgcagaacctgaggaagaagcacaagcggctggaagcagaactggctgcgcatgagccggctattcagggtgtcctggacactggcaagaagctgtccgatgacaacaccatcgggaaagaggagatccagcagcggctggcgcagtttgtggagcactggaaagagctgaagcagctggcagctgcccggggtcagcggctggaagagtccttggaatatcagcagtttgtagccaatgtggaagaggaagaagcctggatcaatgagaaaatgaccctggtggccagcgaagattatggcgacactcttgccgccatccagggcttactgaagaaacatgaagcttttgagacagacttcaccgtccacaaggatcgcgtgaatgatgtctgcaccaatggacaagacctcattaagaagaacaatcaccatgaggagaacatctcttcaaagatgaagggcctgaacgggaaagtgtcagacctggagaaagctgcagcccagagaaaggcgaagctggatgagaactcggccttccttcagttcaactggaaggcggacgtggtggagtcctggatcggtgaaaaggagaacagcttgaagacagatgattatggccgagacctgtcttctgtgcagacgctcctcaccaaacaggaaacttttgacgctgggctgcaggccttccagcaggaaggcattgccaacatcactgccctcaaagatcagcttctcgccgccaaacacgttcagtccaaggccatcgaggcccggcacgcctccctcatgaagaggtggagccagcttctggccaactcagccgcccgcaagaagaagcttctggaggctcagagtcacttccgcaaggtggaggacctcttcctgaccttcgccaaaaaggcttctgccttcaacagctggtttgaaaatgcagaggaggacttaacagaccccgtgcgctgcaactccttggaagaaatcaaagctttgcgcgaggcccacgacgccttccgctcctccctcagctctgcccaggctgacttcaaccagctggccgagctggaccgccagatcaagagcttccgcgtagcctccaacccctacacctggtttaccatggaggccctggaggagacctggaggaacctacagaaaatcatcaaggagagggagctggagctgcagaaggaacagcggcggcaggaggagaacgacaagctgcgccaggagtttgcccagcacgccaacgccttccaccagtggatccaagagaccaggacatacctcctcgatgggtcctgtatggtggaagagtcggggaccctcgaatcccagcttgaagctaccaaacgcaagcaccaggaaatccgagccatgagaagtcagctcaaaaagatcgaggacctgggggccgccatggaggaggccctcatcctggacaacaagtacacggagcacagcaccgtgggcctcgcccagcagtgggaccagctggaccagctgggcatgcgcatgcagcacaacctggagcagcagatccaggccaggaacacaacaggtgtgactgaggaggccctcaaagaattcagcatgatgtttaaacactttgacaaggacaagtctggcaggctgaaccatcaggagttcaaatcttgcctgcgctccctgggctatgacctgcccatggtggaggaaggggaacctgaccctgagttcgaggcaatcctggacacggtggatccgaacagagatggccatgtctccttgcaagaatacatggctttcatgatcagccgcgaaactgagaacgtcaagtccagcgaggagattgagagcgccttccgggccctcagctcagagggaaagccttacgtgaccaaggaggagctctaccagaacctgacccgggaacaagccgactactgcgtctcccacatgaagccctacgtggacggcaagggccgcgagctccccaccgcgttcgactacgtggagttcacccgctcgcttttcgtgaactgagccactccctgggtcacccacccctcgctgcttgccctgcgtcgccttgctgcatgtccgctcctctgtgtgctctcactttccactgtaaccttaagcctgcttagcttggaataagacttaggagaaaatggtgcttcactaacccgcttccggtccagtcacaatcatcatgtcactgtggggacccagatctgtgtcttgaagcagctgccctcattccgacttcagaaaatcgaagcagctggctcctccccttgttctctctcccaccctcccccaaatctgttttcatgtaaaagacaaataaatgatgacttcccccaaa

SEQ ID NO: 374334 - DNA, 3712 bp, Homo sapiens
  misc_feature (272)..(272): n is a, c, g, or t
taggctagtagaggcgggtgtgaatcggccgagggctagctgaatgaatccatcgcctgcaccagttcttccgggacatggatgacgaggagtcctggatcaaggagaagaagctgctggtgggctcagaggactacggccgggacctaactggcgtgcagaacctgaggaagaagcacaagcggctggaagcagaactggctgcgcatgagccggctattcagggtgtcctggacactggcaagaagctgtccgatgacaacaccatcggnaaagaggagatccagcagcggctgcgcagtttgtggagcactggaaagagctgaagcagctggcagctgcccggggtcagcggctggaagagtccttggaatatcagcagtttgtagccaatgtggaagaggaagaagcctggatcaatgagaaaatgaccctggtggccagcgaagattatggcgacactcttgccgccatccagggcttactgaagaaacatgaagcttttgagacagacttcaccgtccacaaggatcgcgtgaatgatgtctgcaccaatggacaagacctcattaagaaaaggtcaaagctaggagaatctcaaaccctccaacagttcagccgggatgtggatgagattgaggcttggatcagtgaaaaattgcaaacagcgagtgatgagtcgtacaaggatcccaccaacatccaggctttccaagctgctggagcaagcaccagaagcaccaggcttttgaagcagagctgcatgccaacgctgaccggatccgtggggttatcgacatgggcaactccctcattgaacgtggagcctgtgccggcagtgaggatgctgtcaaggcccgcctggctgccttagctgaccagtggcagttcttggtgcaaaagtcagcggaaaagagccagaaactgaaagaagccaacaagcagcagaacttcaacacagggatcaaggactttgacttctggctgtctgaggtggaggccctgctggcatccgaagattatggcaaagacctggcttctgtgaacaacctgctgaaaaagcatcaactgctggaagcagatatatctgcccatgaggatcgcctgaaggacctgaacagccaggcagacagcctgatgaccagcagtgccttcgacacctcccaagtaaaggacaagagggacaccatcaacgggcgcttccagaagatcaagagcatggcggcctcccggcgagccaagctgaatgaatcccatcgcctgcaccagttcttccgggacatggatgacgaggagtcctggatcaaggagaagaagctgctggtgggctcagaggactacggccgggacctaactggcgtgcagaacctgaggaagaagcacaagcggctggaagcagaactggctgcgcatgagccggctattcagggtgtcctggacactggcaagaagctgtccgatgacaacaccatcgggaaagaggagatccagcagcggctggcgcagtttgtggagcactggaaagagctgaagcagctggcagctgcccggggtcagcggctggaagagtccttggaatatcagcagtttgtagccaatgtggaagaggaagaagcctggatcaatgagaaaatgaccctggtggccagcgaagattatggcgacactcttgccgccatccagggcttactgaagaaacatgaagcttttgagacagacttcaccgtccacaaggatcgcgtgaatgatgtctgcaccaatggacaagacctcattaagaagaacaatcaccatgaggagaacatctcttcaaagatgaagggcctgaacgggaaagtgtcagacctggagaaagctgcagcccagagaaaggcgaagctggatgagaactcggccttccttcagttcaactggaaggcggacgtggtggagtcctggatcggtgaaaaggagaacagcttgaagacagatgattatggccgagacctgtcttctgtgcagacgctcctcaccaaacaggaaacttttgacgctgggctgcaggccttccagcaggaaggcattgccaacatcactgccctcaaagatcagcttctcgccgccaaacacgttcagtccaaggccatcgaggcccggcacgcctccctcatgaagaggtggagccagcttctggccaactcagccgcccgcaagaagaagcttctggaggctcagagtcacttccgcaaggtggaggacctcttcctgaccttcgccaaaaaggcttctgccttcaacagctggtttgaaaatgcagaggaggacttaacagaccccgtgcgctgcaactccttggaagaaatcaaagctttgcgcgaggcccacgacgccttccgctcctccctcagctctgcccaggctgacttcaaccagctggccgagctggaccgccagatcaagagcttccgcgtagcctccaacccctacacctggtttaccatggaggccctggaggagacctggaggaacctacagaaaatcatcaaggagagggagctggagctgcagaaggaacagcggcggcaggaggagaacgacaagctgcgccaggagtttgcccagcacgccaacgccttccaccagtggatccaagagaccaggacatacctcctcgatgggtcctgtatggtggaagagtcggggaccctcgaatcccagcttgaagctaccaaacgcaagcaccaggaaatccgagccatgagaagtcagctcaaaaagatcgaggacctgggggccgccatggaggaggccctcatcctggacaacaagtacacggagcacagcaccgtgggcctcgcccagcagtgggaccagctggaccagctgggcatgcgcatgcagcacaacctggagcagcagatccaggccaggaacacaacaggtgtgactgaggaggccctcaaagaattcagcatgatgtttaaacactttgacaaggacaagtctggcaggctgaaccatcaggagttcaaatcttgcctgcgctccctgggctatgacctgcccatggtggaggaaggggaacctgaccctgagttcgaggcaatcctggacacggtggatccgaacagagatggccatgtctccttgcaagaatacatggctttcatgatcagccgcgaaactgagaacgtcaagtccagcgaggagattgagagcgccttccgggccctcagctcagagggaaagccttacgtgaccaaggaggagctctaccagaacctgacccgggaacaagccgactactgcgtctcccacatgaagccctacgtggacggcaagggccgcgagctccccaccgcgttcgactacgtggagttcacccgctcgcttttcgtgaactgagccactccctgggtcacccacccctcgctgcttgccctgcgtcgccttgctgcatgtccgctcctctgtgtgctctcactttccactgtaaccttaagcctgcttagcttggaataagacttaggagaaaatggtgcttcactaacccgcttccggtccagtcacaatcatcatgtcactgtggggacccagatctgtgtcttgaagcagctgccctcattccgacttcagaaaatcgaagcagctggctcctccccttgttctctctcccaccctcccccaaatctgttttcatgtaaaagacaaataaatgatgacttcccccaaa

SEQ ID NO: 374335 - DNA, 3531 bp, Homo sapiens
ccatctccactgaggagggcagtatattttccacacttcgttttctaggtgaaaaggagaacagcttgaagacagatgattatggccgagacctgtcttctgtgcagacgctcctcaccaaacaggtctgccctggccccttcactggttgaaatgtatgcagatagcatctgtgagatgactggtggcgtctttcgctgaggtaggagaattgcttgagccgaagaggttgaggctgcagtgagctgagattacgccactgcactccagcctgggcaactgagcaagaccctgtctcaaaaaaaaggacttccagttcatctactcctgagctagtacatttccttcctcctttgctaactccccaagagatgaaccctaaaatatttcatacaaactccaattgccttctgttaaaaacgttggcatttaccccagttctttatgtttgctgccactccctgcctctgagaaccccttccccctgaaaagacataacctagcaggaactggtttggaaaaaatttttttggtatttttagagcaagcaccagaagcaccaggcttttgaagcagagctgcatgccaacgctgaccggatccgtggggttatcgacatgggcaactccctcattgaacgtggagcctgtgccggcagtgaggatgctgtcaaggcccgcctggctgccttagctgaccagtggcagttcttggtgcaaaagtcagcggaaaagagccagaaactgaaagaagccaacaagcagcagaacttcaacacagggatcaaggactttgacttctggctgtctgaggtggaggccctgctggcatccgaagattatggcaaagacctggcttctgtgaacaacctgctgaaaaagcatcaactgctggaagcagatatatctgcccatgaggatcgcctgaaggacctgaacagccaggcagacagcctgatgaccagcagtgccttcgacacctcccaagtaaaggacaagagggacaccatcaacgggcgcttccagaagatcaagagcatggcggcctcccggcgagccaagctgaatgaatcccatcgcctgcaccagttcttccgggacatggatgacgaggagtcctggatcaaggagaagaagctgctggtgggctcagaggactacggccgggacctaactggcgtgcagaacctgaggaagaagcacaagcggctggaagcagaactggctgcgcatgagccggctattcagggtgtcctggacactggcaagaagctgtccgatgacaacaccatcgggaaagaggagatccagcagcggctggcgcagtttgtggagcactggaaagagctgaagcagctggcagctgcccggggtcagcggctggaagagtccttggaatatcagcagtttgtagccaatgtggaagaggaagaagcctggatcaatgagaaaatgaccctggtggccagcgaagattatggcgacactcttgccgccatccagggcttactgaagaaacatgaagcttttgagacagacttcaccgtccacaaggatcgcgtgaatgatgtctgcaccaatggacaagacctcattaagaagaacaatcaccatgaggagaacatctcttcaaagatgaagggcctgaacgggaaagtgtcagacctggagaaagctgcagcccagagaaaggcgaagctggatgagaactcggccttccttcagttcaactggaaggcggacgtggtggagtcctggatcggtgaaaaggagaacagcttgaagacagatgattatggccgagacctgtcttctgtgcagacgctcctcaccaaacaggaaacttttgacgctgggctgcaggccttccagcaggaaggcattgccaacatcactgccctcaaagatcagcttctcgccgccaaacacgttcagtccaaggccatcgaggcccggcacgcctccctcatgaagaggtggagccagcttctggccaactcagccgcccgcaagaagaagcttctggaggctcagagtcacttccgcaaggtggaggacctcttcctgaccttcgccaaaaaggcttctgccttcaacagctggtttgaaaatgcagaggaggacttaacagaccccgtgcgctgcaactccttggaagaaatcaaagctttgcgcgaggcccacgacgccttccgctcctccctcagctctgcccaggctgacttcaaccagctggccgagctggaccgccagatcaagagcttccgcgtagcctccaacccctacacctggtttaccatggaggccctggaggagacctggaggaacctacagaaaatcatcaaggagagggagctggagctgcagaaggaacagcggcggcaggaggagaacgacaagctgcgccaggagtttgcccagcacgccaacgccttccaccagtggatccaagagaccaggacatacctcctcgatgggtcctgtatggtggaagagtcggggaccctcgaatcccagcttgaagctaccaaacgcaagcaccaggaaatccgagccatgagaagtcagctcaaaaagatcgaggacctgggggccgccatggaggaggccctcatcctggacaacaagtacacggagcacagcaccgtgggcctcgcccagcagtgggaccagctggaccagctgggcatgcgcatgcagcacaacctggagcagcagatccaggccaggaacacaacaggtgtgactgaggaggccctcaaagaattcagcatgatgtttaaacactttgacaaggacaagtctggcaggctgaaccatcaggagttcaaatcttgcctgcgctccctgggctatgacctgcccatggtggaggaaggggaacctgaccctgagttcgaggcaatcctggacacggtggatccgaacagagatggccatgtctccttgcaagaatacatggctttcatgatcagccgcgaaactgagaacgtcaagtccagcgaggagattgagagcgccttccgggccctcagctcagagggaaagccttacgtgaccaaggaggagctctaccagaacctgacccgggaacaagccgactactgcgtctcccacatgaagccctacgtggacggcaagggccgcgagctccccaccgcgttcgactacgtggagttcacccgctcgcttttcgtgaactgagccactccctgggtcacccacccctcgctgcttgccctgcgtcgccttgctgcatgtccgctcctctgtgtgctctcactttccactgtaaccttaagcctgcttagcttggaataagacttaggagaaaatggtgcttcactaacccgcttccggtccagtcacaatcatcatgtcactgtggggacccagatctgtgtcttgaagcagctgccctcattccgacttcagaaaatcgaagcagctggctcctccccttgttctctctcccaccctcccccaaatctgttttcatgtaaaagacaaataaatgatgacttcccccaaa

SEQ ID NO: 374336 - DNA, 3075 bp, Homo sapiens
gtcactgtcaacctgatataataacttggacatacagtcttaagacactaaatggattatagaagactttaggctgaattacagatggggaatgctagtgagaatggctcctatgagtgttttccattctcttctcttagaagttctcaaattgagctttaggagagggacgattcttcatagatttcatctctttttggctcccttctgttccccaggcccgcctggctgccttagctgaccagtggcagttcttggtgcaaaagtcagcggaaaagagccagaaactgaaagaagccaacaagcagcagaacttcaacacagggatcaaggactttgacttctggctgtctgaggtggaggccctgctggcatccgaagattatggcaaagacctggcttctgtgaacaacctgctgaaaaagcatcaactgctggaagcagatatatctgcccatgaggatcgcctgaaggacctgaacagccaggcagacagcctgatgaccagcagtgccttcgacacctcccaagtaaaggacaagagggacaccatcaacgggcgcttccagaagatcaagagcatggcggcctcccggcgagccaagctgaatgaatcccatcgcctgcaccagttcttccgggacatggatgacgaggagtcctggatcaaggagaagaagctgctggtgggctcagaggactacggccgggacctaactggcgtgcagaacctgaggaagaagcacaagcggctggaagcagaactggctgcgcatgagccggctattcagggtgtcctggacactggcaagaagctgtccgatgacaacaccatcgggaaagaggagatccagcagcggctggcgcagtttgtggagcactggaaagagctgaagcagctggcagctgcccggggtcagcggctggaagagtccttggaatatcagcagtttgtagccaatgtggaagaggaagaagcctggatcaatgagaaaatgaccctggtggccagcgaagattatggcgacactcttgccgccatccagggcttactgaagaaacatgaagcttttgagacagacttcaccgtccacaaggatcgcgtgaatgatgtctgcaccaatggacaagacctcattaagaagaacaatcaccatgaggagaacatctcttcaaagatgaagggcctgaacgggaaagtgtcagacctggagaaagctgcagcccagagaaaggcgaagctggatgagaactcggccttccttcagttcaactggaaggcggacgtggtggagtcctggatcggtgaaaaggagaacagcttgaagacagatgattatggccgagacctgtcttctgtgcagacgctcctcaccaaacaggaaacttttgacgctgggctgcaggccttccagcaggaaggcattgccaacatcactgccctcaaagatcagcttctcgccgccaaacacgttcagtccaaggccatcgaggcccggcacgcctccctcatgaagaggtggagccagcttctggccaactcagccgcccgcaagaagaagcttctggaggctcagagtcacttccgcaaggtggaggacctcttcctgaccttcgccaaaaaggcttctgccttcaacagctggtttgaaaatgcagaggaggacttaacagaccccgtgcgctgcaactccttggaagaaatcaaagctttgcgcgaggcccacgacgccttccgctcctccctcagctctgcccaggctgacttcaaccagctggccgagctggaccgccagatcaagagcttccgcgtagcctccaacccctacacctggtttaccatggaggccctggaggagacctggaggaacctacagaaaatcatcaaggagagggagctggagctgcagaaggaacagcggcggcaggaggagaacgacaagctgcgccaggagtttgcccagcacgccaacgccttccaccagtggatccaagagaccaggacatacctcctcgatgggtcctgtatggtggaagagtcggggaccctcgaatcccagcttgaagctaccaaacgcaagcaccaggaaatccgagccatgagaagtcagctcaaaaagatcgaggacctgggggccgccatggaggaggccctcatcctggacaacaagtacacggagcacagcaccgtgggcctcgcccagcagtgggaccagctggaccagctgggcatgcgcatgcagcacaacctggagcagcagatccaggccaggaacacaacaggtgtgactgaggaggccctcaaagaattcagcatgatgtttaaacactttgacaaggacaagtctggcaggctgaaccatcaggagttcaaatcttgcctgcgctccctgggctatgacctgcccatggtggaggaaggggaacctgaccctgagttcgaggcaatcctggacacggtggatccgaacagagatggccatgtctccttgcaagaatacatggctttcatgatcagccgcgaaactgagaacgtcaagtccagcgaggagattgagagcgccttccgggccctcagctcagagggaaagccttacgtgaccaaggaggagctctaccagaacctgacccgggaacaagccgactactgcgtctcccacatgaagccctacgtggacggcaagggccgcgagctccccaccgcgttcgactacgtggagttcacccgctcgcttttcgtgaactgagccactccctgggtcacccacccctcgctgcttgccctgcgtcgccttgctgcatgtccgctcctctgtgtgctctcactttccactgtaaccttaagcctgcttagcttggaataagacttaggagaaaatggtgcttcactaacccgcttccggtccagtcacaatcatcatgtcactgtggggacccagatctgtgtcttgaagcagctgccctcattccgacttcagaaaatcgaagcagctggctcctccccttgttctctctcccaccctcccccaaatctgttttcatgtaaaagacaaataaatgatgacttcccccaaa

SEQ ID NO: 374337 - DNA, 2646 bp, Homo sapiens
tacttttcacaggggggaagagggttgttatggtttcggacgacccttgctctgaccaggcagacagcctgatgaccagcagtgccttcgacacctcccaagtaaaggacaagagggacaccatcaacgggcgcttccagaagatcaagagcatggcggcctcccggcgagccaagctgaatgaatcccatcgcctgcaccagttcttccgggacatggatgacgaggagtcctggatcaaggagaagaagctgctggtgggctcagaggactacggccgggacctaactggcgtgcagaacctgaggaagaagcacaagcggctggaagcagaactggctgcgcatgagccggctattcagggtgtcctggacactggcaagaagctgtccgatgacaacaccatcgggaaagaggagatccagcagcggctggcgcagtttgtggagcactggaaagagctgaagcagctggcagctgcccggggtcagcggctggaagagtccttggaatatcagcagtttgtagccaatgtggaagaggaagaagcctggatcaatgagaaaatgaccctggtggccagcgaagattatggcgacactcttgccgccatccagggcttactgaagaaacatgaagcttttgagacagacttcaccgtccacaaggatcgcgtgaatgatgtctgcaccaatggacaagacctcattaagaagaacaatcaccatgaggagaacatctcttcaaagatgaagggcctgaacgggaaagtgtcagacctggagaaagctgcagcccagagaaaggcgaagctggatgagaactcggccttccttcagttcaactggaaggcggacgtggtggagtcctggatcggtgaaaaggagaacagcttgaagacagatgattatggccgagacctgtcttctgtgcagacgctcctcaccaaacaggaaacttttgacgctgggctgcaggccttccagcaggaaggcattgccaacatcactgccctcaaagatcagcttctcgccgccaaacacgttcagtccaaggccatcgaggcccggcacgcctccctcatgaagaggtggagccagcttctggccaactcagccgcccgcaagaagaagcttctggaggctcagagtcacttccgcaaggtggaggacctcttcctgaccttcgccaaaaaggcttctgccttcaacagctggtttgaaaatgcagaggaggacttaacagaccccgtgcgctgcaactccttggaagaaatcaaagctttgcgcgaggcccacgacgccttccgctcctccctcagctctgcccaggctgacttcaaccagctggccgagctggaccgccagatcaagagcttccgcgtagcctccaacccctacacctggtttaccatggaggccctggaggagacctggaggaacctacagaaaatcatcaaggagagggagctggagctgcagaaggaacagcggcggcaggaggagaacgacaagctgcgccaggagtttgcccagcacgccaacgccttccaccagtggatccaagagaccaggacatacctcctcgatgggtcctgtatggtggaagagtcggggaccctcgaatcccagcttgaagctaccaaacgcaagcaccaggaaatccgagccatgagaagtcagctcaaaaagatcgaggacctgggggccgccatggaggaggccctcatcctggacaacaagtacacggagcacagcaccgtgggcctcgcccagcagtgggaccagctggaccagctgggcatgcgcatgcagcacaacctggagcagcagatccaggccaggaacacaacaggtgtgactgaggaggccctcaaagaattcagcatgatgtttaaacactttgacaaggacaagtctggcaggctgaaccatcaggagttcaaatcttgcctgcgctccctgggctatgacctgcccatggtggaggaaggggaacctgaccctgagttcgaggcaatcctggacacggtggatccgaacagagatggccatgtctccttgcaagaatacatggctttcatgatcagccgcgaaactgagaacgtcaagtccagcgaggagattgagagcgccttccgggccctcagctcagagggaaagccttacgtgaccaaggaggagctctaccagaacctgacccgggaacaagccgactactgcgtctcccacatgaagccctacgtggacggcaagggccgcgagctccccaccgcgttcgactacgtggagttcacccgctcgcttttcgtgaactgagccactccctgggtcacccacccctcgctgcttgccctgcgtcgccttgctgcatgtccgctcctctgtgtgctctcactttccactgtaaccttaagcctgcttagcttggaataagacttaggagaaaatggtgcttcactaacccgcttccggtccagtcacaatcatcatgtcactgtggggacccagatctgtgtcttgaagcagctgccctcattccgacttcagaaaatcgaagcagctggctcctccccttgttctctctcccaccctcccccaaatctgttttcatgtaaaagacaaataaatgatgacttcccccaaa

SEQ ID NO: 374338 - DNA, 2672 bp, Homo sapiens
gatgaaaggcgatcatcatgggcagatatatctgcttcagcagttgatgctttttcagcaggttgttcacagaagccaggtcttgccataatcttcggatgccagcagtgccttcgacacctcccaagtaaaggacaagagggacaccatcaacgggcgcttccagaagatcaagagcatggcggcctcccggcgagccaagctgaatgaatcccatcgcctgcaccagttcttccgggacatggatgacgaggagtcctggatcaaggagaagaagctgctggtgggctcagaggactacggccgggacctaactggcgtgcagaacctgaggaagaagcacaagcggctggaagcagaactggctgcgcatgagccggctattcagggtgtcctggacactggcaagaagctgtccgatgacaacaccatcgggaaagaggagatccagcagcggctggcgcagtttgtggagcactggaaagagctgaagcagctggcagctgcccggggtcagcggctggaagagtccttggaatatcagcagtttgtagccaatgtggaagaggaagaagcctggatcaatgagaaaatgaccctggtggccagcgaagattatggcgacactcttgccgccatccagggcttactgaagaaacatgaagcttttgagacagacttcaccgtccacaaggatcgcgtgaatgatgtctgcaccaatggacaagacctcattaagaagaacaatcaccatgaggagaacatctcttcaaagatgaagggcctgaacgggaaagtgtcagacctggagaaagctgcagcccagagaaaggcgaagctggatgagaactcggccttccttcagttcaactggaaggcggacgtggtggagtcctggatcggtgaaaaggagaacagcttgaagacagatgattatggccgagacctgtcttctgtgcagacgctcctcaccaaacaggaaacttttgacgctgggctgcaggccttccagcaggaaggcattgccaacatcactgccctcaaagatcagcttctcgccgccaaacacgttcagtccaaggccatcgaggcccggcacgcctccctcatgaagaggtggagccagcttctggccaactcagccgcccgcaagaagaagcttctggaggctcagagtcacttccgcaaggtggaggacctcttcctgaccttcgccaaaaaggcttctgccttcaacagctggtttgaaaatgcagaggaggacttaacagaccccgtgcgctgcaactccttggaagaaatcaaagctttgcgcgaggcccacgacgccttccgctcctccctcagctctgcccaggctgacttcaaccagctggccgagctggaccgccagatcaagagcttccgcgtagcctccaacccctacacctggtttaccatggaggccctggaggagacctggaggaacctacagaaaatcatcaaggagagggagctggagctgcagaaggaacagcggcggcaggaggagaacgacaagctgcgccaggagtttgcccagcacgccaacgccttccaccagtggatccaagagaccaggacatacctcctcgatgggtcctgtatggtggaagagtcggggaccctcgaatcccagcttgaagctaccaaacgcaagcaccaggaaatccgagccatgagaagtcagctcaaaaagatcgaggacctgggggccgccatggaggaggccctcatcctggacaacaagtacacggagcacagcaccgtgggcctcgcccagcagtgggaccagctggaccagctgggcatgcgcatgcagcacaacctggagcagcagatccaggccaggaacacaacaggtgtgactgaggaggccctcaaagaattcagcatgatgtttaaacactttgacaaggacaagtctggcaggctgaaccatcaggagttcaaatcttgcctgcgctccctgggctatgacctgcccatggtggaggaaggggaacctgaccctgagttcgaggcaatcctggacacggtggatccgaacagagatggccatgtctccttgcaagaatacatggctttcatgatcagccgcgaaactgagaacgtcaagtccagcgaggagattgagagcgccttccgggccctcagctcagagggaaagccttacgtgaccaaggaggagctctaccagaacctgacccgggaacaagccgactactgcgtctcccacatgaagccctacgtggacggcaagggccgcgagctccccaccgcgttcgactacgtggagttcacccgctcgcttttcgtgaactgagccactccctgggtcacccacccctcgctgcttgccctgcgtcgccttgctgcatgtccgctcctctgtgtgctctcactttccactgtaaccttaagcctgcttagcttggaataagacttaggagaaaatggtgcttcactaacccgcttccggtccagtcacaatcatcatgtcactgtggggacccagatctgtgtcttgaagcagctgccctcattccgacttcagaaaatcgaagcagctggctcctccccttgttctctctcccaccctcccccaaatctgttttcatgtaaaagacaaataaatgatgacttcccccaaa

SEQ ID NO: 374339 - DNA, 7594 bp, Homo sapiens
cgccactacccgctgcggagtgaacggtgtggagcggaggccgcggaggctcctcggtccttcagcacccctcggcccgacgcacccacgcccctcaccccccgagagccgaaaatggacccaagtggggtcaaagtgctggaaacagcagaggacatccaggagaggcggcagcaggtcctagaccgataccaccgcttcaaggaactctcaacccttaggcgtcagaagctggaagattcctatcgattccagttctttcaaagagatgctgaagagctggagaaatggatacaggaaaaacttcagattgcatctgatgagaattataaagacccaaccaacttgcagggaaagcttcagaagcatcaagcatttgaagctgaagtgcaggccaactcaggagccattgttaagctggatgaaactggaaacctgatgatctcagaagggcattttgcatctgaaaccatacggacccgtttgatggagctgcaccgccagtgggaattacttttggagaagatgcgagaaaaaggaatcaaactgctgcaggcccagaagttggtgcagtacttacgagaatgtgaggacgtgatggactggatcaatgacaaggaagcaattgttacttctgaagagctgggccaggatctggagcatgtagaggttttacagaagaaatttgaagagtttcaaacagatatggctgctcatgaagaaagagttaatgaagtgaaccagtttgctgccaaactcatacaggagcagcaccctgaggaggaactgatcaagactaagcaggatgaagtcaatgcagcctggcagcggctgaagggcctggctctgcagaggcaggggaagctctttggggcagcagaagttcagcgctttaacagggatgtggatgagactatcagttggattaaggaaaaggagcagttaatggcctctgatgattttggccgagacctggcaagtgttcaggctctgcttcggaagcacgagggtctggagagagatcttgctgctctagaagacaaggtcaaagccctgtgtgctgaggctgaccgcctgcaacagtcccaccctctgagtgcaacacagattcaagtgaagcgagaggaactgattacaaactgggagcagatccgcaccttggcggcagagagacatgcacggctcaatgattcatacaggcttcaacgcttccttgctgacttccgtgacctcaccagctgggtgactgagatgaaagccctcatcaatgcagatgagcttgccagtgatgtggctggggctgaagccctgctagatagacaccaagagcacaagggtgaaattgatgcccatgaagacagcttcaaatctgcagatgaatctggacaggcactgcttgctgctggtcactatgcctcagatgaagtgagggagaagctgaccgtcctttccgaggagagagcggcgctgctggagctgtgggagctgcgcaggcagcagtacgagcagtgcatggacctgcagctcttctaccgggacactgagcaggtggacaactggatgagcaagcaggaggcgttcctgttgaatgaagacttgggagattccttggatagtgtggaagcgcttcttaagaagcacgaagactttgagaaatcccttagtgcccaggaggaaaagattacagcattagatgaatttgcaaccaagctaattcagaacaaccactatgcaatggaagatgtggccactcgccgagatgctctgttgagccgccgcaatgcccttcacgagagagccatgcgtcgccgggcccagctagccgattctttccatctgcagcagtttttccgtgattctgatgagctcaagagttgggtcaatgagaagatgaaaactgccacagatgaagcttataaagatccatccaacctacaaggaaaagtacagaagcatcaggcttttgaggctgagctctcagcaaaccagagccgaattgatgccttggagaaagctggccaaaagctgattgatgtcaaccactatgccaaggatgaagtggcagctcgtatgaatgaggtgatcagtttgtggaagaaactgctagaggccactgaactgaaaggaataaagcttcgtgaagccaaccagcaacagcaatttaatcgcaatgttgaggatattgaattgtggctatatgaagtagaaggtcacttggcttcggatgattacggcaaagatcttaccaatgtgcagaacctccagaagaaacatgccctgctagaggcagatgtggctgctcaccaggaccgaattgatggcatcaccattcaggcccgccagttccaagatgctggccattttgatgcagaaaacatcaagaagaaacaggaagccctcgtggctcgctatgaggcactcaaggagcccatggttgcccggaagcagaagctggccgattctctgcggttgcagcagctcttccgggatgttgaggatgaggagacgtggattcgagagaaagagcccattgccgcatctaccaacagaggtaaggatttaattggggtccagaatctgctaaagaaacatcaagccttacaagcagaaattgctggacatgaaccacgcatcaaagcagttacacagaaggggaatgccatggtggaggaaggccattttgctgcagaggatgtgaaggccaagcttcacgagctgaaccaaaagtgggaggcactgaaagccaaagcttcccagcgtcggcaggacctggaggactctctgcaggcccagcagtactttgctgatgctaacgaggctgaatcctggatgcgggagaaggaacccattgtgggcagcactgactatggcaaggacgaagactctgctgaggctctactgaagaaacacgaagctttgatgtcagatctcagtgcctacggcagcagcatccaggctttgcgagaacaagcacagtcctgccggcaacaagtggcccccacggatgatgagactgggaaggagctggtcttggctctctacgactatcaggagaagagtccccgagaggtcaccatgaagaagggagatatccttaccttactcaacagcaccaacaaggattggtggaaagtggaagtgaacgatcgtcagggttttgtgccggctgcgtacgtgaagaaattggaccccgcccagtcagcctcccgggagaatctcctggaggagcaaggcagcatagcactgcggcaggagcagattgacaatcagacacgcataactaaggaggccggcagtgtatctctgcgtatgaagcaggtggaagaactatatcattctctgctggaactgggtgagaagcgtaaaggcatgttggagaagagttgcaagaagtttatgttgttccgtgaagcgaatgaactacagcaatggatcaatgagaaggaagccgctctgacaagtgaggaggtcggagcagacttggagcaggttgaggtgctccagaagaagtttgatgacttccagaaggacctgaaggccaatgagtcacggttgaaggacattaacaaggtagctgaagacctggagtctgaaggtcttatggcagaggaggtgcaggctgtgcaacaacaggaagtgtatggcatgatgcccagggatgaaactgattccaagacagcctccccgtggaagtctgctcgtctgatggttcacaccgtggccacctttaattccatcaaggagctgaatgagcgctggcggtccctacagcagctggccgaggaacggagccagctcttgggcagcgcccatgaagtacagaggttccacagagatgctgatgaaaccaaagaatggattgaagagaagaatcaagctctaaacacagacaattatggacatgatctcgccagtgtccaggccctgcaacgcaagcatgagggcttcgagagggaccttgcggctctcggtgacaaggtaaactcccttggtgaaacagcagagcgcctgatccagtcccatcccgagtcagcagaagacctgcaggaaaagtgcacagagttaaaccaggcctggagcagcctggggaaacgtgcagatcagcgcaaggcaaagttgggtgactcccacgacctgcagcgcttccttagcgatttccgggacctcatgtcttggatcaatggaatacgggggttggtgtcctcagatgagctagccaaggatgtcaccggagctgaggcattgctggagcgacaccaggaacaccggacagaaatcgatgccagggctggcactttccaggcatttgagcagtttggacagcagctgttggctcacggacactatgccagccctgagatcaagcagaaacttgatattcttgaccaggagcgtgcagacctggagaaggcctgggttcagcgcaggatgatgctggatcagtgccttgaactgcagctgttccatcgggactgtgagcaagctgagaactggatggctgcccgggaggccttcttgaataccgaagacaaaggagactcactggacagcgtagaggctctgatcaaaaaacatgaagactttgacaaagcgattaacgtccaggaagagaagattgctgctctgcaggcctttgccgaccagctcatcgctgccggccattatgccaagggagacatttctagccggcgcaatgaggtcttggacaggtggcgacgtctgaaagcccagatgattgagaaaaggtcaaagctaggagaatctcaaaccctccaacagttcagccgggatgtggatgagattgaggcttggatcagtgaaaaattgcaaacagcgagtgatgagtcgtacaaggatcccaccaacatccagagcaagcaccagaagcaccaggcttttgaagcagagctgcatgccaacgctgaccggatccgtggggttatcgacatgggcaactccctcattgaacgtggagcctgtgccggcagtgaggatgctgtcaaggcccgcctggctgccttagctgaccagtggcagttcttggtgcaaaagtcagcggaaaagagccagaaactgaaagaagccaacaagcagcagaacttcaacacagggatcaaggactttgacttctggctgtctgaggtggaggccctgctggcatccgaagattatggcaaagacctggcttctgtgaacaacctgctgaaaaagcatcaactgctggaagcagatatatctgcccatgaggatcgcctgaaggacctgaacagccaggcagacagcctgatgaccagcagtgccttcgacacctcccaagtaaaggacaagagggacaccatcaacgggcgcttccagaagatcaagagcatggcggcctcccggcgagccaagctgaatgaatcccatcgcctgcaccagttcttccgggacatggatgacgaggagtcctggatcaaggagaagaagctgctggtgggctcagaggactacggccgggacctaactggcgtgcagaacctgaggaagaagcacaagcggctggaagcagaactggctgcgcatgagccggctattcagggtgtcctggacactggcaagaagctgtccgatgacaacaccatcgggaaagaggagatccagcagcggctggcgcagtttgtggagcactggaaagagctgaagcagctggcagctgcccggggtcagcggctggaagagtccttggaatatcagcagtttgtagccaatgtggaagaggaagaagcctggatcaatgagaaaatgaccctggtggccagcgaagattatggcgacactcttgccgccatccagggcttactgaagaaacatgaagcttttgagacagacttcaccgtccacaaggatcgcgtgaatgatgtctgcaccaatggacaagacctcattaagaagaacaatcaccatgaggagaacatctcttcaaagatgaagggcctgaacgggaaagtgtcagacctggagaaagctgcagcccagagaaaggcgaagctggatgagaactcggccttccttcagttcaactggaaggcggacgtggtggagtcctggatcggtgaaaaggagaacagcttgaagacagatgattatggccgagacctgtcttctgtgcagacgctcctcaccaaacaggaaacttttgacgctgggctgcaggccttccagcaggaaggcattgccaacatcactgccctcaaagatcagcttctcgccgccaaacacgttcagtccaaggccatcgaggcccggcacgcctccctcatgaagaggtggagccagcttctggccaactcagccgcccgcaagaagaagcttctggaggctcagagtcacttccgcaaggtggaggacctcttcctgaccttcgccaaaaaggcttctgccttcaacagctggtttgaaaatgcagaggaggacttaacagaccccgtgcgctgcaactccttggaagaaatcaaagctttgcgcgaggcccacgacgccttccgctcctccctcagctctgcccaggctgacttcaaccagctggccgagctggaccgccagatcaagagcttccgcgtagcctccaacccctacacctggtttaccatggaggccctggaggagacctggaggaacctacagaaaatcatcaaggagagggagctggagctgcagaaggaacagcggcggcaggaggagaacgacaagctgcgccaggagtttgcccagcacgccaacgccttccaccagtggatccaagagaccaggacatacctcctcgatgggtcctgtatggtggaagagtcggggaccctcgaatcccagcttgaagctaccaaacgcaagcaccaggaaatccgagccatgagaagtcagctcaaaaagatcgaggacctgggggccgccatggaggaggccctcatcctggacaacaagtacacggagcacagcaccgtgggcctcgcccagcagtgggaccagctggaccagctgggcatgcgcatgcagcacaacctggagcagcagatccaggccaggaacacaacaggtgtgactgaggaggccctcaaagaattcagcatgatgtttaaacactttgacaaggacaagtctggcaggctgaaccatcaggagttcaaatcttgcctgcgctccctgggctatgacctgcccatggtggaggaaggggaacctgaccctgagttcgaggcaatcctggacacggtggatccgaacagagatggccatgtctccttgcaagaatacatggctttcatgatcagccgcgaaactgagaacgtcaagtccagcgaggagattgagagcgccttccgggccctcagctcagagggaaagccttacgtgaccaaggaggagctctaccagaacctgacccgggaacaagccgactactgcgtctcccacatgaagccctacgtgtccggccacgttgccggacacgtaccagtactcttcccaatgctccttaatatgctgattttctttactattgatccccagtgtcttaatatgtgaactcagcagtttaaggttgcatttttccaaacttcag

SEQ ID NO: 374340 - DNA, 1644 bp, Homo sapiens
  misc_feature (135)..(135): n is a, c, g, or t
  misc_feature (142)..(142): n is a, c, g, or t
  misc_feature (157)..(157): n is a, c, g, or t
caacgatggtcctcagctcaacgatggtcctcagctcaacgatggtcctcagctcaacgatggtcctcagctcaacgatggtcctcagctcaacgatggtcctcagctcaacgatggtcctcagctcaacgatgntcctcanctagagtcacttccncaaggtggaggacctcttcctgaccttcgccaaaaaggcttctgccttcaacagctggtttgaaaatgcagaggaggacttaacagaccccgtgcgctgcaactccttggaagaaatcaaagctttgcgcgaggcccacgacgccttccgctcctccctcagctctgcccaggctgacttcaaccagctggccgagctggaccgccagatcaagagcttccgcgtagcctccaacccctacacctggtttaccatggaggccctggaggagacctggaggaacctacagaaaatcatcaaggagagggagctggagctgcagaaggaacagcggcggcaggaggagaacgacaagctgcgccaggagtttgcccagcacgccaacgccttccaccagtggatccaagagaccaggacatacctcctcgatgggtcctgtatggtggaagagtcggggaccctcgaatcccagcttgaagctaccaaacgcaagcaccaggaaatccgagccatgagaagtcagctcaaaaagatcgaggacctgggggccgccatggaggaggccctcatcctggacaacaagtacacggagcacagcaccgtgggcctcgcccagcagtgggaccagctggaccagctgggcatgcgcatgcagcacaacctggagcagcagatccaggccaggaacacaacaggtgtgactgaggaggccctcaaagaattcagcatgatgtttaaacactttgacaaggacaagtctggcaggctgaaccatcaggagttcaaatcttgcctgcgctccctgggctatgacctgcccatggtggaggaaggggaacctgaccctgagttcgaggcaatcctggacacggtggatccgaacagagatggccatgtctccttgcaagaatacatggctttcatgatcagccgcgaaactgagaacgtcaagtccagcgaggagattgagagcgccttccgggccctcagctcagagggaaagccttacgtgaccaaggaggagctctaccagaacctgacccgggaacaagccgactactgcgtctcccacatgaagccctacgtggacggcaagggccgcgagctccccaccgcgttcgactacgtggagttcacccgctcgcttttcgtgaactgagccactccctgggtcacccacccctcgctgcttgccctgcgtcgccttgctgcatgtccgctcctctgtgtgctctcactttccactgtaaccttaagcctgcttagcttggaataagacttaggagaaaatggtgcttcactaacccgcttccggtccagtcacaatcatcatgtcactgtggggacccagatctgtgtcttgaagcagctgccctcattccgacttcagaaaatcgaagcagctggctcctccccttgttctctctcccaccctcccccaaatctgttttcatgtaaaagacaaataaatgatgacttcccccaaa

SEQ ID NO: 374341 - DNA, 1859 bp, Homo sapiens
gccaacatggggaaaccccatctctactaaaaatacaaaatattagctgggtgtggtggcaggcacctgtaatcccagctactcaggaggctgaggcaggagaatcacttgattctgggatgcggaggttgcagtgacccgagatcaggccattgcactccagcctgggtgacaagagcaaaactccctctgaaaaaaattacttgggcatggtggcctacacctgctcaaagtccagcatgggcaatatatagcaagaccttgtcttaaaaataaggctgggtgcagtggctcatgcctataatcccagaactttgggaggccaagacaggcagatcacttgagcctaggaattcaagaccagcctggtcaatgcagtgaaacatcgcctctactaaaaatacaaaaattaggcaggtgtggtgatgggcacctgttagttccagctactcaggagattgaggcaggagaatcacttgaacccgggaggttgcagtgagcgtgattgcgccactgcactctagcctaggcgacagtgagactccatctcaaaaaaatttataaaaatctttggccactgcttcctggagtcctcgccgtacttgtccttggcgtgcactgccctctggcaggtctaccagctgctttggaaccctcacattgaaagtctctccctctattgaggtggttgggatttcttcagcttcaccccatcccactattcctattctagaatgttcttgttttacggggtctcaggccaggcctggagcaggaaccagagggcagtaagtggctcctgggctggtgactgagctgagggcccccgtctgagcatctgtgctccccacccctgcagcgcaagcaccaggaaatccgagccatgagaagtcagctcaaaaagatcgaggacctgggggccgccatggaggaggccctcatcctggacaacaagtacacggagcacagcaccgtgggcctcgcccagcagtgggaccagctggaccagctgggcatgcgcatgcagcacaacctggagcagcagatccaggccaggaacacaacaggtgtgactgaggaggccctcaaagaattcagcatgatgtttaaacactttgacaaggacaagtctggcaggctgaaccatcaggagttcaaatcttgcctgcgctccctgggctatgacctgcccatggtggaggaaggggaacctgaccctgagttcgaggcaatcctggacacggtggatccgaacagagatggccatgtctccttgcaagaatacatggctttcatgatcagccgcgaaactgagaacgtcaagtccagcgaggagattgagagcgccttccgggccctcagctcagagggaaagccttacgtgaccaaggaggagctctaccagaacctgacccgggaacaagccgactactgcgtctcccacatgaagccctacgtggacggcaagggccgcgagctccccaccgcgttcgactacgtggagttcacccgctcgcttttcgtgaactgagccactccctgggtcacccacccctcgctgcttgccctgcgtcgccttgctgcatgtccgctcctctgtgtgctctcactttccactgtaaccttaagcctgcttagcttggaataagacttaggagaaaatggtgcttcactaacccgcttccggtccagtcacaatcatcatgtcactgtggggacccagatctgtgtcttgaagcagctgccctcattccgacttcagaaaatcgaagcagctggctcctccccttgttctctctcccaccctcccccaaatctgttttcatgtaaaagacaaataaatgatgacttcccccaaa

SEQ ID NO: 374342 - DNA, 6637 bp, Homo sapiens
cgccactacccgctgcggagtgaacggtgtggagcggaggccgcggaggctcctcggtccttcagcacccctcggcccgacgcacccacgcccctcaccccccgagagccgaaaatggacccaagtggggtcaaagtgctggaaacagcagaggacatccaggagaggcggcagcaggtcctagaccgataccaccgcttcaaggaactctcaacccttaggcgtcagaagctggaagattcctatcgattccagttctttcaaagagatgctgaagagctggagaaatggatacaggaaaaacttcagattgcatctgatgagaattataaagacccaaccaacttgcagggaaagcttcagaagcatcaagcatttgaagctgaagtgcaggccaactcaggagccattgttaagctggatgaaactggaaacctgatgatctcagaagggcattttgcatctgaaaccatacggacccgtttgatggagctgcaccgccagtgggaattacttttggagaagatgcgagaaaaaggaatcaaactgctgcaggcccagaagttggtgcagtacttacgagaatgtgaggacgtgatggactggatcaatgacaaggaagcaattgttacttctgaagagctgggccaggatctggagcatgtagaggttttacagaagaaatttgaagagtttcaaacagatatggctgctcatgaagaaagagttaatgaagtgaaccagtttgctgccaaactcatacaggagcagcaccctgaggaggaactgatcaagactaagcaggatgaagtcaatgcagcctggcagcggctgaagggcctggctctgcagaggcaggggaagctctttggggcagcagaagttcagcgctttaacagggatgtggatgagactatcagttggattaaggaaaaggagcagttaatggcctctgatgattttggccgagacctggcaagtgttcaggctctgcttcggaagcacgagggtctggagagagatcttgctgctctagaagacaaggtcaaagccctgtgtgctgaggctgaccgcctgcaacagtcccaccctctgagtgcaacacagattcaagtgaagcgagaggaactgattacaaactgggagcagatccgcaccttggcggcagagagacatgcacggctcaatgattcatacaggcttcaacgcttccttgctgacttccgtgacctcaccagctgggtgactgagatgaaagccctcatcaatgcagatgagcttgccagtgatgtggctggggctgaagccctgctagatagacaccaagagcacaagggtgaaattgatgcccatgaagacagcttcaaatctgcagatgaatctggacaggcactgcttgctgctggtcactatgcctcagatgaagtgagggagaagctgaccgtcctttccgaggagagagcggcgctgctggagctgtgggagctgcgcaggcagcagtacgagcagtgcatggacctgcagctcttctaccgggacactgagcaggtggacaactggatgagcaagcaggaggcgttcctgttgaatgaagacttgggagattccttggatagtgtggaagcgcttcttaagaagcacgaagactttgagaaatcccttagtgcccaggaggaaaagattacagcattagatgaatttgcaaccaagctaattcagaacaaccactatgcaatggaagatgtggccactcgccgagatgctctgttgagccgccgcaatgcccttcacgagagagccatgcgtcgccgggcccagctagccgattctttccatctgcagcagtttttccgtgattctgatgagctcaagagttgggtcaatgagaagatgaaaactgccacagatgaagcttataaagatccatccaacctacaaggaaaagtacagaagcatcaggcttttgaggctgagctctcagcaaaccagagccgaattgatgccttggagaaagctggccaaaagctgattgatgtcaaccactatgccaaggatgaagtggcagctcgtatgaatgaggtgatcagtttgtggaagaaactgctagaggccactgaactgaaaggaataaagcttcgtgaagccaaccagcaacagcaatttaatcgcaatgttgaggatattgaattgtggctatatgaagtagaaggtcacttggcttcggatgattacggcaaagatcttaccaatgtgcagaacctccagaagaaacatgccctgctagaggcagatgtggctgctcaccaggaccgaattgatggcatcaccattcaggcccgccagttccaagatgctggccattttgatgcagaaaacatcaagaagaaacaggaagccctcgtggctcgctatgaggcactcaaggagcccatggttgcccggaagcagaagctggccgattctctgcggttgcagcagctcttccgggatgttgaggatgaggagacgtggattcgagagaaagagcccattgccgcatctaccaacagaggtaaggatttaattggggtccagaatctgctaaagaaacatcaagccttacaagcagaaattgctggacatgaaccacgcatcaaagcagttacacagaaggggaatgccatggtggaggaaggccattttgctgcagaggatgtgaaggccaagcttcacgagctgaaccaaaagtgggaggcactgaaagccaaagcttcccagcgtcggcaggacctggaggactctctgcaggcccagcagtactttgctgatgctaacgaggctgaatcctggatgcgggagaaggaacccattgtgggcagcactgactatggcaaggacgaagactctgctgaggctctactgaagaaacacgaagctttgatgtcagatctcagtgcctacggcagcagcatccaggctttgcgagaacaagcacagtcctgccggcaacaagtggcccccacggatgatgagactgggaaggagctggtcttggctctctacgactatcaggagaagagtccccgagaggtcaccatgaagaagggagatatccttaccttactcaacagcaccaacaaggattggtggaaagtggaagtgaacgatcgtcagggttttgtgccggctgcgtacgtgaagaaattggaccccgcccagtcagcctcccgggagaatctcctggaggagcaaggcagcatagcactgcggcaggagcagattgacaatcagacacgcataactaaggaggccggcagtgtatctctgcgtatgaagcaggtggaagaactatatcattctctgctggaactgggtgagaagcgtaaaggcatgttggagaagagttgcaagaagtttatgttgttccgtgaagcgaatgaactacagcaatggatcaatgagaaggaagccgctctgacaagtgaggaggtcggagcagacttggagcaggttgaggtgctccagaagaagtttgatgacttccagaaggacctgaaggccaatgagtcacggttgaaggacattaacaaggtagctgaagacctggagtctgaaggtcttatggcagaggaggtgcaggctgtgcaacaacaggaagtgtatggcatgatgcccagggatgaaactgattccaagacagcctccccgtggaagtctgctcgtctgatggttcacaccgtggccacctttaattccatcaaggagctgaatgagcgctggcggtccctacagcagctggccgaggaacggagccagctcttgggcagcgcccatgaagtacagaggttccacagagatgctgatgaaaccaaagaatggattgaagagaagaatcaagctctaaacacagacaattatggacatgatctcgccagtgtccaggccctgcaacgcaagcatgagggcttcgagagggaccttgcggctctcggtgacaaggtaaactcccttggtgaaacagcagagcgcctgatccagtcccatcccgagtcagcagaagacctgcaggaaaagtgcacagagttaaaccaggcctggagcagcctggggaaacgtgcagatcagcgcaaggcaaagttgggtgactcccacgacctgcagcgcttccttagcgatttccgggacctcatgtcttggatcaatggaatacgggggttggtgtcctcagatgagctagccaaggatgtcaccggagctgaggcattgctggagcgacaccaggaacaccggacagaaatcgatgccagggctggcactttccaggcatttgagcagtttggacagcagctgttggctcacggacactatgccagccctgagatcaagcagaaacttgatattcttgaccaggagcgtgcagacctggagaaggcctgggttcagcgcaggatgatgctggatcagtgccttgaactgcagctgttccatcgggactgtgagcaagctgagaactggatggctgcccgggaggccttcttgaataccgaagacaaaggagactcactggacagcgtagaggctctgatcaaaaaacatgaagactttgacaaagcgattaacgtccaggaagagaagattgctgctctgcaggcctttgccgaccagctcatcgctgccggccattatgccaagggagacatttctagccggcgcaatgaggtcttggacaggtggcgacgtctgaaagcccagatgattgagaaaaggtcaaagctaggagaatctcaaaccctccaacagttcagccgggatgtggatgagattgaggcttggatcagtgaaaaattgcaaacagcgagtgatgagtcgtacaaggatcccaccaacatccagagcaagcaccagaagcaccaggcttttgaagcagagctgcatgccaacgctgaccggatccgtggggttatcgacatgggcaactccctcattgaacgtggagcctgtgccggcagtgaggatgctgtcaaggcccgcctggctgccttagctgaccagtggcagttcttggtgcaaaagtcagcggaaaagagccagaaactgaaagaagccaacaagcagcagaacttcaacacagggatcaaggactttgacttctggctgtctgaggtggaggccctgctggcatccgaagattatggcaaagacctggcttctgtgaacaacctgctgaaaaagcatcaactgctggaagcagatatatctgcccatgaggatcgcctgaaggacctgaacagccaggcagacagcctgatgaccagcagtgccttcgacacctcccaagtaaaggacaagagggacaccatcaacgggcgcttccagaagatcaagagcatggcggcctcccggcgagccaagctgaatgaatcccatcgcctgcaccagttcttccgggacatggatgacgaggagtcctggatcaaggagaagaagctgctggtgggctcagaggactacggccgggacctaactggcgtgcagaacctgaggaagaagcacaagcggctggaagcagaactggctgcgcatgagccggctattcagggtgtcctggacactggcaagaagctgtccgatgacaacaccatcgggaaagaggagatccagcagcggctggcgcagtttgtggagcactggaaagagctgaagcagctggcagctgcccggggtcagcggctggaagagtccttggaatatcagcagtttgtagccaatgtggaagaggaagaagcctggatcaatgagaaaatgaccctggtggccagcgaagattatggcgacactcttgccgccatccagggcttactgaagaaacatgaagcttttgagacagacttcaccgtccacaaggatcgcgtgaatgatgtctgcaccaatggacaagacctcattaagaagaacaatcaccatgaggagaacatctcttcaaagatgaagggcctgaacgggaaagtgtcagacctggagaaagctgcagcccagagaaaggcgaagctggatgagaactcggccttccttcagttcaactggaaggcggacgtggtggagtcctggatcggtgaaaaggagaacagcttgaagacagatgattatggccgagacctgtcttctgtgcagacgctcctcaccaaacaggaaacttttgacgctgggctgcaggccttccagcaggaaggcattgccaacatcactgccctcaaagatcagcttctcgccgccaaacacgttcagtccaaggccatcgaggcccggcacgcctccctcatgaagaggtggagccagcttctggccaactcagccgcccgcaagaagaagcttctggaggctcagagtcacttccgcaaggtggaggacctcttcctgaccttcgccaaaaaggcttctgccttcaacagctggtttgaaaatgcagaggaggacttaacagaccccgtgcgctgcaactccttggaagaaatcaaagctttgcgcgaggcccacgacgccttccgctcctccctcagctctgcccctgagttaacagctcgcccctgagttagcagctcgcccctgagttagcagctcgcccctgagttagcagctcgccctgagttagtgcgggtac

SEQ ID NO: 374343 - DNA, 1021 bp, Homo sapiens
ttaagagatactaaagggggttagacctcggcgacatgatctattaagtcaatcgaattttacaaccctgagccacttaggcaacgtactttaggtttcacataattttcacagtcttagtaccaccattttcattcagataaaagaaatgaccttttgaaatcatgggcatcacatttggtgcttatggacaagaatcacaactagaagctagagacaaaatggatcacagcaagcacagtttccctcaaagaattcagcatgatgtttaaacactttgacaaggacaagtctggcaggctgaaccatcaggagttcaaatcttgcctgcgctccctgggctatgacctgcccatggtggaggaaggggaacctgaccctgagttcgaggcaatcctggacacggtggatccgaacagagatggccatgtctccttgcaagaatacatggctttcatgatcagccgcgaaactgagaacgtcaagtccagcgaggagattgagagcgccttccgggccctcagctcagagggaaagccttacgtgaccaaggaggagctctaccagaacctgacccgggaacaagccgactactgcgtctcccacatgaagccctacgtggacggcaagggccgcgagctccccaccgcgttcgactacgtggagttcacccgctcgcttttcgtgaactgagccactccctgggtcacccacccctcgctgcttgccctgcgtcgccttgctgcatgtccgctcctctgtgtgctctcactttccactgtaaccttaagcctgcttagcttggaataagacttaggagaaaatggtgcttcactaacccgcttccggtccagtcacaatcatcatgtcactgtggggacccagatctgtgtcttgaagcagctgccctcattccgacttcagaaaatcgaagcagctggctcctccccttgttctctctcccaccctcccccaaatctgttttcatgtaaaagacaaataaatgatgacttcccccaaa

SEQ ID NO: 374344 - DNA, 6322 bp, Homo sapiens
cgccactacccgctgcggagtgaacggtgtggagcggaggccgcggaggctcctcggtccttcagcacccctcggcccgacgcacccacgcccctcaccccccgagagccgaaaatggacccaagtggggtcaaagtgctggaaacagcagaggacatccaggagaggcggcagcaggtcctagaccgataccaccgcttcaaggaactctcaacccttaggcgtcagaagctggaagattcctatcgattccagttctttcaaagagatgctgaagagctggagaaatggatacaggaaaaacttcagattgcatctgatgagaattataaagacccaaccaacttgcagggaaagcttcagaagcatcaagcatttgaagctgaagtgcaggccaactcaggagccattgttaagctggatgaaactggaaacctgatgatctcagaagggcattttgcatctgaaaccatacggacccgtttgatggagctgcaccgccagtgggaattacttttggagaagatgcgagaaaaaggaatcaaactgctgcaggcccagaagttggtgcagtacttacgagaatgtgaggacgtgatggactggatcaatgacaaggaagcaattgttacttctgaagagctgggccaggatctggagcatgtagaggttttacagaagaaatttgaagagtttcaaacagatatggctgctcatgaagaaagagttaatgaagtgaaccagtttgctgccaaactcatacaggagcagcaccctgaggaggaactgatcaagactaagcaggatgaagtcaatgcagcctggcagcggctgaagggcctggctctgcagaggcaggggaagctctttggggcagcagaagttcagcgctttaacagggatgtggatgagactatcagttggattaaggaaaaggagcagttaatggcctctgatgattttggccgagacctggcaagtgttcaggctctgcttcggaagcacgagggtctggagagagatcttgctgctctagaagacaaggtcaaagccctgtgtgctgaggctgaccgcctgcaacagtcccaccctctgagtgcaacacagattcaagtgaagcgagaggaactgattacaaactgggagcagatccgcaccttggcggcagagagacatgcacggctcaatgattcatacaggcttcaacgcttccttgctgacttccgtgacctcaccagctgggtgactgagatgaaagccctcatcaatgcagatgagcttgccagtgatgtggctggggctgaagccctgctagatagacaccaagagcacaagggtgaaattgatgcccatgaagacagcttcaaatctgcagatgaatctggacaggcactgcttgctgctggtcactatgcctcagatgaagtgagggagaagctgaccgtcctttccgaggagagagcggcgctgctggagctgtgggagctgcgcaggcagcagtacgagcagtgcatggacctgcagctcttctaccgggacactgagcaggtggacaactggatgagcaagcaggaggcgttcctgttgaatgaagacttgggagattccttggatagtgtggaagcgcttcttaagaagcacgaagactttgagaaatcccttagtgcccaggaggaaaagattacagcattagatgaatttgcaaccaagctaattcagaacaaccactatgcaatggaagatgtggccactcgccgagatgctctgttgagccgccgcaatgcccttcacgagagagccatgcgtcgccgggcccagctagccgattctttccatctgcagcagtttttccgtgattctgatgagctcaagagttgggtcaatgagaagatgaaaactgccacagatgaagcttataaagatccatccaacctacaaggaaaagtacagaagcatcaggcttttgaggctgagctctcagcaaaccagagccgaattgatgccttggagaaagctggccaaaagctgattgatgtcaaccactatgccaaggatgaagtggcagctcgtatgaatgaggtgatcagtttgtggaagaaactgctagaggccactgaactgaaaggaataaagcttcgtgaagccaaccagcaacagcaatttaatcgcaatgttgaggatattgaattgtggctatatgaagtagaaggtcacttggcttcggatgattacggcaaagatcttaccaatgtgcagaacctccagaagaaacatgccctgctagaggcagatgtggctgctcaccaggaccgaattgatggcatcaccattcaggcccgccagttccaagatgctggccattttgatgcagaaaacatcaagaagaaacaggaagccctcgtggctcgctatgaggcactcaaggagcccatggttgcccggaagcagaagctggccgattctctgcggttgcagcagctcttccgggatgttgaggatgaggagacgtggattcgagagaaagagcccattgccgcatctaccaacagaggtaaggatttaattggggtccagaatctgctaaagaaacatcaagccttacaagcagaaattgctggacatgaaccacgcatcaaagcagttacacagaaggggaatgccatggtggaggaaggccattttgctgcagaggatgtgaaggccaagcttcacgagctgaaccaaaagtgggaggcactgaaagccaaagcttcccagcgtcggcaggacctggaggactctctgcaggcccagcagtactttgctgatgctaacgaggctgaatcctggatgcgggagaaggaacccattgtgggcagcactgactatggcaaggacgaagactctgctgaggctctactgaagaaacacgaagctttgatgtcagatctcagtgcctacggcagcagcatccaggctttgcgagaacaagcacagtcctgccggcaacaagtggcccccacggatgatgagactgggaaggagctggtcttggctctctacgactatcaggagaagagtccccgagaggtcaccatgaagaagggagatatccttaccttactcaacagcaccaacaaggattggtggaaagtggaagtgaacgatcgtcagggttttgtgccggctgcgtacgtgaagaaattggaccccgcccagtcagcctcccgggagaatctcctggaggagcaaggcagcatagcactgcggcaggagcagattgacaatcagacacgcataactaaggaggccggcagtgtatctctgcgtatgaagcaggtggaagaactatatcattctctgctggaactgggtgagaagcgtaaaggcatgttggagaagagttgcaagaagtttatgttgttccgtgaagcgaatgaactacagcaatggatcaatgagaaggaagccgctctgacaagtgaggaggtcggagcagacttggagcaggttgaggtgctccagaagaagtttgatgacttccagaaggacctgaaggccaatgagtcacggttgaaggacattaacaaggtagctgaagacctggagtctgaaggtcttatggcagaggaggtgcaggctgtgcaacaacaggaagtgtatggcatgatgcccagggatgaaactgattccaagacagcctccccgtggaagtctgctcgtctgatggttcacaccgtggccacctttaattccatcaaggagctgaatgagcgctggcggtccctacagcagctggccgaggaacggagccagctcttgggcagcgcccatgaagtacagaggttccacagagatgctgatgaaaccaaagaatggattgaagagaagaatcaagctctaaacacagacaattatggacatgatctcgccagtgtccaggccctgcaacgcaagcatgagggcttcgagagggaccttgcggctctcggtgacaaggtaaactcccttggtgaaacagcagagcgcctgatccagtcccatcccgagtcagcagaagacctgcaggaaaagtgcacagagttaaaccaggcctggagcagcctggggaaacgtgcagatcagcgcaaggcaaagttgggtgactcccacgacctgcagcgcttccttagcgatttccgggacctcatgtcttggatcaatggaatacgggggttggtgtcctcagatgagctagccaaggatgtcaccggagctgaggcattgctggagcgacaccaggaacaccggacagaaatcgatgccagggctggcactttccaggcatttgagcagtttggacagcagctgttggctcacggacactatgccagccctgagatcaagcagaaacttgatattcttgaccaggagcgtgcagacctggagaaggcctgggttcagcgcaggatgatgctggatcagtgccttgaactgcagctgttccatcgggactgtgagcaagctgagaactggatggctgcccgggaggccttcttgaataccgaagacaaaggagactcactggacagcgtagaggctctgatcaaaaaacatgaagactttgacaaagcgattaacgtccaggaagagaagattgctgctctgcaggcctttgccgaccagctcatcgctgccggccattatgccaagggagacatttctagccggcgcaatgaggtcttggacaggtggcgacgtctgaaagcccagatgattgagaaaaggtcaaagctaggagaatctcaaaccctccaacagttcagccgggatgtggatgagattgaggcttggatcagtgaaaaattgcaaacagcgagtgatgagtcgtacaaggatcccaccaacatccagagcaagcaccagaagcaccaggcttttgaagcagagctgcatgccaacgctgaccggatccgtggggttatcgacatgggcaactccctcattgaacgtggagcctgtgccggcagtgaggatgctgtcaaggcccgcctggctgccttagctgaccagtggcagttcttggtgcaaaagtcagcggaaaagagccagaaactgaaagaagccaacaagcagcagaacttcaacacagggatcaaggactttgacttctggctgtctgaggtggaggccctgctggcatccgaagattatggcaaagacctggcttctgtgaacaacctgctgaaaaagcatcaactgctggaagcagatatatctgcccatgaggatcgcctgaaggacctgaacagccaggcagacagcctgatgaccagcagtgccttcgacacctcccaagtaaaggacaagagggacaccatcaacgggcgcttccagaagatcaagagcatggcggcctcccggcgagccaagctgaatgaatcccatcgcctgcaccagttcttccgggacatggatgacgaggagtcctggatcaaggagaagaagctgctggtgggctcagaggactacggccgggacctaactggcgtgcagaacctgaggaagaagcacaagcggctggaagcagaactggctgcgcatgagccggctattcagggtgtcctggacactggcaagaagctgtccgatgacaacaccatcgggaaagaggagatccagcagcggctggcgcagtttgtggagcactggaaagagctgaagcagctggcagctgcccggggtcagcggctggaagagtccttggaatatcagcagtttgtagccaatgtggaagaggaagaagcctggatcaatgagaaaatgaccctggtggccagcgaagattatggcgacactcttgccgccatccagggcttactgaagaaacatgaagcttttgagacagacttcaccgtccacaaggatcgcgtgaatgatgtctgcaccaatggacaagacctcattaagaagaacaatcaccatgaggagaacatctcttcaaagatgaagggcctgaacgggaaagtgtcagacctggagaaagctgcagcccagagaaaggcgaagctggatgagaactcggccttccttcagttcaactggaaggcggacgtggtggagtcctggatcggtgagcactgtcagcaaggcccggaagagccttcccagagctgctctttgtctccttccgtgtcattggttttcttctgcagagaagaaactgatcaattgtgggcatggcagagaacctactaccagggcagaccactgactgccagctaggaggagacagtgtcctgaggccagaactgccacccggaactgggctggcaccagggtcaataaacaaaagcctgtaaac

SEQ ID NO: 374345 - DNA, 5132 bp, Homo sapiens
cgccactacccgctgcggagtgaacggtgtggagcggaggccgcggaggctcctcggtccttcagcacccctcggcccgacgcacccacgcccctcaccccccgagagccgaaaatggacccaagtggggtcaaagtgctggaaacagcagaggacatccaggagaggcggcagcaggtcctagaccgataccaccgcttcaaggaactctcaacccttaggcgtcagaagctggaagattcctatcgattccagttctttcaaagagatgctgaagagctggagaaatggatacaggaaaaacttcagattgcatctgatgagaattataaagacccaaccaacttgcagggaaagcttcagaagcatcaagcatttgaagctgaagtgcaggccaactcaggagccattgttaagctggatgaaactggaaacctgatgatctcagaagggcattttgcatctgaaaccatacggacccgtttgatggagctgcaccgccagtgggaattacttttggagaagatgcgagaaaaaggaatcaaactgctgcaggcccagaagttggtgcagtacttacgagaatgtgaggacgtgatggactggatcaatgacaaggaagcaattgttacttctgaagagctgggccaggatctggagcatgtagaggttttacagaagaaatttgaagagtttcaaacagatatggctgctcatgaagaaagagttaatgaagtgaaccagtttgctgccaaactcatacaggagcagcaccctgaggaggaactgatcaagactaagcaggatgaagtcaatgcagcctggcagcggctgaagggcctggctctgcagaggcaggggaagctctttggggcagcagaagttcagcgctttaacagggatgtggatgagactatcagttggattaaggaaaaggagcagttaatggcctctgatgattttggccgagacctggcaagtgttcaggctctgcttcggaagcacgagggtctggagagagatcttgctgctctagaagacaaggtcaaagccctgtgtgctgaggctgaccgcctgcaacagtcccaccctctgagtgcaacacagattcaagtgaagcgagaggaactgattacaaactgggagcagatccgcaccttggcggcagagagacatgcacggctcaatgattcatacaggcttcaacgcttccttgctgacttccgtgacctcaccagctgggtgactgagatgaaagccctcatcaatgcagatgagcttgccagtgatgtggctggggctgaagccctgctagatagacaccaagagcacaagggtgaaattgatgcccatgaagacagcttcaaatctgcagatgaatctggacaggcactgcttgctgctggtcactatgcctcagatgaagtgagggagaagctgaccgtcctttccgaggagagagcggcgctgctggagctgtgggagctgcgcaggcagcagtacgagcagtgcatggacctgcagctcttctaccgggacactgagcaggtggacaactggatgagcaagcaggaggcgttcctgttgaatgaagacttgggagattccttggatagtgtggaagcgcttcttaagaagcacgaagactttgagaaatcccttagtgcccaggaggaaaagattacagcattagatgaatttgcaaccaagctaattcagaacaaccactatgcaatggaagatgtggccactcgccgagatgctctgttgagccgccgcaatgcccttcacgagagagccatgcgtcgccgggcccagctagccgattctttccatctgcagcagtttttccgtgattctgatgagctcaagagttgggtcaatgagaagatgaaaactgccacagatgaagcttataaagatccatccaacctacaaggaaaagtacagaagcatcaggcttttgaggctgagctctcagcaaaccagagccgaattgatgccttggagaaagctggccaaaagctgattgatgtcaaccactatgccaaggatgaagtggcagctcgtatgaatgaggtgatcagtttgtggaagaaactgctagaggccactgaactgaaaggaataaagcttcgtgaagccaaccagcaacagcaatttaatcgcaatgttgaggatattgaattgtggctatatgaagtagaaggtcacttggcttcggatgattacggcaaagatcttaccaatgtgcagaacctccagaagaaacatgccctgctagaggcagatgtggctgctcaccaggaccgaattgatggcatcaccattcaggcccgccagttccaagatgctggccattttgatgcagaaaacatcaagaagaaacaggaagccctcgtggctcgctatgaggcactcaaggagcccatggttgcccggaagcagaagctggccgattctctgcggttgcagcagctcttccgggatgttgaggatgaggagacgtggattcgagagaaagagcccattgccgcatctaccaacagaggtaaggatttaattggggtccagaatctgctaaagaaacatcaagccttacaagcagaaattgctggacatgaaccacgcatcaaagcagttacacagaaggggaatgccatggtggaggaaggccattttgctgcagaggatgtgaaggccaagcttcacgagctgaaccaaaagtgggaggcactgaaagccaaagcttcccagcgtcggcaggacctggaggactctctgcaggcccagcagtactttgctgatgctaacgaggctgaatcctggatgcgggagaaggaacccattgtgggcagcactgactatggcaaggacgaagactctgctgaggctctactgaagaaacacgaagctttgatgtcagatctcagtgcctacggcagcagcatccaggctttgcgagaacaagcacagtcctgccggcaacaagtggcccccacggatgatgagactgggaaggagctggtcttggctctctacgactatcaggagaagagtccccgagaggtcaccatgaagaagggagatatccttaccttactcaacagcaccaacaaggattggtggaaagtggaagtgaacgatcgtcagggttttgtgccggctgcgtacgtgaagaaattggaccccgcccagtcagcctcccgggagaatctcctggaggagcaaggcagcatagcactgcggcaggagcagattgacaatcagacacgcataactaaggaggccggcagtgtatctctgcgtatgaagcaggtggaagaactatatcattctctgctggaactgggtgagaagcgtaaaggcatgttggagaagagttgcaagaagtttatgttgttccgtgaagcgaatgaactacagcaatggatcaatgagaaggaagccgctctgacaagtgaggaggtcggagcagacttggagcaggttgaggtgctccagaagaagtttgatgacttccagaaggacctgaaggccaatgagtcacggttgaaggacattaacaaggtagctgaagacctggagtctgaaggtcttatggcagaggaggtgcaggctgtgcaacaacaggaagtgtatggcatgatgcccagggatgaaactgattccaagacagcctccccgtggaagtctgctcgtctgatggttcacaccgtggccacctttaattccatcaaggagctgaatgagcgctggcggtccctacagcagctggccgaggaacggagccagctcttgggcagcgcccatgaagtacagaggttccacagagatgctgatgaaaccaaagaatggattgaagagaagaatcaagctctaaacacagacaattatggacatgatctcgccagtgtccaggccctgcaacgcaagcatgagggcttcgagagggaccttgcggctctcggtgacaaggtaaactcccttggtgaaacagcagagcgcctgatccagtcccatcccgagtcagcagaagacctgcaggaaaagtgcacagagttaaaccaggcctggagcagcctggggaaacgtgcagatcagcgcaaggcaaagttgggtgactcccacgacctgcagcgcttccttagcgatttccgggacctcatgtcttggatcaatggaatacgggggttggtgtcctcagatgagctagccaaggatgtcaccggagctgaggcattgctggagcgacaccaggaacaccggacagaaatcgatgccagggctggcactttccaggcatttgagcagtttggacagcagctgttggctcacggacactatgccagccctgagatcaagcagaaacttgatattcttgaccaggagcgtgcagacctggagaaggcctgggttcagcgcaggatgatgctggatcagtgccttgaactgcagctgttccatcgggactgtgagcaagctgagaactggatggctgcccgggaggccttcttgaataccgaagacaaaggagactcactggacagcgtagaggctctgatcaaaaaacatgaagactttgacaaagcgattaacgtccaggaagagaagattgctgctctgcaggcctttgccgaccagctcatcgctgccggccattatgccaagggagacatttctagccggcgcaatgaggtcttggacaggtggcgacgtctgaaagcccagatgattgagaaaaggtcaaagctaggagaatctcaaaccctccaacagttcagccgggatgtggatgagattgaggcttggatcagtgaaaaattgcaaacagcgagtgatgagtcgtacaaggatcccaccaacatccaggctttccaagctgctgggtgttggtcttgatgtagccttatgttattgagtagattttgttaaataaagcatttataaaacaatctccttgcacccatgggaagtcagtgagaaatatttcagtaagcccagccagtgggaaagccctagtcaagtttcagagccatttaaaagttgccttcctcatttgtctccattaaaactatttctgctgtaataaaagtctatagaatcccccttctattactgttcccaaatgc

SEQ ID NO: 374346 - DNA, 3796 bp, Homo sapiens
cgccactacccgctgcggagtgaacggtgtggagcggaggccgcggaggctcctcggtccttcagcacccctcggcccgacgcacccacgcccctcaccccccgagagccgaaaatggacccaagtggggtcaaagtgctggaaacagcagaggacatccaggagaggcggcagcaggtcctagaccgataccaccgcttcaaggaactctcaacccttaggcgtcagaagctggaagattcctatcgattccagttctttcaaagagatgctgaagagctggagaaatggatacaggaaaaacttcagattgcatctgatgagaattataaagacccaaccaacttgcagggaaagcttcagaagcatcaagcatttgaagctgaagtgcaggccaactcaggagccattgttaagctggatgaaactggaaacctgatgatctcagaagggcattttgcatctgaaaccatacggacccgtttgatggagctgcaccgccagtgggaattacttttggagaagatgcgagaaaaaggaatcaaactgctgcaggcccagaagttggtgcagtacttacgagaatgtgaggacgtgatggactggatcaatgacaaggaagcaattgttacttctgaagagctgggccaggatctggagcatgtagaggttttacagaagaaatttgaagagtttcaaacagatatggctgctcatgaagaaagagttaatgaagtgaaccagtttgctgccaaactcatacaggagcagcaccctgaggaggaactgatcaagactaagcaggatgaagtcaatgcagcctggcagcggctgaagggcctggctctgcagaggcaggggaagctctttggggcagcagaagttcagcgctttaacagggatgtggatgagactatcagttggattaaggaaaaggagcagttaatggcctctgatgattttggccgagacctggcaagtgttcaggctctgcttcggaagcacgagggtctggagagagatcttgctgctctagaagacaaggtcaaagccctgtgtgctgaggctgaccgcctgcaacagtcccaccctctgagtgcaacacagattcaagtgaagcgagaggaactgattacaaactgggagcagatccgcaccttggcggcagagagacatgcacggctcaatgattcatacaggcttcaacgcttccttgctgacttccgtgacctcaccagctgggtgactgagatgaaagccctcatcaatgcagatgagcttgccagtgatgtggctggggctgaagccctgctagatagacaccaagagcacaagggtgaaattgatgcccatgaagacagcttcaaatctgcagatgaatctggacaggcactgcttgctgctggtcactatgcctcagatgaagtgagggagaagctgaccgtcctttccgaggagagagcggcgctgctggagctgtgggagctgcgcaggcagcagtacgagcagtgcatggacctgcagctcttctaccgggacactgagcaggtggacaactggatgagcaagcaggaggcgttcctgttgaatgaagacttgggagattccttggatagtgtggaagcgcttcttaagaagcacgaagactttgagaaatcccttagtgcccaggaggaaaagattacagcattagatgaatttgcaaccaagctaattcagaacaaccactatgcaatggaagatgtggccactcgccgagatgctctgttgagccgccgcaatgcccttcacgagagagccatgcgtcgccgggcccagctagccgattctttccatctgcagcagtttttccgtgattctgatgagctcaagagttgggtcaatgagaagatgaaaactgccacagatgaagcttataaagatccatccaacctacaaggaaaagtacagaagcatcaggcttttgaggctgagctctcagcaaaccagagccgaattgatgccttggagaaagctggccaaaagctgattgatgtcaaccactatgccaaggatgaagtggcagctcgtatgaatgaggtgatcagtttgtggaagaaactgctagaggccactgaactgaaaggaataaagcttcgtgaagccaaccagcaacagcaatttaatcgcaatgttgaggatattgaattgtggctatatgaagtagaaggtcacttggcttcggatgattacggcaaagatcttaccaatgtgcagaacctccagaagaaacatgccctgctagaggcagatgtggctgctcaccaggaccgaattgatggcatcaccattcaggcccgccagttccaagatgctggccattttgatgcagaaaacatcaagaagaaacaggaagccctcgtggctcgctatgaggcactcaaggagcccatggttgcccggaagcagaagctggccgattctctgcggttgcagcagctcttccgggatgttgaggatgaggagacgtggattcgagagaaagagcccattgccgcatctaccaacagaggtaaggatttaattggggtccagaatctgctaaagaaacatcaagccttacaagcagaaattgctggacatgaaccacgcatcaaagcagttacacagaaggggaatgccatggtggaggaaggccattttgctgcagaggatgtgaaggccaagcttcacgagctgaaccaaaagtgggaggcactgaaagccaaagcttcccagcgtcggcaggacctggaggactctctgcaggcccagcagtactttgctgatgctaacgaggctgaatcctggatgcgggagaaggaacccattgtgggcagcactgactatggcaaggacgaagactctgctgaggctctactgaagaaacacgaagctttgatgtcagatctcagtgcctacggcagcagcatccaggctttgcgagaacaagcacagtcctgccggcaacaagtggcccccacggatgatgagactgggaaggagctggtcttggctctctacgactatcaggagaagagtccccgagaggtcaccatgaagaagggagatatccttaccttactcaacagcaccaacaaggattggtggaaagtggaagtgaacgatcgtcagggttttgtgccggctgcgtacgtgaagaaattggaccccgcccagtcagcctcccgggagaatctcctggaggagcaaggcagcatagcactgcggcaggagcagattgacaatcaatatcattctctgctggaactgggtgagaagcgtaaaggcatgttggagaagagttgcaagaagtttatgttgttccgtgaagcgaatgaactacagcaatggatcaatgagaaggaagccgctctgacaagtgaggaggtcggagcagacttggagcaggttgaggtgctccagaagaagtttgatgacttccagaaggacctgaaggccaatgagtcacggttgaaggacattaacaaggtagctgaagacctggagtctgaaggtcttatggcagaggaggtgcaggctgtgcaacaacaggaagtgtatggcatgatgcccagggatgaaactgattccaagacagcctccccgtggaaggagctgaatgagcgctggcggtccctacagcagctggccgaggaacggagccagctcttgggcagcgcccatgaagtacagaggttccacagagatgctatgaaacccgagaggggattgaaaagcaggaccatagctcaacaccgagcagagccaagacagg

SEQ ID NO: 374347 - DNA, 3404 bp, Homo sapiens
  misc_feature (3292)..(3292): n is a, c, g, or t
  misc_feature (3333)..(3333): n is a, c, g, or t
  misc_feature (3354)..(3354): n is a, c, g, or t
cgccactacccgctgcggagtgaacggtgtggagcggaggccgcggaggctcctcggtccttcagcacccctcggcccgacgcacccacgcccctcaccccccgagagccgaaaatggacccaagtggggtcaaagtgctggaaacagcagaggacatccaggagaggcggcagcaggtcctagaccgataccaccgcttcaaggaactctcaacccttaggcgtcagaagctggaagattcctatcgattccagttctttcaaagagatgctgaagagctggagaaatggatacaggaaaaacttcagattgcatctgatgagaattataaagacccaaccaacttgcagggaaagcttcagaagcatcaagcatttgaagctgaagtgcaggccaactcaggagccattgttaagctggatgaaactggaaacctgatgatctcagaagggcattttgcatctgaaaccatacggacccgtttgatggagctgcaccgccagtgggaattacttttggagaagatgcgagaaaaaggaatcaaactgctgcaggcccagaagttggtgcagtacttacgagaatgtgaggacgtgatggactggatcaatgacaaggaagcaattgttacttctgaagagctgggccaggatctggagcatgtagaggttttacagaagaaatttgaagagtttcaaacagatatggctgctcatgaagaaagagttaatgaagtgaaccagtttgctgccaaactcatacaggagcagcaccctgaggaggaactgatcaagactaagcaggatgaagtcaatgcagcctggcagcggctgaagggcctggctctgcagaggcaggggaagctctttggggcagcagaagttcagcgctttaacagggatgtggatgagactatcagttggattaaggaaaaggagcagttaatggcctctgatgattttggccgagacctggcaagtgttcaggctctgcttcggaagcacgagggtctggagagagatcttgctgctctagaagacaaggtcaaagccctgtgtgctgaggctgaccgcctgcaacagtcccaccctctgagtgcaacacagattcaagtgaagcgagaggaactgattacaaactgggagcagatccgcaccttggcggcagagagacatgcacggctcaatgattcatacaggcttcaacgcttccttgctgacttccgtgacctcaccagctgggtgactgagatgaaagccctcatcaatgcagatgagcttgccagtgatgtggctggggctgaagccctgctagatagacaccaagagcacaagggtgaaattgatgcccatgaagacagcttcaaatctgcagatgaatctggacaggcactgcttgctgctggtcactatgcctcagatgaagtgagggagaagctgaccgtcctttccgaggagagagcggcgctgctggagctgtgggagctgcgcaggcagcagtacgagcagtgcatggacctgcagctcttctaccgggacactgagcaggtggacaactggatgagcaagcaggaggcgttcctgttgaatgaagacttgggagattccttggatagtgtggaagcgcttcttaagaagcacgaagactttgagaaatcccttagtgcccaggaggaaaagattacagcattagatgaatttgcaaccaagctaattcagaacaaccactatgcaatggaagatgtggccactcgccgagatgctctgttgagccgccgcaatgcccttcacgagagagccatgcgtcgccgggcccagctagccgattctttccatctgcagcagtttttccgtgattctgatgagctcaagagttgggtcaatgagaagatgaaaactgccacagatgaagcttataaagatccatccaacctacaaggaaaagtacagaagcatcaggcttttgaggctgagctctcagcaaaccagagccgaattgatgccttggagaaagctggccaaaagctgattgatgtcaaccactatgccaaggatgaagtggcagctcgtatgaatgaggtgatcagtttgtggaagaaactgctagaggccactgaactgaaaggaataaagcttcgtgaagccaaccagcaacagcaatttaatcgcaatgttgaggatattgaattgtggctatatgaagtagaaggtcacttggcttcggatgattacggcaaagatcttaccaatgtgcagaacctccagaagaaacatgccctgctagaggcagatgtggctgctcaccaggaccgaattgatggcatcaccattcaggcccgccagttccaagatgctggccattttgatgcagaaaacatcaagaagaaacaggaagccctcgtggctcgctatgaggcactcaaggagcccatggttgcccggaagcagaagctggccgattctctgcggttgcagcagctcttccgggatgttgaggatgaggagacgtggattcgagagaaagagcccattgccgcatctaccaacagaggtaaggatttaattggggtccagaatctgctaaagaaacatcaagccttacaagcagaaattgctggacatgaaccacgcatcaaagcagttacacagaaggggaatgccatggtggaggaaggccattttgctgcagaggatgtgaaggccaagcttcacgagctgaaccaaaagtgggaggcactgaaagccaaagcttcccagcgtcggcaggacctggaggactctctgcaggcccagcagtactttgctgatgctaacgaggctgaatcctggatgcgggagaaggaacccattgtgggcagcactgactatggcaaggacgaagactctgctgaggctctactgaagaaacacgaagctttgatgtcagatctcagtgcctacggcagcagcatccaggctttgcgagaacaagcacagtcctgccggcaacaagtggcccccacggatgatgagactgggaaggagctggtcttggctctctacgactatcaggagaagagtccccgagaggtcaccatgaagaagggagatatccttaccttactcaacagcaccaacaaggattggtggaaagtggaagtgaacgatcgtcagggttttgtgccggctgcgtacgtgaagaaattggaccccgcccagtcagcctcccgggagaatctcctggaggagcaaggcagcatagcactgcggcaggagcagattgacaatcagaaagacgttctattacataaangactttttttaacactttggacttctctgaaatatttagangtgctaatttcttgcccaccnccaacaggaattctatagtaaggaggaggagaaggggggctcccttccct

SEQ ID NO: 374348 - DNA, 3140 bp, Homo sapiens
cgccactacccgctgcggagtgaacggtgtggagcggaggccgcggaggctcctcggtccttcagcacccctcggcccgacgcacccacgcccctcaccccccgagagccgaaaatggacccaagtggggtcaaagtgctggaaacagcagaggacatccaggagaggcggcagcaggtcctagaccgataccaccgcttcaaggaactctcaacccttaggcgtcagaagctggaagattcctatcgattccagttctttcaaagagatgctgaagagctggagaaatggatacaggaaaaacttcagattgcatctgatgagaattataaagacccaaccaacttgcagggaaagcttcagaagcatcaagcatttgaagctgaagtgcaggccaactcaggagccattgttaagctggatgaaactggaaacctgatgatctcagaagggcattttgcatctgaaaccatacggacccgtttgatggagctgcaccgccagtgggaattacttttggagaagatgcgagaaaaaggaatcaaactgctgcaggcccagaagttggtgcagtacttacgagaatgtgaggacgtgatggactggatcaatgacaaggaagcaattgttacttctgaagagctgggccaggatctggagcatgtagaggttttacagaagaaatttgaagagtttcaaacagatatggctgctcatgaagaaagagttaatgaagtgaaccagtttgctgccaaactcatacaggagcagcaccctgaggaggaactgatcaagactaagcaggatgaagtcaatgcagcctggcagcggctgaagggcctggctctgcagaggcaggggaagctctttggggcagcagaagttcagcgctttaacagggatgtggatgagactatcagttggattaaggaaaaggagcagttaatggcctctgatgattttggccgagacctggcaagtgttcaggctctgcttcggaagcacgagggtctggagagagatcttgctgctctagaagacaaggtcaaagccctgtgtgctgaggctgaccgcctgcaacagtcccaccctctgagtgcaacacagattcaagtgaagcgagaggaactgattacaaactgggagcagatccgcaccttggcggcagagagacatgcacggctcaatgattcatacaggcttcaacgcttccttgctgacttccgtgacctcaccagctgggtgactgagatgaaagccctcatcaatgcagatgagcttgccagtgatgtggctggggctgaagccctgctagatagacaccaagagcacaagggtgaaattgatgcccatgaagacagcttcaaatctgcagatgaatctggacaggcactgcttgctgctggtcactatgcctcagatgaagtgagggagaagctgaccgtcctttccgaggagagagcggcgctgctggagctgtgggagctgcgcaggcagcagtacgagcagtgcatggacctgcagctcttctaccgggacactgagcaggtggacaactggatgagcaagcaggaggcgttcctgttgaatgaagacttgggagattccttggatagtgtggaagcgcttcttaagaagcacgaagactttgagaaatcccttagtgcccaggaggaaaagattacagcattagatgaatttgcaaccaagctaattcagaacaaccactatgcaatggaagatgtggccactcgccgagatgctctgttgagccgccgcaatgcccttcacgagagagccatgcgtcgccgggcccagctagccgattctttccatctgcagcagtttttccgtgattctgatgagctcaagagttgggtcaatgagaagatgaaaactgccacagatgaagcttataaagatccatccaacctacaaggaaaagtacagaagcatcaggcttttgaggctgagctctcagcaaaccagagccgaattgatgccttggagaaagctggccaaaagctgattgatgtcaaccactatgccaaggatgaagtggcagctcgtatgaatgaggtgatcagtttgtggaagaaactgctagaggccactgaactgaaaggaataaagcttcgtgaagccaaccagcaacagcaatttaatcgcaatgttgaggatattgaattgtggctatatgaagtagaaggtcacttggcttcggatgattacggcaaagatcttaccaatgtgcagaacctccagaagaaacatgccctgctagaggcagatgtggctgctcaccaggaccgaattgatggcatcaccattcaggcccgccagttccaagatgctggccattttgatgcagaaaacatcaagaagaaacaggaagccctcgtggctcgctatgaggcactcaaggagcccatggttgcccggaagcagaagctggccgattctctgcggttgcagcagctcttccgggatgttgaggatgaggagacgtggattcgagagaaagagcccattgccgcatctaccaacagaggtaaggatttaattggggtccagaatctgctaaagaaacatcaagccttacaagcagaaattgctggacatgaaccacgcatcaaagcagttacacagaaggggaatgccatggtggaggaaggccattttgctgcagaggatgtgaaggccaagcttcacgagctgaaccaaaagtgggaggcactgaaagccaaagcttcccagcgtcggcaggacctggaggactctctgcaggcccagcagtactttgctgatgctaacgaggctgaatcctggatgcgggagaaggaacccattgtgggcagcactgactatggcaaggacgaagactctgctgaggctctactgaagaaacacgaagctttgatgtcagatctcagtgcctacggcagcagcatccaggctttgcgagaacaagcacagtcctgccggcaacaagtggcccccacggatgatgagactgggaaggagctggtcttggctctctacgactatcaggagaagagtccccgagaggtcaccatgaagaagggagatatccttaccttactcaacagcaccaacaaggcaccagcacgaattccctt

SEQ ID NO: 374349 - DNA, 1262 bp, Homo sapiens
cgccactacccgctgcggagtgaacggtgtggagcggaggccgcggaggctcctcggtccttcagcacccctcggcccgacgcacccacgcccctcaccccccgagagccgaaaatggacccaagtggggtcaaagtgctggaaacagcagaggacatccaggagaggcggcagcaggtcctagaccgataccaccgcttcaaggaactctcaacccttaggcgtcagaagctggaagattcctatcgattccagttctttcaaagagatgctgaagagctggagaaatggatacaggaaaaacttcagattgcatctgatgagaattataaagacccaaccaacttgcagggaaagcttcagaagcatcaagcatttgaagctgaagtgcaggccaactcaggagccattgttaagctggatgaaactggaaacctgatgatctcagaagggcattttgcatctgaaaccatacggacccgtttgatggagctgcaccgccagtgggaattacttttggagaagatgcgagaaaaaggaatcaaactgctgcaggcccagaagttggtgcagtacttacgagaatgtgaggacgtgatggactggatcaatgacaaggaagcaattgttacttctgaagagctgggccaggatctggagcatgtagaggttttacagaagaaatttgaagagtttcaaacagatatggctgctcatgaagaaagagttaatgaagtgaaccagtttgctgccaaactcatacaggagcagcaccctgaggaggaactgatcaagactaagcaggatgaagtcaatgcagcctggcagcggctgaagggcctggctctgcagaggcaggggaagctctttggggcagcagaagttcagcgctttaacagggatgtggatgagactatcagttggattaaggaaaaggagcagttaatggcctctgatgattttggccgagacctggcaagtgttcaggctctgcttcggaagcacgagggtctggagagagatcttgctgctctagaagacaaggtcaaagccctgtgtgctgaggctgaccgcctgcaacagtcccaccctctgagtgcaacacagattcaagtgaagcgagaggaactgattacaaactgggagcagatccgcaccttggcggcgttggatgcagtccgagaaactgcacctgtaaattctgcagtcactttaaattataaaacgagtatttgatgtatgatcgcggcgttggatgtagt

SEQ ID NO: 374350 - DNA, 833 bp, Homo sapiens
tgagatatacaaatactattttaattctaaaaggagcaaaaattttaaaagctgataacaatttaaatcagttgcagatctcactttttcaagaaatgaaaaaaccaaagcattgttatattaaatctttttaacagctatgaaagcacagaacaaaattggtcatttaacatgtgtaattattatatatttatattcttagctctagtgctattttgagaacaagcattattttcctctcaattcaacgaatatttcttcctcactaatgttataaaagatgctaatgtgaggattttggatttggactgcagatcacatctcttttacagtttgaatccattcagaattaatggtccagttgtcaagaaaacatttctatttcaatttcagcgatgaagaacgatacagatacagggaatatgcagaaagaggttatgagcgtcacagagcaagtcgagaaaaagaagaacgacatagagaaagacgacacagggagaaagaggaaaccagacataagtcttctcgaagtaatagtagacgtcgccatgaaagtgaagaaggagatagtcacaggagacacaaacacaaaaaatctaaaagaagcaaagaaggaaaagaagcgggcagtggaggtagttcagatttttttcagtaggcattagggggtttttggaagggaggaatataaaggatgttgtgctttaagatgattaatctgccagccatgtatacaatagactggaatgcagagagtggagatggagaggctgggtaagaggctgtcaagtttggcaaggagaagtaacataggcccatactgcaggtggcta

SEQ ID NO: 374351 - DNA, 415 bp, Homo sapiens
ccggcttcgctgtgctttccccgaggcgtctcgaagccgggggccaggaccggtcctggcccccggcttcgctgtgctttccccgaggcgtctcgatcgcctagctgctgcgctctttacccttgtttttttctgtcgattctgaggtggtgttttttggtgtctgtttttgccctgtggccttagggtgcccttcctgtcccttctttcagaaacagtcattctgtaataatagctaaataaagttaatgctgtacaactaacgtcttgtttcttgatggtcagtttgtatggaatgcacctgcaagggtacctccttgtctgaaagtcgtgctttaaaaataattaattaagagagagagagagaaagatggcccataaggaaaactctgaatgtctcctgtattaaggtgaa

SEQ ID NO: 374352 - DNA, 1975 bp, Homo sapiens
taggctaggtacgaggctgggtgttgaatcggccgagggacggacctgcgctggaggcttcatctttgccgccgctgccgtcgccttcctgggattggagtctcgagctttcttcgttcgttcgccggcgggttcgcgcccttctcgcgcctcggggctgcgaggctggggaaggggttggagggggctgttgatcgccgcgtttaagttgcgctcggggcggccatgtcggccggcgaggtcgagcgcctagtgtcggagctgagcggcgggaccggaggggatgaggaggaagagtggctctatggcgatgaaaatgaagttgaaaggccagaagaagaaaatgccagtgctaatcctccatctggaattgaagatgaaactgctgaaaatggtgtaccaaaaccgaaagtgactgagaccgaagatgatagtgatagtgacagcgatgatgatgaagatgatgttcatgtcactataggagacattaaaacgggagcaccacagtatgggagttatggtacagcacctgtaaatcttaacatcaagacagggggaagagtttatggaactacagggacaaaagtcaaaggagtagaccttgatgcacctggaagcattaatggagttccactcttagaggtagatttggattcttttgaagataaaccatggcgtaaacctggtgctgatctttctgattattttaattatgggtttaatgaagatacctggaaagcttactgtgaaaaacaaaagaggatacgaatgggacttgaagttataccagtaacctctactacaaataaaattacggtacagcagggaagaactggaaactcagagaaagaaactgcccttccatctacaaaagctgagtttacttctcctccttctttgttcaagactgggcttccaccgagcaggagattacctggggcaattgatgttatcggtcagactataactatcagccgagtagaaggcaggcgacgggcaaatgagaacagcaacatacaggtcctttctgaaagatctgctactgaagtagacaacaattttagcaaaccacctccgtttttccctccaggagctcctcccactcaccttccacctcctccatttcttccacctcctccgactgtcagcactgctccacctctgattccaccaccgggttttcctcctccaccaggcgctccacctccatctcttataccaacaatagaaagtggacattcctctggttatgatagtcgttctgcacgtgcatttccatatggcaatgttgcctttccccatcttcctggttctgctccttcgtggcctagtcttgtggacaccagcaagcagtgggactattatgccagaagagagaaagaccgagatagagagagagacagagacagagagcgagaccgtgatcgggacagagaaagagaacgcaccagagagagagagagggagcgtgatcacagtcctacaccaagtgttttcaacagcgatgaagaacgatacagatacagggaatatgcagaaagaggttatgagcgtcacagagcaagtcgagaaaaagaagaacgacatagagaaagacgacacagggagaaagaggaaaccagacataagtcttctcgaagtaatagtagacgtcgccatgaaagtgaagaaggagatagtcacaggagacacaaacacaaaaaatctaaaagaagcaaagaaggaaaagaagcgggcagtgagcctgcccctgaacaggagagcaccgaagctacacctgcagaataggcatggttttggccttttgtgtatattagtaccagaagtagatactataaatcttgttatttttctggataatgtttaagaaatttaccttaaatcttgttctgtttgttagtatgaaaagttaactttttttccaaaataaaagagtgaatttttcatgttaagttaaaaatctttgtcttgtact

SEQ ID NO: 374353 - DNA, 2128 bp, Homo sapiens
taggctaggtacgaggctgggtgttgaatcggccgagggacggacctgcgctggaggcttcatctttgccgccgctgccgtcgccttcctgggattggagtctcgagctttcttcgttcgttcgccggcgggttcgcgcccttctcgcgcctcggggctgcgaggctggggaaggggttggagggggctgttgatcgccgcgtttaagttgcgctcggggcggccatgtcggccggcgaggtcgagcgcctagtgtcggagctgagcggcgggaccggaggggatgaggaggaagagtggctctatggcggcccatgggacgtgcatgtgcacagtgatttggcaaaggacctagatgaaaatgaagttgaaaggccagaagaagaaaatgccagtgctaatcctccatctggaattgaagatgaaactgctgaaaatggtgtaccaaaaccgaaagtgactgagaccgaagatgatagtgatagtgacagcgatgatgatgaagatgatgttcatgtcactataggagacattaaaacgggagcaccacagtatgggagttatggtacagcacctgtaaatcttaacatcaagacagggggaagagtttatggaactacagggacaaaagtcaaaggagtagaccttgatgcacctggaagcattaatggagttccactcttagaggtagatttggattcttttgaagataaaccatggcgtaaacctggtgctgatctttctgattattttaattatgggtttaatgaagatacctggaaagcttactgtgaaaaacaaaagaggatacgaatgggacttgaagttataccagtaacctctactacaaataaaattacggtacagcagggaagaactggaaactcagagaaagaaactgcccttccatctacaaaagctgagtttacttctcctccttctttgttcaagactgggcttccaccgagcagaaacagcacttcttctcagtctcagacaagtactgcctccagaaaagccaattcaagcgttgggaagtggcaggatcgatatgggagggccgaatcacctgatctaaggagattacctggggcaattgatgttatcggtcagactataactatcagccgagtagaaggcaggcgacgggcaaatgagaacagcaacatacaggtcctttctgaaagatctgctactgaagtagacaacaattttagcaaaccacctccgtttttccctccaggagctcctcccactcaccttccacctcctccatttcttccacctcctccgactgtcagcactgctccacctctgattccaccaccgggttttcctcctccaccaggcgctccacctccatctcttataccaacaatagaaagtggacattcctctggttatgatagtcgttctgcacgtgcatttccatatggcaatgttgcctttccccatcttcctggttctgctccttcgtggcctagtcttgtggacaccagcaagcagtgggactattatgccagaagagagaaagaccgagatagagagagagacagagacagagagcgagaccgtgatcgggacagagaaagagaacgcaccagagagagagagagggagcgtgatcacagtcctacaccaagtgttttcaacagcgatgaagaacgatacagatacagggaatatgcagaaagaggttatgagcgtcacagagcaagtcgagaaaaagaagaacgacatagagaaagacgacacagggagaaagaggaaaccagacataagtcttctcgaagtaatagtagacgtcgccatgaaagtgaagaaggagatagtcacaggagacacaaacacaaaaaatctaaaagaagcaaagaaggaaaagaagcgggcagtgagcctgcccctgaacaggagagcaccgaagctacacctgcagaataggcatggttttggccttttgtgtatattagtaccagaagtagatactataaatcttgttatttttctggataatgtttaagaaatttaccttaaatcttgttctgtttgttagtatgaaaagttaactttttttccaaaataaaagagtgaatttttcatgttaagttaaaaatctttgtcttgtact

SEQ ID NO: 374354 - DNA, 2197 bp, Homo sapiens
taggctaggtacgaggctgggtgttgaatcggccgagggacggacctgcgctggaggcttcatctttgccgccgctgccgtcgccttcctgggattggagtctcgagctttcttcgttcgttcgccggcgggttcgcgcccttctcgcgcctcggggctgcgaggctggggaaggggttggagggggctgttgatcgccgcgtttaagttgcgctcggggcggccatgtcggccggcgaggtcgagcgcctagtgtcggagctgagcggcgggaccggaggggatgaggaggaagagtggctctatggcggcccatgggacgtgcatgtgcacagtgatttggcaaaggacctagatgaaaatgaagttgaaaggccagaagaagaaaatgccagtgctaatcctccatctggaattgaagatgaaactgctgaaaatggtgtaccaaaaccgaaagtgactgagaccgaagatgatagtgatagtgacagcgatgatgatgaagatgatgttcatgtcactataggagacattaaaacgggagcaccacagtatgggagttatggtacagcacctgtaaatcttaacatcaagacagggggaagagtttatggaactacagggacaaaagtcaaaggagtagaccttgatgcacctggaagcattaatggagttccactcttagaggtagatttggattcttttgaagataaaccatggcgtaaacctggtgctgatctttctgattattttaattatgggtttaatgaagatacctggaaagcttactgtgaaaaacaaaagaggatacgaatgggacttgaagttataccagtaacctctactacaaataaaattacggccgaagactgtactatggaagttacaccaggtgcagagatccaagatggcagattcaatctttttaaggtacagcagggaagaactggaaactcagagaaagaaactgcccttccatctacaaaagctgagtttacttctcctccttctttgttcaagactgggcttccaccgagcagaaacagcacttcttctcagtctcagacaagtactgcctccagaaaagccaattcaagcgttgggaagtggcaggatcgatatgggagggccgaatcacctgatctaaggagattacctggggcaattgatgttatcggtcagactataactatcagccgagtagaaggcaggcgacgggcaaatgagaacagcaacatacaggtcctttctgaaagatctgctactgaagtagacaacaattttagcaaaccacctccgtttttccctccaggagctcctcccactcaccttccacctcctccatttcttccacctcctccgactgtcagcactgctccacctctgattccaccaccgggttttcctcctccaccaggcgctccacctccatctcttataccaacaatagaaagtggacattcctctggttatgatagtcgttctgcacgtgcatttccatatggcaatgttgcctttccccatcttcctggttctgctccttcgtggcctagtcttgtggacaccagcaagcagtgggactattatgccagaagagagaaagaccgagatagagagagagacagagacagagagcgagaccgtgatcgggacagagaaagagaacgcaccagagagagagagagggagcgtgatcacagtcctacaccaagtgttttcaacagcgatgaagaacgatacagatacagggaatatgcagaaagaggttatgagcgtcacagagcaagtcgagaaaaagaagaacgacatagagaaagacgacacagggagaaagaggaaaccagacataagtcttctcgaagtaatagtagacgtcgccatgaaagtgaagaaggagatagtcacaggagacacaaacacaaaaaatctaaaagaagcaaagaaggaaaagaagcgggcagtgagcctgcccctgaacaggagagcaccgaagctacacctgcagaataggcatggttttggccttttgtgtatattagtaccagaagtagatactataaatcttgttatttttctggataatgtttaagaaatttaccttaaatcttgttctgtttgttagtatgaaaagttaactttttttccaaaataaaagagtgaatttttcatgttaagttaaaaatctttgtcttgtact

SEQ ID NO: 374355 - DNA, 1985 bp, Homo sapiens
taggctaggtacgaggctgggtgttgaatcggccgagggacggacctgcgctggaggcttcatctttgccgccgctgccgtcgccttcctgggattggagtctcgagctttcttcgttcgttcgccggcgggttcgcgcccttctcgcgcctcggggctgcgaggctggggaaggggttggagggggctgttgatcgccgcgtttaagttgcgctcggggcggccatgtcggccggcgaggtcgagcgcctagtgtcggagctgagcggcgggaccggaggggatgaggaggaagagtggctctatggcgaaagtgactgagaccgaagatgatagtgatagtgacagcgatgatgatgaagatgatgttcatgtcactataggagacattaaaacgggagcaccacagtatgggagttatggtacagcacctgtaaatcttaacatcaagacagggggaagagtttatggaactacagggacaaaagtcaaaggagtagaccttgatgcacctggaagcattaatggagttccactcttagaggtagatttggattcttttgaagataaaccatggcgtaaacctggtgctgatctttctgattattttaattatgggtttaatgaagatacctggaaagcttactgtgaaaaacaaaagaggatacgaatgggacttgaagttataccagtaacctctactacaaataaaattacggtacagcagggaagaactggaaactcagagaaagaaactgcccttccatctacaaaagctgagtttacttctcctccttctttgttcaagactgggcttccaccgagcagaaacagcacttcttctcagtctcagacaagtactgcctccagaaaagccaattcaagcgttgggaagtggcaggatcgatatgggagggccgaatcacctgatctaaggagattacctggggcaattgatgttatcggtcagactataactatcagccgagtagaaggcaggcgacgggcaaatgagaacagcaacatacaggtcctttctgaaagatctgctactgaagtagacaacaattttagcaaaccacctccgtttttccctccaggagctcctcccactcaccttccacctcctccatttcttccacctcctccgactgtcagcactgctccacctctgattccaccaccgggttttcctcctccaccaggcgctccacctccatctcttataccaacaatagaaagtggacattcctctggttatgatagtcgttctgcacgtgcatttccatatggcaatgttgcctttccccatcttcctggttctgctccttcgtggcctagtcttgtggacaccagcaagcagtgggactattatgccagaagagagaaagaccgagatagagagagagacagagacagagagcgagaccgtgatcgggacagagaaagagaacgcaccagagagagagagagggagcgtgatcacagtcctacaccaagtgttttcaacagcgatgaagaacgatacagatacagggaatatgcagaaagaggttatgagcgtcacagagcaagtcgagaaaaagaagaacgacatagagaaagacgacacagggagaaagaggaaaccagacataagtcttctcgaagtaatagtagacgtcgccatgaaagtgaagaaggagatagtcacaggagacacaaacacaaaaaatctaaaagaagcaaagaaggaaaagaagcgggcagtgagcctgcccctgaacaggagagcaccgaagctacacctgcagaataggcatggttttggccttttgtgtatattagtaccagaagtagatactataaatcttgttatttttctggataatgtttaagaaatttaccttaaatcttgttctgtttgttagtatgaaaagttaactttttttccaaaataaaagagtgaatttttcatgttaagttaaaaatctttgtcttgtact

SEQ ID NO: 374356 - DNA, 1882 bp, Homo sapiens
actcctgagggtaaaacaaggtaagcgaaccggagtcatggcgaaggctgattcctgatataaaaacccatgcaacgaaatctgcacagtgatttggcaaagtacctggaggaaaaagaagttgaaaggccacaagaagaaaatgccagtgctaatcctccatctggaattgaagatgaaactgctgaaaatggtgtaccaaaaccgaaagtgactgagaccgaagatgatagtgatagtgacagcgatgatgatgaagatgatgttcatgtcactataggagacattaaaacgggagcaccacagtatgggagttatggtacagcacctgtaaatcttaacatcaagacagggggaagagtttatggaactacagggacaaaagtcaaaggagtagaccttgatgcacctggaagcattaatggagttccactcttagaggtagatttggattcttttgaagataaaccatggcgtaaacctggtgctgatctttctgattattttaattatgggtttaatgaagatacctggaaagcttactgtgaaaaacaaaagaggatacgaatgggacttgaagttataccagtaacctctactacaaataaaattacggtacagcagggaagaactggaaactcagagaaagaaactgcccttccatctacaaaagctgagtttacttctcctccttctttgttcaagactgggcttccaccgagcagaaacagcacttcttctcagtctcagacaagtactgcctccagaaaagccaattcaagcgttgggaagtggcaggatcgatatgggagggccgaatcacctgatctaaggagattacctggggcaattgatgttatcggtcagactataactatcagccgagtagaaggcaggcgacgggcaaatgagaacagcaacatacaggtcctttctgaaagatctgctactgaagtagacaacaattttagcaaaccacctccgtttttccctccaggagctcctcccactcaccttccacctcctccatttcttccacctcctccgactgtcagcactgctccacctctgattccaccaccgggttttcctcctccaccaggcgctccacctccatctcttataccaacaatagaaagtggacattcctctggttatgatagtcgttctgcacgtgcatttccatatggcaatgttgcctttccccatcttcctggttctgctccttcgtggcctagtcttgtggacaccagcaagcagtgggactattatgccagaagagagaaagaccgagatagagagagagacagagacagagagcgagaccgtgatcgggacagagaaagagaacgcaccagagagagagagagggagcgtgatcacagtcctacaccaagtgttttcaacagcgatgaagaacgatacagatacagggaatatgcagaaagaggttatgagcgtcacagagcaagtcgagaaaaagaagaacgacatagagaaagacgacacagggagaaagaggaaaccagacataagtcttctcgaagtaatagtagacgtcgccatgaaagtgaagaaggagatagtcacaggagacacaaacacaaaaaatctaaaagaagcaaagaaggaaaagaagcgggcagtgagcctgcccctgaacaggagagcaccgaagctacacctgcagaataggcatggttttggccttttgtgtatattagtaccagaagtagatactataaatcttgttatttttctggataatgtttaagaaatttaccttaaatcttgttctgtttgttagtatgaaaagttaactttttttccaaaataaaagagtgaatttttcatgttaagttaaaaatctttgtcttgtact

SEQ ID NO: 374357 - DNA, 2089 bp, Homo sapiens
taggctaggtacgaggctgggtgttgaatcggccgagggacggacctgcgctggaggcttcatctttgccgccgctgccgtcgccttcctgggattggagtctcgagctttcttcgttcgttcgccggcgggttcgcgcccttctcgcgcctcggggctgcgaggctggggaaggggttggagggggctgttgatcgccgcgtttaagttgcgctcggggcggccatgtcggccggcgaggtcgagcgcctagtgtcggagctgagcggcgggaccggaggggatgaggaggaagagtggctctatggcggcccatgggacgtgcatgtgcacagtgatttggcaaaggacctagatgaaaatgaagttgaaaggccagaagaagaaaatgccagtgctaatcctccatctggaattgaagatgaaactgctgaaaatggtgtaccaaaaccgaaagtgactgagaccgaagatgatagtgatagtgacagcgatgatgatgaagatgatgttcatgtcactataggagacattaaaacgggagcaccacagtatgggagttatggtacagcacctgtaaatcttaacatcaagacagggggaagagtttatggaactacagggacaaaagtcaaaggagtagaccttgatgcacctggaagcattaatggagttccactcttagaggtagatttggattcttttgaagataaaccatggcgtaaacctggtgctgatctttctgattattttaattatgggtttaatgaagatacctggaaagcttactgtgaaaaacaaaagaggatacgaatgggacttgaagttataccagtaacctctactacaaataaaattacggccgaagactgtactatggaagttacaccaggtgcagagatccaagatggcagattcaatctttttaaggtacagcagggaagaactggaaactcagagaaagaaactgcccttccatctacaaaagctgagtttacttctcctccttctttgttcaagactgggcttccaccgagcaggagattacctggggcaattgatgttatcggtcagactataactatcagccgagtagaaggcaggcgacgggcaaatgagaacagcaacatacaggtcctttctgaaagatctgctactgaagtagacaacaattttagcaaaccacctccgtttttccctccaggagctcctcccactcaccttccacctcctccatttcttccacctcctccgactgtcagcactgctccacctctgattccaccaccgggttttcctcctccaccaggcgctccacctccatctcttataccaacaatagaaagtggacattcctctggttatgatagtcgttctgcacgtgcatttccatatggcaatgttgcctttccccatcttcctggttctgctccttcgtggcctagtcttgtggacaccagcaagcagtgggactattatgccagaagagagaaagaccgagatagagagagagacagagacagagagcgagaccgtgatcgggacagagaaagagaacgcaccagagagagagagagggagcgtgatcacagtcctacaccaagtgttttcaacagcgatgaagaacgatacagatacagggaatatgcagaaagaggttatgagcgtcacagagcaagtcgagaaaaagaagaacgacatagagaaagacgacacagggagaaagaggaaaccagacataagtcttctcgaagtaatagtagacgtcgccatgaaagtgaagaaggagatagtcacaggagacacaaacacaaaaaatctaaaagaagcaaagaaggaaaagaagcgggcagtgagcctgcccctgaacaggagagcaccgaagctacacctgcagaataggcatggttttggccttttgtgtatattagtaccagaagtagatactataaatcttgttatttttctggataatgtttaagaaatttaccttaaatcttgttctgtttgttagtatgaaaagttaactttttttccaaaataaaagagtgaatttttcatgttaagttaaaaatctttgtcttgtact

SEQ ID NO: 374358 - DNA, 1669 bp, Homo sapiens
ctcggctctaccttgtctcctgatagtgacagcgatgatgatgaagatgatgttcatgtcactataggagacattaaaacgggagcaccacagtatgggagttatggtacagcacctgtaaatcttaacatcaagacagggggaagagtttatggaactacagggacaaaagtcaaaggagtagaccttgatgcacctggaagcattaatggagttccactcttagaggtagatttggattcttttgaagataaaccatggcgtaaacctggtgctgatctttctgattattttaattatgggtttaatgaagatacctggaaagcttactgtgaaaaacaaaagaggatacgaatgggacttgaagttataccagtaacctctactacaaataaaattacggtacagcagggaagaactggaaactcagagaaagaaactgcccttccatctacaaaagctgagtttacttctcctccttctttgttcaagactgggcttccaccgagcagaaacagcacttcttctcagtctcagacaagtactgcctccagaaaagccaattcaagcgttgggaagtggcaggatcgatatgggagggccgaatcacctgatctaaggagattacctggggcaattgatgttatcggtcagactataactatcagccgagtagaaggcaggcgacgggcaaatgagaacagcaacatacaggtcctttctgaaagatctgctactgaagtagacaacaattttagcaaaccacctccgtttttccctccaggagctcctcccactcaccttccacctcctccatttcttccacctcctccgactgtcagcactgctccacctctgattccaccaccgggttttcctcctccaccaggcgctccacctccatctcttataccaacaatagaaagtggacattcctctggttatgatagtcgttctgcacgtgcatttccatatggcaatgttgcctttccccatcttcctggttctgctccttcgtggcctagtcttgtggacaccagcaagcagtgggactattatgccagaagagagaaagaccgagatagagagagagacagagacagagagcgagaccgtgatcgggacagagaaagagaacgcaccagagagagagagagggagcgtgatcacagtcctacaccaagtgttttcaacagcgatgaagaacgatacagatacagggaatatgcagaaagaggttatgagcgtcacagagcaagtcgagaaaaagaagaacgacatagagaaagacgacacagggagaaagaggaaaccagacataagtcttctcgaagtaatagtagacgtcgccatgaaagtgaagaaggagatagtcacaggagacacaaacacaaaaaatctaaaagaagcaaagaaggaaaagaagcgggcagtgagcctgcccctgaacaggagagcaccgaagctacacctgcagaataggcatggttttggccttttgtgtatattagtaccagaagtagatactataaatcttgttatttttctggataatgtttaagaaatttaccttaaatcttgttctgtttgttagtatgaaaagttaactttttttccaaaataaaagagtgaatttttcatgttaagttaaaaatctttgtcttgtact

SEQ ID NO: 374359 - DNA, 2432 bp, Homo sapiens
taggctaggtacgaggctgggtgttgaatcggccgagggacggacctgcgctggaggcttcatctttgccgccgctgccgtcgccttcctgggattggagtctcgagctttcttcgttcgttcgccggcgggttcgcgcccttctcgcgcctcggggctgcgaggctggggaaggggttggagggggctgttgatcgccgcgtttaagttgcgctcggggcggccatgtcggccggcgaggtcgagcgcctagtgtcggagctgagcggcgggaccggaggggatgaggaggaagagtggctctatggcggcccatgggacgtgcatgtgcacagtgatttggcaaaggacctagatgaaaatgaagttgaaaggccagaagaagaaaatgccagtgctaatcctccatctggaattgaagatgaaactgctgaaaatggtgtaccaaaaccgaaagtgactgagaccgaagatgatagtgatagtgacagcgatgatgatgaagatgatgttcatgtcactataggagacattaaaacgggagcaccacagtatgggagttatggtacagcacctgtaaatcttaacatcaagacagggggaagagtttatggaactacagggacaaaagtcaaaggagtagaccttgatgcacctggaagcattaatggagttccactcttagaggtagatttggattcttttgaagataaaccatggcgtaaacctggtgctgatctttctgattattttaattatgggtttaatgaagatacctggaaagcttactgtgaaaaacaaaagaggatacgaatgggacttgaagttataccagtaacctctactacaaataaaattacggtacagcagggaagaactggaaactcagagaaagaaactgcccttccatctacaaaagctgagtttacttctcctccttctttgttcaagactgggcttccaccgagcagaaacagcacttcttctcagtctcagacaagtactgcctccagaaaagccaattcaagcgttgggaagtggcaggatcgatatgggagggccgaatcacctgatctaaggagattacctggggcaattgatgttatcggtcagactataactatcagccgagtagaaggcaggcgacgggcaaatgagaacagcaacatacaggtcctttctgaaagatctgctactgaagtagacaacaattttagcaaaccacctccgtttttccctccaggagctcctcccactcaccttccacctcctccatttcttccacctcctccgactgtcagcactgctccacctctgattccaccaccgggttttcctcctccaccaggcgctccacctccatctcttataccaacaatagaaagtggacattcctctggttatgatagtcgttctgcacgtgcatttccatatggcaatgttgcctttccccatcttcctggttctgctccttcgtggcctagtcttgtggacaccagcaagcagtgggactattatgccagaagagagaaagaccgagatagagagagagacagagacagagagcgagaccgtgatcgggacagagaaagagaacgcaccagagagagagagagggagcgtgatcacagtcctacaccaagtgttttcaacagcgatgaagaacgatacagatacagggaatatgcagaaagaggttatgagcgtcacagagcaagtcgagaaaaagaagaacgacatagagaaagacgacacagggagaaagaggaaaccagacataagtcttctcgaagtaatagtagacgtcgccatgaaagtgaagaaggagatagtcacaggagacacaaacacaaaaaatctaaaagaagcaaagaaggaaaagaagcgggcagtgagcctgcccctgaacaggagagcaccgaagctacacctgcagaataggcatggttttggccttttgtgtatattagtaccagaagtagatactataaatcttgttatttttctggataatgtttaagaaatttaccttaaatcttgttctgtttgttagtatgaaaagttaactttttttccaaaataaaagagtgaatttttcatgttaagttaaaaatctttgtcttgtactatttcaaaaataaaaagacagcaatgactttatatccaagaaaggaatgtgaatgagtcacttaacagggaatctaaagagctgtgttagctgtgtacatacacagattatctgagaaaaggtcaagggttccacttgggccacagtttttttgttaatcaaacaccactctcttaagaggctgcatcacaaaaggcaacaaagggcccctctaaggcttgagattaaaactagtctttatcattactgctgtgacactcttgccttagtatattaagagactcatacatttttgatatcacaa

SEQ ID NO: 374360 - DNA, 2165 bp, Homo sapiens
taggctaggtacgaggctgggtgttgaatcggccgagggacggacctgcgctggaggcttcatctttgccgccgctgccgtcgccttcctgggattggagtctcgagctttcttcgttcgttcgccggcgggttcgcgcccttctcgcgcctcggggctgcgaggctggggaaggggttggagggggctgttgatcgccgcgtttaagttgcgctcggggcggccatgtcggccggcgaggtcgagcgcctagtgtcggagctgagcggcgggaccggaggggatgaggaggaagagtggctctatggcggcccatgggacgtgcatgtgcacagtgatttggcaaaggacctagatgaaaatgaagttgaaaggccagaagaagaaaatgccagtgctaatcctccatctggaattgaagatgaaactgctgaaaatggtgtaccaaaaccgaaagtgactgagaccgaagatgatagtgatagtgacagcgatgatgatgaagatgatgttcatgtcactataggagacattaaaacgggagcaccacagtatgggagttatggtacagcacctgtaaatcttaacatcaagacagggggaagagtttatggaactacagggacaaaagtcaaaggagtagaccttgatgcacctggaagcattaatggagttccactcttagaggtagatttggattcttttgaagataaaccatggcgtaaacctggtgctgatctttctgattattttaattatgggtttaatgaagatacctggaaagcttactgtgaaaaacaaaagaggatacgaatgggacttgaagttataccagtaacctctactacaaataaaattacggtacagcagggaagaactggaaactcagagaaagaaactgcccttccatctacaaaagctgagtttacttctcctccttctttgttcaagactgggcttccaccgagcagaaacagcacttcttctcagtctcagacaagtactgcctccagaaaagccaattcaagcgttgggaagtggcaggatcgatatgggagggccgaatcacctgatctaaggagattacctggggcaattgatgttatcggtcagactataactatcagccgagtagaaggcaggcgacgggcaaatgagaacagcaacatacaggtcctttctgaaagatctgctactgaagtagacaacaattttagcaaaccacctccgtttttccctccaggagctcctcccactcaccttccacctcctccatttcttccacctcctccgactgtcagcactgctccacctctgattccaccaccgggttttcctcctccaccaggcgctccacctccatctcttataccaacaatagaaagtggacattcctctggttatgatagtcgttctgcacgtgcatttccatatggcaatgttgcctttccccatcttcctggttctgctccttcgtggcctagtcttgtggacaccagcaagcagtgggactattatgccagaagagagaaagaccgagatagagagagagacagagacagagagcgagaccgtgatcgggacagagaaagagaacgcaccagagagagagagagggagcgtgatcacagtcctacaccaagtgttttcaacagcgatgaagaacgatacagatacagggaatatgcagaaagaggttatgagcgtcacagagcaagtcgagaaaaagaagaacgacatagagaaagacgacacagggagaaagaggaaaccagacataagtcttctcgaagtaatagtagacgtcgccatgaaagtgaagaaggagatagtcacaggagacacaaacacaaaaaatctaaaagaagcaaagaaggaaaagaagcgggcagtgagcctgcccctgaacaggagagcaccgaagctacacctgcagaataggcatggttttggccttttgtgtatattagtaccagaagtagatactataaatcttgttatttttctggataatgtttaagaaatttaccttaaatcttgttctgtttgttagtatgaaaagttaactttttttccaaaataaaagagtgaatttttcatgttaagttaaaaatctttgtcttgtactatttcaaaaataaaaagacagcaatgactttatatcc

SEQ ID NO: 374361 - DNA, 1222 bp, Homo sapiens
ttagcacgaggtattccaataactgtaccacctccaggtttgcctcctccaccaggcgctccacctccatctcttataccaacaatagaaagtggacatcctctggttatgatagtcgtctgcacgtgcatttccatatggcaatggagattacctggggcaattgatgttatcggtcagactataactatcagccgagtagaaggcaggcgacgggcaaatgagaacagcaacatacaggtcctttctgaaagatctgctactgaagtagacaacaattttagcaaaccacctccgtttttccctccaggagctcctcccactcaccttccacctcctccatttcttccacctcctccgactgtcagcactgctccacctctgattccaccaccgggtattccaataactgtaccacctccaggttttcctcctccaccaggcgctccacctccatctcttataccaacaatagaaagtggacattcctctggttatgatagtcgttctgcacgtgcatttccatatggcaatgttgcctttccccatcttcctggttctgctccttcgtggcctagtcttgtggacaccagcaagcagtgggactattatgccagaagagagaaagaccgagatagagagagagacagagacagagagcgagaccgtgatcgggacagagaaagagaacgcaccagagagagagagagggagcgtgatcacagtcctacaccaagtgttttcaacagcgatgaagaacgatacagatacagggaatatgcagaaagaggttatgagcgtcacagagcaagtcgagaaaaagaagaacgacatagagaaagacgacacagggagaaagaggaaaccagacataagtcttctcgaagtaatagtagacgtcgccatgaaagtgaagaaggagatagtcacaggagacacaaacacaaaaaatctaaaagaagcaaagaaggaaaagaagcgggcagtgagcctgcccctgaacaggagagcaccgaagctacacctgcagaataggcatggttttggccttttgtgtatattagtaccagaagtagatactataaatcttgttatttttctggataatgtttaagaaatttaccttaaatcttgttctgtttgttagtatgaaaagttaactttttttccaaaataaaagagtgaatttttcatgttaagttaaaaatctttgtcttgtact

SEQ ID NO: 374362 - DNA, 869 bp, Homo sapiens
gcaactttgtttcactcttgacattaagtgtacattgttaacattttttatcttatgattgaatgtttcaggttttcctcctccaccaggcgctccacctccatctcttataccaacaatagaaagtggacattcctctggttatgatagtcgttctgcacgtgcatttccatatggcaatgttgcctttccccatcttcctggttctgctccttcgtggcctagtcttgtggacaccagcaagcagtgggactattatgccagaagagagaaagaccgagatagagagagagacagagacagagagcgagaccgtgatcgggacagagaaagagaacgcaccagagagagagagagggagcgtgatcacagtcctacaccaagtgttttcaacagcgatgaagaacgatacagatacagggaatatgcagaaagaggttatgagcgtcacagagcaagtcgagaaaaagaagaacgacatagagaaagacgacacagggagaaagaggaaaccagacataagtcttctcgaagtaatagtagacgtcgccatgaaagtgaagaaggagatagtcacaggagacacaaacacaaaaaatctaaaagaagcaaagaaggaaaagaagcgggcagtgagcctgcccctgaacaggagagcaccgaagctacacctgcagaataggcatggttttggccttttgtgtatattagtaccagaagtagatactataaatcttgttatttttctggataatgtttaagaaatttaccttaaatcttgttctgtttgttagtatgaaaagttaactttttttccaaaataaaagagtgaatttttcatgttaagttaaaaatctttgtcttgtact

SEQ ID NO: 374363 - DNA, 598 bp, Homo sapiens
aatcctttccccggcagcacatctctactcctgcctgtgccttagtgagtccttttggtggcaggcagatatattatgccatagagggagcgtgatcacagtcctacaccaagtgttttcaacagcgatgaagaacgatacagatacagggaatatgcagaaagaggttatgagcgtcacagagcaagtcgagaaaaagaagaacgacatagagaaagacgacacagggagaaagaggaaaccagacataagtcttctcgaagtaatagtagacgtcgccatgaaagtgaagaaggagatagtcacaggagacacaaacacaaaaaatctaaaagaagcaaagaaggaaaagaagcgggcagtgagcctgcccctgaacaggagagcaccgaagctacacctgcagaataggcatggttttggccttttgtgtatattagtaccagaagtagatactataaatcttgttatttttctggataatgtttaagaaatttaccttaaatcttgttctgtttgttagtatgaaaagttaactttttttccaaaataaaagagtgaatttttcatgttaagttaaaaatctttgtcttgtact

SEQ ID NO: 374364 - DNA, 866 bp, Homo sapiens
tgagatatacaaatactattttaattctaaaaggagcaaaaattttaaaagctgataacaatttaaatcagttgcagatctcactttttcaagaaatgaaaaaaccaaagcattgttatattaaatctttttaacagctatgaaagcacagaacaaaattggtcatttaacatgtgtaattattatatatttatattcttagctctagtgctattttgagaacaagcattattttcctctcaattcaacgaatatttcttcctcactaatgttataaaagatgctaatgtgaggattttggatttggactgcagatcacatctcttttacagtttgaatccattcagaattaatggtccagttgtcaagaaaacatttctatttcaatttcagcgatgaagaacgatacagatacagggaatatgcagaaagaggttatgagcgtcacagagcaagtcgagaaaaagaagaacgacatagagaaagacgacacagggagaaagaggaaaccagacataagtcttctcgaagtaatagtagacgtcgccatgaaagtgaagaaggagatagtcacaggagacacaaacacaaaaaatctaaaagaagcaaagaaggaaaagaagcgggcagtgagcctgcccctgaacaggagagcaccgaagctacacctgcagaataggcatggttttggccttttgtgtatattagtaccagaagtagatactataaatcttgttatttttctggataatgtttaagaaatttaccttaaatcttgttctgtttgttagtatgaaaagttaactttttttccaaaataaaagagtgaatttttcatgttaagttaaaaatctttgtcttgtact

SEQ ID NO: 374365 - DNA, 615 bp, Homo sapiens
taggctaggtacgaggctgggtgttgaatcggccgagggacggacctgcgctggaggcttcatctttgccgccgctgccgtcgccttcctgggattggagtctcgagctttcttcgttcgttcgccggcgggttcgcgcccttctcgcgcctcggggctgcgaggctggggaaggggttggagggggctgttgatcgccgcgtttaagttgcgctcggggcggccatgtcggccggcgaggtcgagcgcctagtgtcggagctgagcggcgggaccggaggggatgaggaggaagagtggctctatggcggcccatgggacgtgcatgtgcacagtgatttggcaaaggacctagatgaaaatgaagttgaatttttaaagtcactaacaaccaaacaaaaacagaaacttctcaggaaattagatcgactggagaagaaaaaaaagaaaaaagatagaaaaaagaaaaagtttcagaagagcagaagtaaacacaaaaaacataagtcctcttcttcctcatcttcctcctcctcctcctcttcctctactgagacttcagaaagcagtagtgagagtgagagtaacaataaagaaaaaaaaatacaaaggaaa

SEQ ID NO: 374366 - DNA, 309 bp, Homo sapiens
agaaagacgacacagggagaaagaggaaaccagacataagtcttctcgaaggtttgctctttaataaaatagtgaaccaatagtatgtgagagattttgacttactacattgtcgcattggaagaggggaaattttggcctatgaaccagtcttgcttggtttcattaaagaaaaattcagggccttgtctcaaatttttttaaaaaagcattaaacaaaatacctattgtttgccaaaaatcaaccctatacagtatttccggttttgagttaatgcctgtttctaatttgttactgtatattataat

SEQ ID NO: 374367 - DNA, 2155 bp, Homo sapiens
taggctaggtacgaggctgggtgttgaatcggccgagggacggacctgcgctggaggcttcatctttgccgccgctgccgtcgccttcctgggattggagtctcgagctttcttcgttcgttcgccggcgggttcgcgcccttctcgcgcctcggggctgcgaggctggggaaggggttggagggggctgttgatcgccgcgtttaagttgcgctcggggcggccatgtcggccggcgaggtcgagcgcctagtgtcggagctgagcggcgggaccggaggggatgaggaggaagagtggctctatggcggcccatgggacgtgcatgtgcacagtgatttggcaaaggacctagatgaaaatgaagttgaaaggccagaagaagaaaatgccagtgctaatcctccatctggaattgaagatgaaactgctgaaaatggtgtaccaaaaccgaaagtgactgagaccgaagatgatagtgatagtgacagcgatgatgatgaagatgatgttcatgtcactataggagacattaaaacgggagcaccacagtatgggagttatggtacagcacctgtaaatcttaacatcaagacagggggaagagtttatggaactacagggacaaaagtcaaaggagtagaccttgatgcacctggaagcattaatggagttccactcttagaggtagatttggattcttttgaagataaaccatggcgtaaacctggtgctgatctttctgattattttaattatgggtttaatgaagatacctggaaagcttactgtgaaaaacaaaagaggatacgaatgggacttgaagttataccagtaacctctactacaaataaaattacggtacagcagggaagaactggaaactcagagaaagaaactgcccttccatctacaaaagctgagtttacttctcctccttctttgttcaagactgggcttccaccgagcagaaacagcacttcttctcagtctcagacaagtactgcctccagaaaagccaattcaagcgttgggaagtggcaggatcgatatgggagggccgaatcacctgatctaaggagattacctggggcaattgatgttatcggtcagactataactatcagccgagtagaaggcaggcgacgggcaaatgagaacagcaacatacaggtcctttctgaaagatctgctactgaagtagacaacaattttagcaaaccacctccgtttttccctccaggagctcctcccactcaccttccacctcctccatttcttccacctcctccgactgtcagcactgctccacctctgattccaccaccgggtattccaataactgtaccacctccaggttttcctcctccaccaggcgctccacctccatctcttataccaacaatagaaagtggacattcctctggttatgatagtcgttctgcacgtgcatttccatatggcaatgttgcctttccccatcttcctggttctgctccttcgtggcctagtcttgtggacaccagcaagcagtgggactattatgccagaagagagaaagaccgagatagagagagagacagagacagagagcgagaccgtgatcgggacagagaaagagaacgcaccagagagagagagagggagcgtgatcacagtcctacaccaagtgttttcaacagcgatgaagaacgatacagatacagggaatatgcagaaagaggttatgagcgtcacagagcaagtcgagaaaaagaagaacgacatagagaaagacgacacagggagaaagaggaaaccagacataagtcttctcgaagtaatagtagacgtcgccatgaaagtgaagaaggagatagtcacaggagacacaaacacaaaaaatctaaaagaagcaaagaaggaaaagaagcgggcagtgagcctgcccctgaacaggagagcaccgaagctacacctgcagaataggcatggttttggccttttgtgtatattagtaccagaagtagatactataaatcttgttatttttctggataatgtttaagaaatttaccttaaatcttgttctgtttgttagtatgaaaagttaactttttttccaaaataaaagagtgaatttttcatgttaagttaaaaatctttgtcttgtact

SEQ ID NO: 374368 - DNA, 1552 bp, Homo sapiens
tcacgtctagatgccagactctggatgcctgcaacgtgggtataccagagtacgtcgtatccaccacgtggtgactgtgcgcatcacacacaggcgctccacctccatctcttataccaacaatagaaagtggacatcctctggttatgatagtcgtctgcacgtgcatttccatatggcaatgttgcctttccccatcttcctggttctgctccttcgtggcctagtcttgtggacaccagcaagcagtgggactattatgccagaagagagaaagaccgagatagagagagagacagagacagagagcgagaccgtgatcgggacagagaaagagaacgcaccagagagagagagagggagcgtgatcacagtcctacaccaagtgttttcaaaaacagcacttcttctcagtctcagacaagtactgcctccagaaaagccaattcaagcgttgggaagtggcaggatcgatatgggagggccgaatcacctgatctaaggagattacctggggcaattgatgttatcggtcagactataactatcagccgagtagaaggcaggcgacgggcaaatgagaacagcaacatacaggtcctttctgaaagatctgctactgaagtagacaacaattttagcaaaccacctccgtttttccctccaggagctcctcccactcaccttccacctcctccatttcttccacctcctccgactgtcagcactgctccacctctgattccaccaccgggttttcctcctccaccaggcgctccacctccatctcttataccaacaatagaaagtggacattcctctggttatgatagtcgttctgcacgtgcatttccatatggcaatgttgcctttccccatcttcctggttctgctccttcgtggcctagtcttgtggacaccagcaagcagtgggactattatgccagaagagagaaagaccgagatagagagagagacagagacagagagcgagaccgtgatcgggacagagaaagagaacgcaccagagagagagagagggagcgtgatcacagtcctacaccaagtgttttcaacagcgatgaagaacgatacagatacagggaatatgcagaaagaggttatgagcgtcacagagcaagtcgagaaaaagaagaacgacatagagaaagacgacacagggagaaagaggaaaccagacataagtcttctcgaagtaatagtagacgtcgccatgaaagtgaagaaggagatagtcacaggagacacaaacacaaaaaatctaaaagaagcaaagaaggaaaagaagcgggcagtgagcctgcccctgaacaggagagcaccgaagctacacctgcagaataggcatggttttggccttttgtgtatattagtaccagaagtagatactataaatcttgttatttttctggataatgtttaagaaatttaccttaaatcttgttctgtttgttagtatgaaaagttaactttttttccaaaataaaagagtgaatttttcatgttaagttaaaaatctttgtcttgtact

SEQ ID NO: 374369 - DNA, 2243 bp, Homo sapiens
taggctaggtacgaggctgggtgttgaatcggccgagggacggacctgcgctggaggcttcatctttgccgccgctgccgtcgccttcctgggattggagtctcgagctttcttcgttcgttcgccggcgggttcgcgcccttctcgcgcctcggggctgcgaggctggggaaggggttggagggggctgttgatcgccgcgtttaagttgcgctcggggcggccatgtcggccggcgaggtcgagcgcctagtgtcggagctgagcggcgggaccggaggggatgaggaggaagagtggctctatggcggcccatgggacgtgcatgtgcacagtgatttggcaaaggacctagatgaaaatgaagttgaaaggccagaagaagaaaatgccagtgctaatcctccatctggaattgaagatgaaactgctgaaaatggtgtaccaaaaccgaaagtgactgagaccgaagatgatagtgatagtgacagcgatgatgatgaagatgatgttcatgtcactataggagacattaaaacgggagcaccacagtatgggagttatggtacagcacctgtaaatcttaacatcaagacagggggaagagtttatggaactacagggacaaaagtcaaaggagtagaccttgatgcacctggaagcattaatggagttccactcttagaggtagatttggattcttttgaagataaaccatggcgtaaacctggtgctgatctttctgattattttaattatgggtttaatgaagatacctggaaagcttactgtgaaaaacaaaagaggatacgaatgggacttgaagttataccagtaacctctactacaaataaaattacggtacagcagggaagaactggaaactcagagaaagaaactgcccttccatctacaaaagctgagtttacttctcctccttctttgttcaagactgggcttccaccgagcagaaacagcacttcttctcagtctcagacaagtactgcctccagaaaagccaattcaagcgttgggaagtggcaggatcgatatgggagggccgaatcacctgatctaaggagattacctggggcaattgatgttatcggtcagactataactatcagccgagtagaaggcaggcgacgggcaaatgagaacagcaacatacaggtcctttctgaaagatctgctactgaagtagacaacaattttagcaaaccacctccgtttttccctccaggagctcctcccactcaccttccacctcctccatttcttccacctcctccgactgtcagcactgctccacctctgattccaccaccgggttttcctcctccaccaggcgctccacctccatctcttataccaacaatagaaagtggacattcctctggttatgatagtcgttctgcacgtgcatttccatatggcaatgttgcctttccccatcttcctggttctgctccttcgtggcctagtcttgtggacaccagcaagcagtgggactattatgccagaagagagaaagaccgagatagagagagagacagagacagagagcgagaccgtgatcgggacagagaaagagaacgcaccagagagagagagagggagcgtgatcacagtcctacaccaagtgttttcaacagcgatgaagaacgatacagatacagggaatatgcagaaagaggttatgagcgtcacagagcaagtcgagaaaaagaagaacgacatagagaaagacgacacagggagaaagaggaaaccagacataagtcttctcgaagtaatagtagacgtcgccatgaaagtgaagaaggagatagtcacaggagacacaaacacaaaaaatctaaaagaagcaaagaaggaaaagaagcgggcagtgagcctgcccctgaacaggagagcaccgaagctacacctgcagaataggcatggttttggccttttgtgtatattagtaccagaagtagatactataaatcttgttatttttctggataatgtttaagaaatttaccttaaatcttgttctgtttgttagtatgaaaagttaactttttttccaaaataaaagagtgaatttttcatgttaagttaaaaatctttgtcttgtactctatctcttttataaaaataccagagaggttgcgtgcactttagatattttaatagtcgtatcttttataaaggtatcagggtttttgtcgtggtacaggaagataatgtgcttt

SEQ ID NO: 374370 - DNA, 1914 bp, Homo sapiens
taggctaggtacgaggctgggtgttgaatcggccgagggacggacctgcgctggaggcttcatctttgccgccgctgccgtcgccttcctgggattggagtctcgagctttcttcgttcgttcgccggcgggttcgcgcccttctcgcgcctcggggctgcgaggctggggaaggggttggagggggctgttgatcgccgcgtttaagttgcgctcggggcggccatgtcggccggcgaggtcgagcgcctagtgtcggagctgagcggcgggaccggaggggatgaggaggaagagtggctctatggcggcccatgggacgtgcatgtgcacagtgatttggcaaaggacctagatgaaaatgaagttgaaaggccagaagaagaaaatgccagtgctaatcctccatctggaattgaagatgaaactgctgaaaatggtgtaccaaaaccgaaagtgactgagaccgaagatgatagtgatagtgacagcgatgatgatgaagatgatgttcatgtcactataggagacattaaaacgggagcaccacagtatgggagttatggtacagcacctgtaaatcttaacatcaagacagggggaagagtttatggaactacagggacaaaagtcaaaggagtagaccttgatgcacctggaagcattaatggagttccactcttagaggtagatttggattcttttgaagataaaccatggcgtaaacctggtgctgatctttctgattattttaattatgggtttaatgaagatacctggaaagcttactgtgaaaaacaaaagaggatacgaatgggacttgaagttataccagtaacctctactacaaataaaattacggtacagcagggaagaactggaaactcagagaaagaaactgcccttccatctacaaaagctgagtttacttctcctccttctttgttcaagactgggcttccaccgagcagaaacagcacttcttctcagtctcagacaagtactgcctccagaaaagccaattcaagcgttgggaagtggcaggatcgatatgggagggccgaatcacctgatctaaggagattacctggggcaattgatgttatcggtcagactataactatcagccgagtagaaggcaggcgacgggcaaatgagaacagcaacatacaggtcctttctgaaagatctgctactgaagtagacaacaattttagcaaaccacctccgtttttccctccaggagctcctcccactcaccttccacctcctccatttcttccacctcctccgactgtcagcactgctccacctctgattccaccaccgggttttcctcctccaccaggcgctccacctccatctcttataccaacaatagaaagtggacattcctctggttatgatagtcgttctgcacgtgcatttccatatggcaatgcgatgaagaacgatacagatacagggaatatgcagaaagaggttatgagcgtcacagagcaagtcgagaaaaagaagaacgacatagagaaagacgacacagggagaaagaggaaaccagacataagtcttctcgaagtaatagtagacgtcgccatgaaagtgaagaaggagatagtcacaggagacacaaacacaaaaaatctaaaagaagcaaagaaggaaaagaagcgggcagtgagcctgcccctgaacaggagagcaccgaagctacacctgcagaataggcatggttttggccttttgtgtatattagtaccagaagtagatactataaatcttgttatttttctggataatgtttaagaaatttaccttaaatcttgttctgtttgttagtatgaaaagttaactttttttccaaaataaaagagtgaatttttcatgttaagttaaaaatctttgtcttgtact

SEQ ID NO: 374371 - DNA, 1875 bp, Homo sapiens
taggctaggtacgaggctgggtgttgaatcggccgagggacggacctgcgctggaggcttcatctttgccgccgctgccgtcgccttcctgggattggagtctcgagctttcttcgttcgttcgccggcgggttcgcgcccttctcgcgcctcggggctgcgaggctggggaaggggttggagggggctgttgatcgccgcgtttaagttgcgctcggggcggccatgtcggccggcgaggtcgagcgcctagtgtcggagctgagcggcgggaccggaggggatgaggaggaagagtggctctatggcggcccatgggacgtgcatgtgcacagtgatttggcaaaggacctagatgaaaatgaagttgaaaggccagaagaagaaaatgccagtgctaatcctccatctggaattgaagatgaaactgctgaaaatggtgtaccaaaaccgaaagtgactgagaccgaagatgatagtgatagtgacagcgatgatgatgaagatgatgttcatgtcactataggagacattaaaacgggagcaccacagtatgggagttatggtacagcacctgtaaatcttaacatcaagacagggggaagagtttatggaactacagggacaaaagtcaaaggagtagaccttgatgcacctggaagcattaatggagttccactcttagaggtagatttggattcttttgaagataaaccatggcgtaaacctggtgctgatctttctgattattttaattatgggtttaatgaagatacctggaaagcttactgtgaaaaacaaaagaggatacgaatgggacttgaagttataccagtaacctctactacaaataaaattacggccgaagactgtactatggaagttacaccaggtgcagagatccaagatggcagattcaatctttttaaggtacagcagggaagaactggaaactcagagaaagaaactgcccttccatctacaaaagctgagtttacttctcctccttctttgttcaagactgggcttccaccgagcaggagattacctggggcaattgatgttatcggtcagactataactatcagccgagtagaaggcaggcgacgggcaaatgagaacagcaacatacaggtcctttctgaaagatctgctactgaagtagacaacaattttagcaaaccacctccgtttttccctccaggagctcctcccactcaccttccacctcctccatttcttccacctcctccgactgtcagcactgctccacctctgattccaccaccgggttttcctcctccaccaggcgctccacctccatctcttataccaacaatagaaagtggacattcctctggttatgatagtcgttctgcacgtgcatttccatatggcaatgcgatgaagaacgatacagatacagggaatatgcagaaagaggttatgagcgtcacagagcaagtcgagaaaaagaagaacgacatagagaaagacgacacagggagaaagaggaaaccagacataagtcttctcgaagtaatagtagacgtcgccatgaaagtgaagaaggagatagtcacaggagacacaaacacaaaaaatctaaaagaagcaaagaaggaaaagaagcgggcagtgagcctgcccctgaacaggagagcaccgaagctacacctgcagaataggcatggttttggccttttgtgtatattagtaccagaagtagatactataaatcttgttatttttctggataatgtttaagaaatttaccttaaatcttgttctgtttgttagtatgaaaagttaactttttttccaaaataaaagagtgaatttttcatgttaagttaaaaatctttgtcttgtact

SEQ ID NO: 374372 - DNA, 2085 bp, Homo sapiens
taggctaggtacgaggctgggtgttgaatcggccgagggacggacctgcgctggaggcttcatctttgccgccgctgccgtcgccttcctgggattggagtctcgagctttcttcgttcgttcgccggcgggttcgcgcccttctcgcgcctcggggctgcgaggctggggaaggggttggagggggctgttgatcgccgcgtttaagttgcgctcggggcggccatgtcggccggcgaggtcgagcgcctagtgtcggagctgagcggcgggaccggaggggatgaggaggaagagtggctctatggcggcccatgggacgtgcatgtgcacagtgatttggcaaaggacctagatgaaaatgaagttgaaaggccagaagaagaaaatgccagtgctaatcctccatctggaattgaagatgaaactgctgaaaatggtgtaccaaaaccgaaagtgactgagaccgaagatgatagtgatagtgacagcgatgatgatgaagatgatgttcatgtcactataggagacattaaaacgggagcaccacagtatgggagttatggtacagcacctgtaaatcttaacatcaagacagggggaagagtttatggaactacagggacaaaagtcaaaggagtagaccttgatgcacctggaagcattaatggagttccactcttagaggtagatttggattcttttgaagataaaccatggcgtaaacctggtgctgatctttctgattattttaattatgggtttaatgaagatacctggaaagcttactgtgaaaaacaaaagaggatacgaatgggacttgaagttataccagtaacctctactacaaataaaattacggtacagcagggaagaactggaaactcagagaaagaaactgcccttccatctacaaaagctgagtttacttctcctccttctttgttcaagactgggcttccaccgagcagaaacagcacttcttctcagtctcagacaagtactgcctccagaaaagccaattcaagcgttgggaagtggcaggatcgatatgggagggccgaatcacctgatctaaggagattacctggggcaattgatgttatcggtcagactataactatcagccgagtagaaggcaggcgacgggcaaatgagaacagcaacatacaggtcctttctgaaagatctgctactgaagtagacaacaattttagcaaaccacctccgtttttccctccaggagctcctcccactcaccttccacctcctccatttcttccacctcctccgactgtcagcactgctccacctctgattccaccaccgggttttcctcctccaccaggcgctccacctccatctcttataccaacaatagaaagtggacattcctctggttatgatagtcgttctgcacgtgcatttccatatggcaatgttgcctttccccatcttcctggttctgctccttcgtggcctagtcttgtggacaccagcaagcagtgggactattatgccagaagagagaaagaccgagatagagagagagacagagacagagagcgagaccgtgatcgggacagagaaagagaacgcaccagagagagagagagggagcgtgatcacagtcctacaccaagtgttttcaacagcgatgaagaacgatacagatacagggaatatgcagaaagaggttatgagcgtcacagagcaagtcgagaaaaagaagaacgacatagagaaagacgacacagggagaaagaggaaaccagacataagtcttctcgaagtaatagtagacgtcgccatgaaagtgaagaaggagatagtcacaggagacacaaacacaaaaaatctaaaagaagcaaagaaggaaaagaagcgggcagtgagcctgcccctgaacaggagagcaccgaagctacacctgcagaataggcatggttttggccttttgtgtatattagtaccagaagtagatactataaatcttgttctgtttgttagtatgaaaagttaactttttttccaaaataaaagagtgaatttttcatgttaagttaaaaatctttgtcttgtact

SEQ ID NO: 374373 - DNA, 920 bp, Homo sapiens
taggctaggtacgaggctgggtgttgaatcggccgagggacggacctgcgctggaggcttcatctttgccgccgctgccgtcgccttcctgggattggagtctcgagctttcttcgttcgttcgccggcgggttcgcgcccttctcgcgcctcggggctgcgaggctggggaaggggttggagggggctgttgatcgccgcgtttaagttgcgctcggggcggccatgtcggccggcgaggtcgagcgcctagtgtcggagctgagcggcgggaccggaggggatgaggaggaagagtggctctatggcggtacgaaacttcctgtctctgtctctcgggttctctcaggcctcccctcttggccctcaaacggccggcgtccctggcctctcgcgccgccgcttcgggcctctggttgggagtcctgtccggcctgacttaggccgagcgcggcgtgcgcgtgcccccagtccccgcggcggtctcccgcctggcccacgcccaccatgcgcatccacccctgtggcggccgggccgggttggggggctgtgaccggtcctggcccccggcttcgctgtgctttccccgaggcgtctcgatcgcctagctgctgcgctctttacccttgtttttttctgtcgattctgaggtggtgttttttggtgtctgtttttgccctgtggccttagggtgcccttcctgtcccttctttcagaaacagtcattctgtaataatagctaaataaagttaatgctgtacaactaacgtcttgtttcttgatggtcagtttgtatggaatgcacctgcaagggtacctccttgtctgaaagtcgtgctttaaaaataattaattaagagagagagagagaaagatggcccataaggaaaactctgaatgtctcctgtattaaggtgaa

SEQ ID NO: 374374 - DNA, 2147 bp, Homo sapiens
atgaacggctacggctccccctacctgtacatgggcggcccggtgtcgcagccgccacgggcgcccctgcagcgcacgcccaagtgcgcgcgctgccgcaaccatggcgtcctgtcctggctcaagggccacaagcgttactgccgcttcaaggactgcacctgcgagaagtgcatcctcatcatcgagcggcagcgggtcatggctgcgcaggtggcgctgcgccggcagcaggccaacgagagcttggagagcctcatccccgactcgctgcgcgctctgccagggcccccgccgccgggggacgccgtcgccgccccgcagccgccgccagcctctcagccgtcgcagccgcagccgccgcgccctgctgccgagttggccgcggccgccgcgctgcgttggactgccgagccgcagcccggggctctgcaggcgcagctcgccaagccagatttgactgaagaacgacttggagacggcaagtcggcagacaatacagaggtcttcagtgacaaagacactgaccagaggagttccccagatgtggcaaagagtaagggctgcttcacccctgagagccctgagatagtgtccgtggaggaagggggatacgctgtccagaaaaacggaggcaaccccgagagccgccctgacagccccaagtgtcacgcggagcagaatcacctcctgattgagggcccctcggggactgtttctctgcccttcagcttgaaagccaacagaccgccgcttgaagtgttaaaaaagatattccccaaccagaagccaacggtgcttgagctcatcctcaagggctgtggcggggacctggtgagcgccgtggaagtccttctgtccagccgatcctcagtcacgggagcagagcgaacttccgcagaacctgagagtctagcgttgccctccaatgggcacatctttgaacacaccttgagctcctaccccatctcgtcttccaaatggtctgtgggatcagcctttcgagtcccagacacgttgaggttttctgccgactctagcaacgttgtccccagtcccttggctgggcctctgcagccccctttcccccagccaccccggtacccgctgatgctgaggaatactttggcgagaagccagtcgagcccctttttgcccaatgatgtcaccctgtggaacaccatgacgctgcagcagcagtatcagctgaggtcccagtatgtcagtcctttccccagtaactctaccagcgtcttcagaagctcgcccgtccttcctgcccgcgccacggaagaccctcggatttccatccctgatgatgggtgtccatttgtgtcaaagcagtccatttacaccgaggacgactatgacgagaggtctgactcctcagactctagaacactcaacacatcatcttaaagtggtgctggatgggtggtggccaggtgacattttctgtgcgttttgaccctgaggcatctgaggagaggccacatcttgtgtatgccctttccttctgtttgacaaagtgactgtgcttgattctatacattagcaataaaaacataacttatttaacttcttgcacttcactggaaaatgccaaatagctctgttctgtggctttagtgctgaatgtttattgtaaaagagagtctaatgttaagaatagtcttgggaaggctgggtccgtggaagatttatttggggatgtaaagctgaaggtcagccttgcacctaaacccaacctggaatgttaaatgaaataatatacttgaatgcaattttgtaaaagtggattcctcaggatatgtgaaacctaaaggaagtggttctgttgcaaatggactataaacagggacattatattcttacactaaaaatccttgcattttaaagagagatgcacttaagaatagagtgaactgctcatatgcttatttaagcttggacagttttcagagacaaaccccattaagaattactcttttcacatggctgaatcgaaacatgtgtaatgtcaatgtaaaaccaatcacagctgtgaactgcatgaaatgtattgtgaaacgaacacaagattaagctttgtcaggttaatgtagcatgttaaggactctagaaaaaaataaactaaggagacgagc

SEQ ID NO: 374375 - DNA, 1899 bp, Homo sapiens
tttgatttctagatctttatttacagggtttttgtttcatttgccagtgatatagttcgaatttttttaaaaaggcttgtagtatattatgacccattgagatgcatttgctcttccaaaaagcacgtgtacaggtctcttctgagcacatctgctcctctttatgcacaccaggaaaagattaactcagctgttctgttttccagatttgactgaagaacgacttggagacggcaagtcggcagacaatacagaggtcttcagtgacaaagacactgaccagaggagttccccagatgtggcaaagagtaagggctgcttcacccctgagagccctgagatagtgtccgtggaggaagggggatacgctgtccagaaaaacggaggcaaccccgagagccgccctgacagccccaagtgtcacgcggagcagaatcacctcctgattgagggcccctcggggactgtttctctgcccttcagcttgaaagccaacagaccgccgcttgaagtgttaaaaaagatattccccaaccagaagccaacggtgcttgagctcatcctcaagggctgtggcggggacctggtgagcgccgtggaagtccttctgtccagccgatcctcagtcacgggagcagagcgaacttccgcagaacctgagagtctagcgttgccctccaatgggcacatctttgaacacaccttgagctcctaccccatctcgtcttccaaatggtctgtgggatcagcctttcgagtcccagacacgttgaggttttctgccgactctagcaacgttgtccccagtcccttggctgggcctctgcagccccctttcccccagccaccccggtacccgctgatgctgaggaatactttggcgagaagccagtcgagcccctttttgcccaatgatgtcaccctgtggaacaccatgacgctgcagcagcagtatcagctgaggtcccagtatgtcagtcctttccccagtaactctaccagcgtcttcagaagctcgcccgtccttcctgcccgcgccacggaagaccctcggatttccatccctgatgatgggtgtccatttgtgtcaaagcagtccatttacaccgaggacgactatgacgagaggtctgactcctcagactctagaacactcaacacatcatcttaaagtggtgctggatgggtggtggccaggtgacattttctgtgcgttttgaccctgaggcatctgaggagaggccacatcttgtgtatgccctttccttctgtttgacaaagtgactgtgcttgattctatacattagcaataaaaacataacttatttaacttcttgcacttcactggaaaatgccaaatagctctgttctgtggctttagtgctgaatgtttattgtaaaagagagtctaatgttaagaatagtcttgggaaggctgggtccgtggaagatttatttggggatgtaaagctgaaggtcagccttgcacctaaacccaacctggaatgttaaatgaaataatatacttgaatgcaattttgtaaaagtggattcctcaggatatgtgaaacctaaaggaagtggttctgttgcaaatggactataaacagggacattatattcttacactaaaaatccttgcattttaaagagagatgcacttaagaatagagtgaactgctcatatgcttatttaagcttggacagttttcagagacaaaccccattaagaattactcttttcacatggctgaatcgaaacatgtgtaatgtcaatgtaaaaccaatcacagctgtgaactgcatgaaatgtattgtgaaacgaacacaagattaagctttgtcaggttaatgtagcatgttaaggactctagaaaaaaataaactaaggagacgagc

SEQ ID NO: 374376 - DNA, 2333 bp, Homo sapiens
caaacaaacataagtcaaaccatcataagttaagttagggaccatctgtatacttttttatcttatttaaatagcatccttattatagaagtttgaaaattacaaataaaagacaaaaatgatctctgatttccctagcaatgattctgtttccattgattcaaattactaaaaatttaaacaatattcattggtgtgtcaaaatacacttgtgcattttctgcagttataaagatatctttgggcttaaaatatttttgtgtttcgtattactttcttggtgtagattcccaactaagttaagagttataaacataacgaaagactccatgttagagtgtgtgtatgtgtgtatgtttaaataatacatttgactaggcgcagttgctcatacctgtaatcccaggactttgggaggctggggcaggaggatcacttgaggccaggagttcaaccagcctgggtaatgtggcaagacactgtctttacaaaaagatatttaaaactagccaggtgtggtagtgtgtgcctgtagcctcagctactcaggaggctgaagaggggggattgcttgagcccacgagtttgaggctgcagtgaactaagatcacgccattgcacactagcctgggcaacagagcaagaccctgtctcttaaaaaaaaaaaatgtatttctaagtcacaaatctaaagagattgtaccagtttataatcataccaccagtatataagagtacctattctacaatagtttctttcttcataactaatttatacccaaaaaagatctgattttgttttgttttataagaaagactaaaatacttgtctgctatttggcaatttataaatccccactgtccagattgaaagtgctatcaacactcctaattcattagtagttcgagggtttctctaaaagagacagacttgggacaaagttggaaatcaacctgcattttcatacagccgcttaagacatttaagtttgactccatctacttagaacaattcaaaatgtgaatcttgcaactccagtggtcgttatgatcatttagtattgcccacaggggaagcagaattacaacccaggatggaacaaccttttggtcatttctgttcccattagtattgttagttttgttatgctgagcacactacaaagttgcatctcttgtataagtacaacacaatttattaaatattgtatacatagaaccaagaatcgataggatgcagggctgcttgattgtaccagaaacaaaacatgatgagaatacattgaaacactggatttacttaagaaaaacctaagtttttcaaatctaatttatttaagaaaacgtattttcttaataagtgtaacacagttcttacaaggtatggtaataagcagaaagtagaattttgaatattaatgtcaaagtatgttttctgccattttgatggagttgatactttttcttgtaagttcttcctgtagtgaaagagagaaagtgaggtgtcattgccgaaaggacacactaataacctcttggtagtttattgcaggtaaaatcattttttaattaagctgacaacgtggtaaaactgcagcattaaattgtaattatgtttaaatggaagtctttctgtagagtgttaaaggatgataaacgtttgaggttcaaataactcgactgtcttatcaaacaccatgtctataagtaataagtttctgggagaattgtgaattggattttgttttatttcaagtggatgcttttgtgcccatatttaagctgccgttgcttacaagacctgtactgcccttccccacctgccttttccatcataccctatgctcacagacaaatctcagcaagaggcaggagttgcttcactaatcaaaaccttacattaaaatagttttacctagatctaagttctagtcccaaatcaaaaagcaatctgtggagttttcagtataatttcgtactgacagctttccaaatagtaacgtaaacggttcacgtacttggtgaactgaagaaatagaatggaggccattagcactgtaagttgttagtttgcctgtttaccaaaaatatgttgagtttcggggcacataccttaaaattgccctgtttcactgtgtaagaggaactggcttgactacttcacccttggtgaaaacaaacaggccctaaaagaggcagcaacagctgaagtggatatcacagaaataaacagacagcagaagctcttcagacacccccgaaacctgccaaaactcacaggtaatacaagtgaaacgatagcataagaagaaaataaacatgagaatcttcaa

SEQ ID NO: 374377 - DNA, 4919 bp, Homo sapiens
  misc_feature (19)..(21): n is a, c, g, or t
  misc_feature (44)..(45): n is a, c, g, or t
tccgaaccccgtccccggnnnttttattgggggaaacccacccnngtccggcccggtgttcctggggacccgcttgtggcccggtgcctaacctactggcgcccggcgcccacacggaatggtttaaaaaccttttccagggcccaagccccccacaaatttttttttttttttttttttttgagacagagtcttgctccatcacccatgctagagtgcagtggagtgatctcggctcactgcaacttccgccttctgggttcaagctattctcctgcctcagccttccaagtaactgggattacaggcatgtaccaccataccagctgatttttttgtatttttagtaaagacagggtttcaccatgttagccaggctgatcttgaactcctaaactcaagtgatctactcacctcagcctccccaaatgctgggattacagatgtgaggcacctggcctcagatttttgatactcttaaaccttctgatccttagtttctctctcccaaatactctttctaggttaaaaaaaaaaggctcttatatttggtgctatgtaaatgaaaatgttttttaggttttcttgatttaacaatagagacagggtctccctgtgttgcccaggctggtctcgaactcctgggctcaagagatcctcctgtcttggcctcgcaaagtgctaagtaggattacaggcgttagccaccacacccggctgtaaaaatgtacttattctccagcctcttttgtataaaccatagtaagggatgggagtaatgatgttatctgtgaaaatagccaccatttacccgtaagacaaaacttgttaaagcctcctgagtctaacctagattacatcaggccctttttcacacacaaaaaaatcctttatgggatttaatggaatctgttgtttccccctaagttgaaaaacaactctaagacactttaaagtaccttcttggcctgggttacatggttcccagcctaggtttcagacttttgcttaaggccagttttagaaacccgtgaattcagaaaagttaattcagaaatttgataaacagaattgttatttaaaaactaactggaaagattgttaagttctttctgaattattcagaaattatgcatcattttccttcaagaatgacagggtcagcatgtggaattccaagatacctcttgacttcctctcaagctccgtgtttggtcagtggaggcccatccgagctcagcactgagaagtgttagtttctttgggacccatctaccctgaccacatcatgatgttcatctgcagctgttgcaaggtgttcagattgtataaacataaatgtcacaaaaactttaaaagaagtgcaattctcaaaaggttaggtggactaaagcattctgtaaagcaactgctaataatgagcttacagtggatttgaatttgaaaaatatagtaacaagcctgtcaaatatctgcaagaactatggaataaaactactgatgcagtgaagacagttgaaaagatcaaacaaatgccaagctatatttataatgaacaaattcaagaaaaaggactacggaaagttcaggacatcaaagaagtcaggcaaaactcatcttgacccctgttgcaggcaaaggaacgcagctggaagaaaagatgatataacagttaacaggatgcagacatggcagaggtttcctaaaaatctcattatctataaccatttctatatttacatttgaaaatctcctttggagacttagaacctctaaattattgacttattttttatataaggtcactccgatgaaaggtgattacaaaatcatctacattgctgtctacaaaaacagataatatggatgtttgatcgcatctcattgttaactctttactgatatgtttgtaaatacagaagtgaaatgtggacataaaatagttacgctatttggttaatggtactagacaacatgtaattaatgacattcaaaaatttatggctagtgatatatataaagtaaaattttctttgcagtaaaatatgccctttattatagaagggaggatataaggaaccaacagtttgtatgaaaatagctcaaataatatcttttattttgattttaatatttcttattttggtttattagtgtcttagaacaaaatggccttatataatgaagcctagttatgctggactgttttgatctcttttaattgttctgacagatagttggggatgagagccgaataaggtttgcctgaaataactgacactatataatttctgctttggcaaatactaagttctaacttgtcattcctggtagaacaagctttatttttcgagcctagcaatgatctagaagcagatgttatctcagtgccttttgcaatttgtgtgtgggtttttttttttaaaagccacacaataattttgggaaaacaatgtttgggtagaacatgtgtctgttaattgcacacaaaaccacttttaatgggtacagagttaaatttgaaggaataagttctagctgaagtattgtgaactccaaataatgctttgaggacctccaaaggtaaaagtactaatccctttggccatttattgagagagagagagagagagagtagggtgactatagttaatgtattgaatgttcttgctacaaataaatgatatttgagctgatgggtgtgctaattacactgatttgatcaatacccattgtatgtgaaacagtacatacaccatatttacaattatgtatttaacatttaaaatttctaatataagtatctctcaaactgtggattaacttcttgatttatatttaaatatgaatcttaagcaaaacagtgaaaataaccatcttgatttagtgtttttctcccatatgtgaattgtatatacttaggtgaggacaataaaatcaactgaactgtaagcttagaataggactgaggtaattctgcacagcaactttactaatggtacattgttgcttcaaaactctctctctctctctctgtctgtctcaataaatggccaaagggattagtagtttacctgtggaggtcctccaagcattatttggagttgataatacttcagctacaaccaagcagaatctcttttttttggaggtcctcgaagcattatttggagttgataatacttcagcttcaatttggagttgataatatttcagctagaacctagtagaatctgtttttttcctttggaggtcctcaaagcattattggagttcataatactgaagctagaaccaagcagaatctgtttttttctgaggagtatcggtagcataaatgtgattataaacatagtacacttgatatatggaggcagtgacagctatttttacaaaatttaaatctgcaaatggattcaacatgtttatgggttattaaaattgtctgatttcttaggttctttatagtacacgtgttgaaaataaatgattaagaattgtttcaagaatgcaattatttgatcttaaatttttatgagttgttaaaatagaaattatttgaatatcatatatttgggtaacaaaaggcacaagtctgaatgtgtttctttttctggaatggccatgcctgcccactttagaaatacaaatatcactgggcagcttgaagcagttgggagcctccaatgagagcaacttgagagaatgatgttgcaagttagtaggagtaagaaatgctgtgttctccctgtcttctcttaggtcacatggcagcctggcctaagtgatcgtgaatggtctataagggaggtagctgggacagggaggggagtttgggctagccaccgtaccacttgtcagcgtgaaaagtaagattgtaattgcctgtttagttttctgcctcatctttgaaagttccaccaagctgggaacctcttgattgtgatgcacaaatgtaagtacatcagaaaaaaacaaaaaaactggctttaaagcaggagcttgtgggcccctaagccagacggggactagctttggcattatataattaagattttttaaatccttaataagggttttattttatttttatttattttttgagacggagtcttgctctgtggctcaggctggagtacagtggtgcaatcttggctcactgcaacctctgcctcctggctgtgttcaagtggttctgcttcagcctcccaagtagctggggttagagcaccctgtcaccacgccccgctaattttgtatttctagcagagatgaagtttcactatgttggccaggctgggctcaaactcctgacctcaagtgatctgcccgccttggccccccaaagtgctgtgattacaggcgtgagccaccacgcccagcctaataagggttttaaagataattagtgtgtaggtctgtaggcttatgatggtaaccacaagttgttaatggcattgtgaaaagtttttagttgcgctttatgggtggatgctgaattacattttgatttgatacttataaaaagaaaaagtatttcttcagcttaaaaaattgtttaaaagtttgtgatcatattgtctaccatgtagccagctttcaattatatgtaagagggactttttgacatttacaaataatactttgaggtagatatctgaaagcaccagcacttggaaggtgttcagaagtaacaaattataaaatgagctaacaaacgaaaggcaaaataaaaccgtaaagcaagcagatgggaggcgtgttcagtaacttattcataatgcatctgaaatgattgctgtactcaaatatttaacgttagagtaatagtattttgaatgaaaaccatagttgattgtctttagagagaggagtggtactgaaacatacttgaattcgtattgctttcctttaaagct

SEQ ID NO: 374378 - DNA, 4909 bp, Homo sapiens
  misc_feature (19)..(21): n is a, c, g, or t
  misc_feature (44)..(45): n is a, c, g, or t
tccgaaccccgtccccggnnnttttattgggggaaacccacccnngtccggcccggtgttcctggggaccccgttgtcccctgttttcatttcccagggcccggcgcccacgatgtgtttatatttttcgggctccggggggctcaccatttttttttttttttttttttttgagacagagtcttgctccatcacccatgctagagtgcagtggagtgatctcggctcactgcaacttccgccttctgggttcaagctattctcctgcctcagccttccaagtaactgggattacaggcatgtaccaccataccagctgatttttttgtatttttagtaaagacagggtttcaccatgttagccaggctgatcttgaactcctaaactcaagtgatctactcacctcagcctccccaaatgctgggattacagatgtgaggcacctggcctcagatttttgatactcttaaaccttctgatccttagtttctctctcccaaatactctttctaggttaaaaaaaaaaggctcttatatttggtgctatgtaaatgaaaatgttttttaggttttcttgatttaacaatagagacagggtctccctgtgttgcccaggctggtctcgaactcctgggctcaagagatcctcctgtcttggcctcgcaaagtgctaagtaggattacaggcgttagccaccacacccggctgtaaaaatgtacttattctccagcctcttttgtataaaccatagtaagggatgggagtaatgatgttatctgtgaaaatagccaccatttacccgtaagacaaaacttgttaaagcctcctgagtctaacctagattacatcaggccctttttcacacacaaaaaaatcctttatgggatttaatggaatctgttgtttccccctaagttgaaaaacaactctaagacactttaaagtaccttcttggcctgggttacatggttcccagcctaggtttcagacttttgcttaaggccagttttagaaacccgtgaattcagaaaagttaattcagaaatttgataaacagaattgttatttaaaaactaactggaaagattgttaagttctttctgaattattcagaaattatgcatcattttccttcaagaatgacagggtcagcatgtggaattccaagatacctcttgacttcctctcaagctccgtgtttggtcagtggaggcccatccgagctcagcactgagaagtgttagtttctttgggacccatctaccctgaccacatcatgatgttcatctgcagctgttgcaaggtgttcagattgtataaacataaatgtcacaaaaactttaaaagaagtgcaattctcaaaaggttaggtggactaaagcattctgtaaagcaactgctaataatgagcttacagtggatttgaatttgaaaaatatagtaacaagcctgtcaaatatctgcaagaactatggaataaaactactgatgcagtgaagacagttgaaaagatcaaacaaatgccaagctatatttataatgaacaaattcaagaaaaaggactacggaaagttcaggacatcaaagaagtcaggcaaaactcatcttgacccctgttgcaggcaaaggaacgcagctggaagaaaagatgatataacagttaacaggatgcagacatggcagaggtttcctaaaaatctcattatctataaccatttctatatttacatttgaaaatctcctttggagacttagaacctctaaattattgacttattttttatataaggtcactccgatgaaaggtgattacaaaatcatctacattgctgtctacaaaaacagataatatggatgtttgatcgcatctcattgttaactctttactgatatgtttgtaaatacagaagtgaaatgtggacataaaatagttacgctatttggttaatggtactagacaacatgtaattaatgacattcaaaaatttatggctagtgatatatataaagtaaaattttctttgcagtaaaatatgccctttattatagaagggaggatataaggaaccaacagtttgtatgaaaatagctcaaataatatcttttattttgattttaatatttcttattttggtttattagtgtcttagaacaaaatggccttatataatgaagcctagttatgctggactgttttgatctcttttaattgttctgacagatagttggggatgagagccgaataaggtttgcctgaaataactgacactatataatttctgctttggcaaatactaagttctaacttgtcattcctggtagaacaagctttatttttcgagcctagcaatgatctagaagcagatgttatctcagtgccttttgcaatttgtgtgtgggtttttttttttaaaagccacacaataattttgggaaaacaatgtttgggtagaacatgtgtctgttaattgcacacaaaaccacttttaatgggtacagagttaaatttgaaggaataagttctagctgaagtattgtgaactccaaataatgctttgaggacctccaaaggtaaaagtactaatccctttggccatttattgagagagagagagagagagagtagggtgactatagttaatgtattgaatgttcttgctacaaataaatgatatttgagctgatgggtgtgctaattacactgatttgatcaatacccattgtatgtgaaacagtacatacaccatatttacaattatgtatttaacatttaaaatttctaatataagtatctctcaaactgtggattaacttcttgatttatatttaaatatgaatcttaagcaaaacagtgaaaataaccatcttgatttagtgtttttctcccatatgtgaattgtatatacttaggtgaggacaataaaatcaactgaactgtaagcttagaataggactgaggtaattctgcacagcaactttactaatggtacattgttgcttcaaaactctctctctctctctctgtctgtctcaataaatggccaaagggattagtagtttacctgtggaggtcctccaagcattatttggagttgataatacttcagctacaaccaagcagaatctcttttttttggaggtcctcgaagcattatttggagttgataatacttcagcttcaatttggagttgataatatttcagctagaacctagtagaatctgtttttttcctttggaggtcctcaaagcattattggagttcataatactgaagctagaaccaagcagaatctgtttttttctgaggagtatcggtagcataaatgtgattataaacatagtacacttgatatatggaggcagtgacagctatttttacaaaatttaaatctgcaaatggattcaacatgtttatgggttattaaaattgtctgatttcttaggttctttatagtacacgtgttgaaaataaatgattaagaattgtttcaagaatgcaattatttgatcttaaatttttatgagttgttaaaatagaaattatttgaatatcatatatttgggtaacaaaaggcacaagtctgaatgtgtttctttttctggaatggccatgcctgcccactttagaaatacaaatatcactgggcagcttgaagcagttgggagcctccaatgagagcaacttgagagaatgatgttgcaagttagtaggagtaagaaatgctgtgttctccctgtcttctcttaggtcacatggcagcctggcctaagtgatcgtgaatggtctataagggaggtagctgggacagggaggggagtttgggctagccaccgtaccacttgtcagcgtgaaaagtaagattgtaattgcctgtttagttttctgcctcatctttgaaagttccaccaagctgggaacctcttgattgtgatgcacaaatgtaagtacatcagaaaaaaacaaaaaaactggctttaaagcaggagcttgtgggcccctaagccagacggggactagctttggcattatataattaagattttttaaatccttaataagggttttattttatttttatttattttttgagacggagtcttgctctgtggctcaggctggagtacagtggtgcaatcttggctcactgcaacctctgcctcctggctgtgttcaagtggttctgcttcagcctcccaagtagctggggttagagcaccctgtcaccacgccccgctaattttgtatttctagcagagatgaagtttcactatgttggccaggctgggctcaaactcctgacctcaagtgatctgcccgccttggccccccaaagtgctgtgattacaggcgtgagccaccacgcccagcctaataagggttttaaagataattagtgtgtaggtctgtaggcttatgatggtaaccacaagttgttaatggcattgtgaaaagtttttagttgcgctttatgggtggatgctgaattacattttgatttgatacttataaaaagaaaaagtatttcttcagcttaaaaaattgtttaaaagtttgtgatcatattgtctaccatgtagccagctttcaattatatgtaagagggactttttgacatttacaaataatactttgaggtagatatctgaaagcaccagcacttggaaggtgttcagaagtaacaaattataaaatgagctaacaaacgaaaggcaaaataaaaccgtaaagcaagcagatgggaggcgtgttcagtaacttattcataatgcatctgaaatgattgctgtactcaaatatttaacgttagagtaatagtattttgaatgaaaaccatagttgattgtctttagagagaggagtggtactgaaacatacttgaattcgtattgctttcctttaaagct

SEQ ID NO: 374379 - DNA, 4443 bp, Homo sapiens
  misc_feature (19)..(21): n is a, c, g, or t
  misc_feature (44)..(45): n is a, c, g, or t
tccgaaccccgtccccggnnnttttattgggggaaacccacccnngtccggcccggtgttcctggggacccgcttgtggcccggtgcctaacctactggcgcccggcgcccacacggaatggtttaaaaaccttttccagggcccaagccccccacaaatttttttttttttttttttttttgagacagagtcttgctccatcacccatgctagagtgcagtggagtgatctcggctcactgcaacttccgccttctgggttcaagctattctcctgcctcagccttccaagtaactgggattacaggcatgtaccaccataccagctgatttttttgtatttttagtaaagacagggtttcaccatgttagccaggctgatcttgaactcctaaactcaagtgatctactcacctcagcctccccaaatgctgggattacagatgtgaggcacctggcctcagatttttgatactcttaaaccttctgatccttagtttctctctcccaaatactctttctaggttaaaaaaaaaaggctcttatatttggtgctatgtaaatgaaaatgttttttaggttttcttgatttaacaatagagacagggtctccctgtgttgcccaggctggtctcgaactcctgggctcaagagatcctcctgtcttggcctcgcaaagtgctaagtaggattacaggcgttagccaccacacccggctgtaaaaatgtacttattctccagcctcttttgtataaaccatagtaagggatgggagtaatgatgttatctgtgaaaatagccaccatttacccgtaagacaaaacttgttaaagcctcctgagtctaacctagattacatcaggccctttttcacacacaaaaaaatcctttatgggatttaatggaatctgttgtttccccctaagttgaaaaacaactctaagacactttaaagtaccttcttggcctgggttacatggttcccagcctaggtttcagacttttgcttaaggccagttttagaaacccgtgaattcagaaaagttaattcagaaatttgataaacagaattgttatttaaaaactaactggaaagattgttaagttctttctgaattattcagaaattatgcatcattttccttcaagaatgacagggtcagcatgtggaattccaagatacctcttgacttcctctcaagctccgtgtttggtcagtggaggcccatccgagctcagcactgagaagtgttagtttctttgggacccatctaccctgaccacatcatgatgttcatctgcagctgttgcaaggtgttcagattgtataaacataaatgtcacaaaaactttaaaagaagtgcaattctcaaaaggttaggtggactaaagcattctgtaaagcaactgctaataatgagcttacagtggatttgaatttgaaaaatatagtaacaagcctgtcaaatatctgcaagaactatggaataaaactactgatgcagtgaagacagttgaaaagatcaaacaaatgccaagctatatttataatgaacaaattcaagaaaaaggactacggaaagttcaggacatcaaagaagtcaggcaaaactcatcttgacccctgttgcaggcaaaggaacgcagctggaagaaaagatgatataacagttaacaggatgcagacatggcagaggtttcctaaaaatctcattatctataaccatttctatatttacatttgaaaatctcctttggagacttagaacctctaaattattgacttattttttatataaggtcactccgatgaaaggtgattacaaaatcatctacattgctgtctacaaaaacagataatatggatgtttgatcgcatctcattgttaactctttactgatatgtttgtaaatacagaagtgaaatgtggacataaaatagttacgctatttggttaatggtactagacaacatgtaattaatgacattcaaaaatttatggctagtgatatatataaagtaaaattttctttgcagtaaaatatgccctttattatagaagggaggatataaggaaccaacagtttgtatgaaaatagctcaaataatatcttttattttgattttaatatttcttattttggtttattagtgtcttagaacaaaatggccttatataatgaagcctagttatgctggactgttttgatctcttttaattgttctgacagatagttggggatgagagccgaataaggtttgcctgaaataactgacactatataatttctgctttggcaaatactaagttctaacttgtcattcctggtagaacaagctttatttttcgagcctagcaatgatctagaagcagatgttatctcagtgccttttgcaatttgtgtgtgggtttttttttttaaaagccacacaataattttgggaaaacaatgtttgggtagaacatgtgtctgttaattgcacacaaaaccacttttaatgggtacagagttaaatttgaaggaataagttctagctgaagtattgtgaactccaaataatgctttgaggacctccaaagggattagtagtttacctgtggaggtcctccaagcattatttggagttgataatacttcagctacaaccaagcagaatctcttttttttggaggtcctcgaagcattatttggagttgataatacttcagcttcaatttggagttgataatatttcagctagaacctagtagaatctgtttttttcctttggaggtcctcaaagcattattggagttcataatactgaagctagaaccaagcagaatctgtttttttctgaggagtatcggtagcataaatgtgattataaacatagtacacttgatatatggaggcagtgacagctatttttacaaaatttaaatctgcaaatggattcaacatgtttatgggttattaaaattgtctgatttcttaggttctttatagtacacgtgttgaaaataaatgattaagaattgtttcaagaatgcaattatttgatcttaaatttttatgagttgttaaaatagaaattatttgaatatcatatatttgggtaacaaaaggcacaagtctgaatgtgtttctttttctggaatggccatgcctgcccactttagaaatacaaatatcactgggcagcttgaagcagttgggagcctccaatgagagcaacttgagagaatgatgttgcaagttagtaggagtaagaaatgctgtgttctccctgtcttctcttaggtcacatggcagcctggcctaagtgatcgtgaatggtctataagggaggtagctgggacagggaggggagtttgggctagccaccgtaccacttgtcagcgtgaaaagtaagattgtaattgcctgtttagttttctgcctcatctttgaaagttccaccaagctgggaacctcttgattgtgatgcacaaatgtaagtacatcagaaaaaaacaaaaaaactggctttaaagcaggagcttgtgggcccctaagccagacggggactagctttggcattatataattaagattttttaaatccttaataagggttttattttatttttatttattttttgagacggagtcttgctctgtggctcaggctggagtacagtggtgcaatcttggctcactgcaacctctgcctcctggctgtgttcaagtggttctgcttcagcctcccaagtagctggggttagagcaccctgtcaccacgccccgctaattttgtatttctagcagagatgaagtttcactatgttggccaggctgggctcaaactcctgacctcaagtgatctgcccgccttggccccccaaagtgctgtgattacaggcgtgagccaccacgcccagcctaataagggttttaaagataattagtgtgtaggtctgtaggcttatgatggtaaccacaagttgttaatggcattgtgaaaagtttttagttgcgctttatgggtggatgctgaattacattttgatttgatacttataaaaagaaaaagtatttcttcagcttaaaaaattgtttaaaagtttgtgatcatattgtctaccatgtagccagctttcaattatatgtaagagggactttttgacatttacaaataatactttgaggtagatatctgaaagcaccagcacttggaaggtgttcagaagtaacaaattataaaatgagctaacaaacgaaaggcaaaataaaaccgtaaagcaagcagatgggaggcgtgttcagtaacttattcataatgcatctgaaatgattgctgtactcaaatatttaacgttagagtaatagtattttgaatgaaaaccatagttgattgtctttagagagaggagtggtactgaaacatacttgaattcgtattgctttcctttaaagct

SEQ ID NO: 374380 - DNA, 4810 bp, Homo sapiens
  misc_feature (19)..(21): n is a, c, g, or t
  misc_feature (44)..(45): n is a, c, g, or t
tccgaaccccgtccccggnnnttttattgggggaaacccacccnngtccggcccggtgttcctggggacccgcttgtggcccggtgcctaacctactggcgcccggcgcccacacggaatggtttaaaaaccttttccagggcccaagccccccacaaatttttttttttttttttttttttgagacagagtcttgctccatcacccatgctagagtgcagtggagtgatctcggctcactgcaacttccgccttctgggttcaagctattctcctgcctcagccttccaagtaactgggattacaggcatgtaccaccataccagctgatttttttgtatttttagtaaagacagggtttcaccatgttagccaggctgatcttgaactcctaaactcaagtgatctactcacctcagcctccccaaatgctgggattacagatgtgaggcacctggcctcagatttttgatactcttaaaccttctgatccttagtttctctctcccaaatactctttctaggttaaaaaaaaaaggctcttatatttggtgctatgtaaatgaaaatgttttttaggttttcttgatttaacaatagagacagggtctccctgtgttgcccaggctggtctcgaactcctgggctcaagagatcctcctgtcttggcctcgcaaagtgctaagtaggattacaggcgttagccaccacacccggctgtaaaaatgtacttattctccagcctcttttgtataaaccatagtaagggatgggagtaatgatgttatctgtgaaaatagccaccatttacccgtaagacaaaacttgttaaagcctcctgagtctaacctagattacatcaggccctttttcacacacaaaaaaatcctttatgggatttaatggaatctgttgtttccccctaagttgaaaaacaactctaagacactttaaagtaccttcttggcctgggttacatggttcccagcctaggtttcagacttttgcttaaggccagttttagaaacccgtgaattcagaaaagttaattcagaaatttgataaacagaattgttatttaaaaactaactggaaagattgttaagttctttctgaattattcagaaattatgcatcattttccttcaagaatgacagggtcagcatgtggaattccaagatacctcttgacttcctctcaagctccgtgtttggtcagtggaggcccatccgagctcagcactgagaagtgttagtttctttgggacccatctaccctgaccacatcatgatgttcatctgcagctgttgcaaggtgttcagattgtataaacataaatgtcacaaaaactttaaaagaagtgcaattctcaaaaggttaggtggactaaagcattctgtaaagcaactgctaataatgagcttacagtggatttgaatttgaaaaatatagtaacaagcctgtcaaatatctgcaagaactatggaataaaactactgatgcagtgaagacagttgaaaagatcaaacaaatgccaagctatatttataatgaacaaattcaagaaaaaggactacggaaagttcaggacatcaaagaagtcaggcaaaactcatcttgacccctgttgcaggcaaaggaacgcagctggaagaaaagatgatataacagttaacaggatgcagacatggcagaggtttcctaaaaatctcattatctataaccatttctatatttacatttgaaaatctcctttggagacttagaacctctaaattattgacttattttttatataaggtcactccgatgaaaggtgattacaaaatcatctacattgctgtctacaaaaacagataatatggatgtttgatcgcatctcattgttaactctttactgatatgtttgtaaatacagaagtgaaatgtggacataaaatagttacgctatttggttaatggtactagacaacatgtaattaatgacattcaaaaatttatggctagtgatatatataaagtaaaattttctttgcagtaaaatatgccctttattatagaagggaggatataaggaaccaacagtttgtatgaaaatagctcaaataatatcttttattttgattttaatatttcttattttggtttattagtgtcttagaacaaaatggccttatataatgaagcctagttatgctggactgttttgatctcttttaattgttctgacagatagttggggatgagagccgaataaggtttgcctgaaataactgacactatataatttctgctttggcaaatactaagttctaacttgtcattcctggtagaacaagctttatttttcgagcctagcaatgatctagaagcagatgttatctcagtgccttttgcaatttgtgtgtgggtttttttttttaaaagccacacaataattttgggaaaacaatgtttgggtagaacatgtgtctgttaattgcacacaaaaccacttttaatgggtacagagttaaatttgaaggaataagttctagctgaagtattgtgaactccaaataatgctttgaggacctccaaaggtaaaagtactaatccctttggccatttattgagagagagagagagagagagtagggtgactatagttaatgtattgaatgttcttgctacaaataaatgatatttgagctgatgggtgtgctaattacactgatttgatcaatacccattgtatgtgaaacagtacatacaccatatttacaattatgtatttaacatttaaaatttctaatataagtatctctcaaactgtggattaacttcttgatttatatttaaatatgaatcttaagcaaaacagtgaaaataaccatcttgatttagtgtttttctcccatatgtgaattgtatatacttaggtgaggacaataaaatcaactgaactgtaagcttagaataggactgaggtaattctgcacagcaactttactaatggtacattgttgcttcaaaactctctctctctctctctgtctgtctcaataaatggccaaagggattagtagtttacctgtggaggtcctccaagcattatttggagttgataatacttcagctacaaccaagcagaatctcttttttttggagagcattattggagttcataatactgaagctagaaccaagcagaatctgtttttttctgaggagtatcggtagcataaatgtgattataaacatagtacacttgatatatggaggcagtgacagctatttttacaaaatttaaatctgcaaatggattcaacatgtttatgggttattaaaattgtctgatttcttaggttctttatagtacacgtgttgaaaataaatgattaagaattgtttcaagaatgcaattatttgatcttaaatttttatgagttgttaaaatagaaattatttgaatatcatatatttgggtaacaaaaggcacaagtctgaatgtgtttctttttctggaatggccatgcctgcccactttagaaatacaaatatcactgggcagcttgaagcagttgggagcctccaatgagagcaacttgagagaatgatgttgcaagttagtaggagtaagaaatgctgtgttctccctgtcttctcttaggtcacatggcagcctggcctaagtgatcgtgaatggtctataagggaggtagctgggacagggaggggagtttgggctagccaccgtaccacttgtcagcgtgaaaagtaagattgtaattgcctgtttagttttctgcctcatctttgaaagttccaccaagctgggaacctcttgattgtgatgcacaaatgtaagtacatcagaaaaaaacaaaaaaactggctttaaagcaggagcttgtgggcccctaagccagacggggactagctttggcattatataattaagattttttaaatccttaataagggttttattttatttttatttattttttgagacggagtcttgctctgtggctcaggctggagtacagtggtgcaatcttggctcactgcaacctctgcctcctggctgtgttcaagtggttctgcttcagcctcccaagtagctggggttagagcaccctgtcaccacgccccgctaattttgtatttctagcagagatgaagtttcactatgttggccaggctgggctcaaactcctgacctcaagtgatctgcccgccttggccccccaaagtgctgtgattacaggcgtgagccaccacgcccagcctaataagggttttaaagataattagtgtgtaggtctgtaggcttatgatggtaaccacaagttgttaatggcattgtgaaaagtttttagttgcgctttatgggtggatgctgaattacattttgatttgatacttataaaaagaaaaagtatttcttcagcttaaaaaattgtttaaaagtttgtgatcatattgtctaccatgtagccagctttcaattatatgtaagagggactttttgacatttacaaataatactttgaggtagatatctgaaagcaccagcacttggaaggtgttcagaagtaacaaattataaaatgagctaacaaacgaaaggcaaaataaaaccgtaaagcaagcagatgggaggcgtgttcagtaacttattcataatgcatctgaaatgattgctgtactcaaatatttaacgttagagtaatagtattttgaatgaaaaccatagttgattgtctttagagagaggagtggtactgaaacatacttgaattcgtattgctttcctttaaagct

SEQ ID NO: 374381 - DNA, 4166 bp, Homo sapiens
  misc_feature (19)..(21): n is a, c, g, or t
  misc_feature (44)..(45): n is a, c, g, or t
tccgaaccccgtccccggnnnttttattgggggaaacccacccnngtccggcccggtgttcctggggacccgcttgtggcccggtgcctaacctactggcgcccggcgcccacacggaatggtttaaaaaccttttccagggcccaagccccccacaaatttttttttttttttttttttttgagacagagtcttgctccatcacccatgctagagtgcagtggagtgatctcggctcactgcaacttccgccttctgggttcaagctattctcctgcctcagccttccaagtaactgggattacaggcatgtaccaccataccagctgatttttttgtatttttagtaaagacagggtttcaccatgttagccaggctgatcttgaactcctaaactcaagtgatctactcacctcagcctccccaaatgctgggattacagatgtgaggcacctggcctcagatttttgatactcttaaaccttctgatccttagtttctctctcccaaatactctttctaggttaaaaaaaaaaggctcttatatttggtgctatgtaaatgaaaatgttttttaggttttcttgatttaacaatagagacagggtctccctgtgttgcccaggctggtctcgaactcctgggctcaagagatcctcctgtcttggcctcgcaaagtgctaagtaggattacaggcgttagccaccacacccggctgtaaaaatgtacttattctccagcctcttttgtataaaccatagtaagggatgggagtaatgatgttatctgtgaaaatagccaccatttacccgtaagacaaaacttgttaaagcctcctgagtctaacctagattacatcaggccctttttcacacacaaaaaaatcctttatgggatttaatggaatctgttgtttccccctaagttgaaaaacaactctaagacactttaaagtaccttcttggcctgggttacatggttcccagcctaggtttcagacttttgcttaaggccagttttagaaacccgtgaattcagaaaagttaattcagaaatttgataaacagaattgttatttaaaaactaactggaaagattgttaagttctttctgaattattcagaaattatgcatcattttccttcaagaatgacagggtcagcatgtggaattccaagatacctcttgacttcctctcaagctccgtgtttggtcagtggaggcccatccgagctcagcactgagaagtgttagtttctttgggacccatctaccctgaccacatcatgatgttcatctgcagctgttgcaaggtgttcagattgtataaacataaatgtcacaaaaactttaaaagaagtgcaattctcaaaaggttaggtggactaaagcattctgtaaagcaactgctaataatgagcttacagtggatttgaatttgaaaaatatagtaacaagcctgtcaaatatctgcaagaactatggaataaaactactgatgcagtgaagacagttgaaaagatcaaacaaatgccaagctatatttataatgaacaaattcaagaaaaaggactacggaaagttcaggacatcaaagaagtcaggcaaaactcatcttgacccctgttgcaggcaaaggaacgcagctggaagaaaagatgatataacagttaacaggatgcagacatggcagaggtttcctaaaaatctcattatctataaccatttctatatttacatttgaaaatctcctttggagacttagaacctctaaattattgacttattttttatataaggtcactccgatgaaaggtgattacaaaatcatctacattgctgtctacaaaaacagataatatggatgtttgatcgcatctcattgttaactctttactgatatgtttgtaaatacagaagtgaaatgtggacataaaatagttacgctatttggttaatggtactagacaacatgtaattaatgacattcaaaaatttatggctagtgatatatataaagtaaaattttctttgcagtaaaatatgccctttattatagaagggaggatataaggaaccaacagtttgtatgaaaatagctcaaataatatcttttattttgattttaatatttcttattttggtttattagtgtcttagaacaaaatggccttatataatgaagcctagttatgctggactgttttgatctcttttaattgttctgacagatagttggggatgagagccgaataaggtttgcctgaaataactgacactatataatttctgctttggcaaatactaagttctaacttgtcattcctggtagaacaagctttatttttcgagcctagcaatgatctagaagcagatgttatctcagtgccttttgcaatttgtgtgtgggtttttttttttaaaagccacacaataattttgggaaaacaatgtttgggtagaacatgtgtctgttaattgcacacaaaaccacttttaatgggtacagagttaaatttgaaggaataagttctagctgaagtattgtgaactccaaataatgctttgaggacctccaaaggtaaaagtactaatccctttggccatttattgagagagagagagagagagagtagggtgactatagttaatgtattgaatgttcttgctacaaataaatgatatttgagctgatgggtgtgctaattacactgatttgatcaatacccattgtatgtgaaacagtacatacaccatatttacaattatgtatttaacatttaaaatttctaatataagtatctctcaaactgtggattaacttcttgatttatatttaaatatgaatcttaagcaaaacagtgaaaataaccatcttgatttagtgtttttctcccatatgtgaattgtatatacttaggtgaggacaataaaatcaactgaactgtaagcttagaataggactgaggtaattctgcacagcaactttactaatggtacattgttgcttcaaaactctctctctctctctctgtctgtctcaataaatggccaaagggattagtagtttacctgtggaggtcctccaagcattatttggagttgataatacttcagctacaaccaagcagaatctcttttttttggaggtcctcgaagcattatttggagttgataatacttcagcttcaatttggagttgataatatttcagctagaacctagtagaatctgtttttttcctttggaggtcctcaaagcattattggagttcataatactgaagctagaaccaagcagaatctgtttttttctgaggagtatcggtagcataaatgtgattataaacatagtacacttgatatatggaggcagtgacagctatttttacaaaatttaaatctgcaaatggattcaacatgtttatgggttattaaaattgtctgatttcttaggttctttatagtacacgtgttgaaaataaatgattaagaattgtttcaagaaaaaaaaaaaaaaaaaaaaaaaaaaaaaaaaacacacaaaaaaaacaaaaaacacacacaacaacaaaaaaaaaaagagcgagggggggacccccgctgcccccccgaggggcccccacaagccacgcgcagcccgccaccctcaggcgcgcacacagacgcgaggggccaacaaggaggcggcccagacaaaacaagaacaccgggggcgaccagaaacgacaggacaacaacacagacgacgcacacgacgaaaggagacaacacaggcaggacgcctcgccaggcaccgggggggcaggacaaacacaaaacgccgcgcggggcgaccgagagacacacacgaagggaggggaacacaccaaacgcagtagataaaacagagagaataatacccggcacgcaacacgagagagaaaaacacacagacacccaggcccccacccaggggcgaaacacaaagacggctccgaagaacaagagcagcaccgacaaatgaaaacccacatccccgaccgcacacgacaaaccactatagcccaccaccaagcaccaaccaatgaccacgcaccaccaagagacaaaattctcaaaacaagggcacgatcacacagaccagtaacaacacccagccagatgagagagcataaaggatcag

SEQ ID NO: 374382 - DNA, 4190 bp, Homo sapiens
  misc_feature (19)..(21): n is a, c, g, or t
  misc_feature (44)..(45): n is a, c, g, or t
tccgaaccccgtccccggnnnttttattgggggaaacccacccnngtccggcccggtgttcctggggacccgcttgtggcccggtgcctaacctactggcgcccggcgcccacacggaatggtttaaaaaccttttccagggcccaagccccccacaaatttttttttttttttttttttttgagacagagtcttgctccatcacccatgctagagtgcagtggagtgatctcggctcactgcaacttccgccttctgggttcaagctattctcctgcctcagccttccaagtaactgggattacaggcatgtaccaccataccagctgatttttttgtatttttagtaaagacagggtttcaccatgttagccaggctgatcttgaactcctaaactcaagtgatctactcacctcagcctccccaaatgctgggattacagatgtgaggcacctggcctcagatttttgatactcttaaaccttctgatccttagtttctctctcccaaatactctttctaggttaaaaaaaaaaggctcttatatttggtgctatgtaaatgaaaatgttttttaggttttcttgatttaacaatagagacagggtctccctgtgttgcccaggctggtctcgaactcctgggctcaagagatcctcctgtcttggcctcgcaaagtgctaagtaggattacaggcgttagccaccacacccggctgtaaaaatgtacttattctccagcctcttttgtataaaccatagtaagggatgggagtaatgatgttatctgtgaaaatagccaccatttacccgtaagacaaaacttgttaaagcctcctgagtctaacctagattacatcaggccctttttcacacacaaaaaaatcctttatgggatttaatggaatctgttgtttccccctaagttgaaaaacaactctaagacactttaaagtaccttcttggcctgggttacatggttcccagcctaggtttcagacttttgcttaaggccagttttagaaacccgtgaattcagaaaagttaattcagaaatttgataaacagaattgttatttaaaaactaactggaaagattgttaagttctttctgaattattcagaaattatgcatcattttccttcaagaatgacagggtcagcatgtggaattccaagatacctcttgacttcctctcaagctccgtgtttggtcagtggaggcccatccgagctcagcactgagaagtgttagtttctttgggacccatctaccctgaccacatcatgatgttcatctgcagctgttgcaaggtgttcagattgtataaacataaatgtcacaaaaactttaaaagaagtgcaattctcaaaaggttaggtggactaaagcattctgtaaagcaactgctaataatgagcttacagtggatttgaatttgaaaaatatagtaacaagcctgtcaaatatctgcaagaactatggaataaaactactgatgcagtgaagacagttgaaaagatcaaacaaatgccaagctatatttataatgaacaaattcaagaaaaaggactacggaaagttcaggacatcaaagaagtcaggcaaaactcatcttgacccctgttgcaggcaaaggaacgcagctggaagaaaagatgatataacagttaacaggatgcagacatggcagaggtttcctaaaaatctcattatctataaccatttctatatttacatttgaaaatctcctttggagacttagaacctctaaattattgacttattttttatataaggtcactccgatgaaaggtgattacaaaatcatctacattgctgtctacaaaaacagataatatggatgtttgatcgcatctcattgttaactctttactgatatgtttgtaaatacagaagtgaaatgtggacataaaatagttacgctatttggttaatggtactagacaacatgtaattaatgacattcaaaaatttatggctagtgatatatataaagtaaaattttctttgcagtaaaatatgccctttattatagaagggaggatataaggaaccaacagtttgtatgaaaatagctcaaataatatcttttattttgattttaatatttcttattttggtttattagtgtcttagaacaaaatggccttatataatgaagcctagttatgctggactgttttgatctcttttaattgttctgacagatagttggggatgagagccgaataaggtttgcctgaaataactgacactatataatttctgctttggcaaatactaagttctaacttgtcattcctggtagaacaagctttatttttcgagcctagcaatgatctagaagcagatgttatctcagtgccttttgcaatttgtgtgtgggtttttttttttaaaagccacacaataattttgggaaaacaatgtttgggtagaacatgtgtctgttaattgcacacaaaaccacttttaatgggtacagagttaaatttgaaggaataaagcattattggagttcataatactgaagctagaaccaagcagaatctgtttttttctgaggagtatcggtagcataaatgtgattataaacatagtacacttgatatatggaggcagtgacagctatttttacaaaatttaaatctgcaaatggattcaacatgtttatgggttattaaaattgtctgatttcttaggttctttatagtacacgtgttgaaaataaatgattaagaattgtttcaagaatgcaattatttgatcttaaatttttatgagttgttaaaatagaaattatttgaatatcatatatttgggtaacaaaaggcacaagtctgaatgtgtttctttttctggaatggccatgcctgcccactttagaaatacaaatatcactgggcagcttgaagcagttgggagcctccaatgagagcaacttgagagaatgatgttgcaagttagtaggagtaagaaatgctgtgttctccctgtcttctcttaggtcacatggcagcctggcctaagtgatcgtgaatggtctataagggaggtagctgggacagggaggggagtttgggctagccaccgtaccacttgtcagcgtgaaaagtaagattgtaattgcctgtttagttttctgcctcatctttgaaagttccaccaagctgggaacctcttgattgtgatgcacaaatgtaagtacatcagaaaaaaacaaaaaaactggctttaaagcaggagcttgtgggcccctaagccagacggggactagctttggcattatataattaagattttttaaatccttaataagggttttattttatttttatttattttttgagacggagtcttgctctgtggctcaggctggagtacagtggtgcaatcttggctcactgcaacctctgcctcctggctgtgttcaagtggttctgcttcagcctcccaagtagctggggttagagcaccctgtcaccacgccccgctaattttgtatttctagcagagatgaagtttcactatgttggccaggctgggctcaaactcctgacctcaagtgatctgcccgccttggccccccaaagtgctgtgattacaggcgtgagccaccacgcccagcctaataagggttttaaagataattagtgtgtaggtctgtaggcttatgatggtaaccacaagttgttaatggcattgtgaaaagtttttagttgcgctttatgggtggatgctgaattacattttgatttgatacttataaaaagaaaaagtatttcttcagcttaaaaaattgtttaaaagtttgtgatcatattgtctaccatgtagccagctttcaattatatgtaagagggactttttgacatttacaaataatactttgaggtagatatctgaaagcaccagcacttggaaggtgttcagaagtaacaaattataaaatgagctaacaaacgaaaggcaaaataaaaccgtaaagcaagcagatgggaggcgtgttcagtaacttattcataatgcatctgaaatgattgctgtactcaaatatttaacgttagagtaatagtattttgaatgaaaaccatagttgattgtctttagagagaggagtggtactgaaacatacttgaattcgtattgctttcctttaaagct

SEQ ID NO: 374383 - DNA, 4214 bp, Homo sapiens
  misc_feature (19)..(21): n is a, c, g, or t
  misc_feature (44)..(45): n is a, c, g, or t
tccgaaccccgtccccggnnnttttattgggggaaacccacccnngtccggcccggtgttcctggggacccgcttgtggcccggtgcctaacctactggcgcccggcgcccacacggaatggtttaaaaaccttttccagggcccaagccccccacaaatttttttttttttttttttttttgagacagagtcttgctccatcacccatgctagagtgcagtggagtgatctcggctcactgcaacttccgccttctgggttcaagctattctcctgcctcagccttccaagtaactgggattacaggcatgtaccaccataccagctgatttttttgtatttttagtaaagacagggtttcaccatgttagccaggctgatcttgaactcctaaactcaagtgatctactcacctcagcctccccaaatgctgggattacagatgtgaggcacctggcctcagatttttgatactcttaaaccttctgatccttagtttctctctcccaaatactctttctaggttaaaaaaaaaaggctcttatatttggtgctatgtaaatgaaaatgttttttaggttttcttgatttaacaatagagacagggtctccctgtgttgcccaggctggtctcgaactcctgggctcaagagatcctcctgtcttggcctcgcaaagtgctaagtaggattacaggcgttagccaccacacccggctgtaaaaatgtacttattctccagcctcttttgtataaaccatagtaagggatgggagtaatgatgttatctgtgaaaatagccaccatttacccgtaagacaaaacttgttaaagcctcctgagtctaacctagattacatcaggccctttttcacacacaaaaaaatcctttatgggatttaatggaatctgttgtttccccctaagttgaaaaacaactctaagacactttaaagtaccttcttggcctgggttacatggttcccagcctaggtttcagacttttgcttaaggccagttttagaaacccgtgaattcagaaaagttaattcagaaatttgataaacagaattgttatttaaaaactaactggaaagattgttaagttctttctgaattattcagaaattatgcatcattttccttcaagaatgacagggtcagcatgtggaattccaagatacctcttgacttcctctcaagctccgtgtttggtcagtggaggcccatccgagctcagcactgagaagtgttagtttctttgggacccatctaccctgaccacatcatgatgttcatctgcagctgttgcaaggtgttcagattgtataaacataaatgtcacaaaaactttaaaagaagtgcaattctcaaaaggttaggtggactaaagcattctgtaaagcaactgctaataatgagcttacagtggatttgaatttgaaaaatatagtaacaagcctgtcaaatatctgcaagaactatggaataaaactactgatgcagtgaagacagttgaaaagatcaaacaaatgccaagctatatttataatgaacaaattcaagaaaaaggactacggaaagttcaggacatcaaagaagtcaggcaaaactcatcttgacccctgttgcaggcaaaggaacgcagctggaagaaaagatgatataacagttaacaggatgcagacatggcagaggtttcctaaaaatctcattatctataaccatttctatatttacatttgaaaatctcctttggagacttagaacctctaaattattgacttattttttatataaggtcactccgatgaaaggtgattacaaaatcatctacattgctgtctacaaaaacagataatatggatgtttgatcgcatctcattgttaactctttactgatatgtttgtaaatacagaagtgaaatgtggacataaaatagttacgctatttggttaatggtactagacaacatgtaattaatgacattcaaaaatttatggctagtgatatatataaagtaaaattttctttgcagtaaaatatgccctttattatagaagggaggatataaggaaccaacagtttgtatgaaaatagctcaaataatatcttttattttgattttaatatttcttattttggtttattagtgtcttagaacaaaatggccttatataatgaagcctagttatgctggactgttttgatctcttttaattgttctgacagatagttggggatgagagccgaataaggtttgcctgaaataactgacactatataatttctgctttggcaaatactaagttctaacttgtcattcctggtagaacaagctttatttttcgagcctagcaatgatctagaagcagatgttatctcagtgccttttgcaatttgtgtgtgggtttttttttttaaaagccacacaataattttgggaaaacaatgtttgggtagaacatgtgtctgttaattgcacacaaaaccacttttaatgggtacagagttaaatttgaaggaataagttctagctgaagtattgtgaactagcattattggagttcataatactgaagctagaaccaagcagaatctgtttttttctgaggagtatcggtagcataaatgtgattataaacatagtacacttgatatatggaggcagtgacagctatttttacaaaatttaaatctgcaaatggattcaacatgtttatgggttattaaaattgtctgatttcttaggttctttatagtacacgtgttgaaaataaatgattaagaattgtttcaagaatgcaattatttgatcttaaatttttatgagttgttaaaatagaaattatttgaatatcatatatttgggtaacaaaaggcacaagtctgaatgtgtttctttttctggaatggccatgcctgcccactttagaaatacaaatatcactgggcagcttgaagcagttgggagcctccaatgagagcaacttgagagaatgatgttgcaagttagtaggagtaagaaatgctgtgttctccctgtcttctcttaggtcacatggcagcctggcctaagtgatcgtgaatggtctataagggaggtagctgggacagggaggggagtttgggctagccaccgtaccacttgtcagcgtgaaaagtaagattgtaattgcctgtttagttttctgcctcatctttgaaagttccaccaagctgggaacctcttgattgtgatgcacaaatgtaagtacatcagaaaaaaacaaaaaaactggctttaaagcaggagcttgtgggcccctaagccagacggggactagctttggcattatataattaagattttttaaatccttaataagggttttattttatttttatttattttttgagacggagtcttgctctgtggctcaggctggagtacagtggtgcaatcttggctcactgcaacctctgcctcctggctgtgttcaagtggttctgcttcagcctcccaagtagctggggttagagcaccctgtcaccacgccccgctaattttgtatttctagcagagatgaagtttcactatgttggccaggctgggctcaaactcctgacctcaagtgatctgcccgccttggccccccaaagtgctgtgattacaggcgtgagccaccacgcccagcctaataagggttttaaagataattagtgtgtaggtctgtaggcttatgatggtaaccacaagttgttaatggcattgtgaaaagtttttagttgcgctttatgggtggatgctgaattacattttgatttgatacttataaaaagaaaaagtatttcttcagcttaaaaaattgtttaaaagtttgtgatcatattgtctaccatgtagccagctttcaattatatgtaagagggactttttgacatttacaaataatactttgaggtagatatctgaaagcaccagcacttggaaggtgttcagaagtaacaaattataaaatgagctaacaaacgaaaggcaaaataaaaccgtaaagcaagcagatgggaggcgtgttcagtaacttattcataatgcatctgaaatgattgctgtactcaaatatttaacgttagagtaatagtattttgaatgaaaaccatagttgattgtctttagagagaggagtggtactgaaacatacttgaattcgtattgctttcctttaaagct

SEQ ID NO: 374384 - DNA, 3655 bp, Homo sapiens
ccggggcggacggagtcctgggacccacaaccccgaccacacagcagtcacagcagctgtagccggcgcgcagacgtaacacaaaagtcacaaactgacagacggcaccccacgcggggtggactaaagcattctgtaaagcaactgctaataatgagcttacagtggatttgaatttgaaaaatatagtaacaagcctgtcaaatatctgcaagaactatggaataaaactactgatgcagtgaagacagttgaaaagatcaaacaaatgccaagctatatttataatgaacaaattcaagaaaaaggactacggaaagttcaggacatcaaagaagtcaggcaaaactcatcttgacccctgttgcaggcaaaggaacgcagctggaagaaaagatgatataacagttaacaggatgcagacatggcagaggtttcctaaaaatctcattatctataaccatttctatatttacatttgaaaatctcctttggagacttagaacctctaaattattgacttattttttatataaggtcactccgatgaaaggtgattacaaaatcatctacattgctgtctacaaaaacagataatatggatgtttgatcgcatctcattgttaactctttactgatatgtttgtaaatacagaagtgaaatgtggacataaaatagttacgctatttggttaatggtactagacaacatgtaattaatgacattcaaaaatttatggctagtgatatatataaagtaaaattttctttgcagtaaaatatgccctttattatagaagggaggatataaggaaccaacagtttgtatgaaaatagctcaaataatatcttttattttgattttaatatttcttattttggtttattagtgtcttagaacaaaatggccttatataatgaagcctagttatgctggactgttttgatctcttttaattgttctgacagatagttggggatgagagccgaataaggtttgcctgaaataactgacactatataatttctgctttggcaaatactaagttctaacttgtcattcctggtagaacaagctttatttttcgagcctagcaatgatctagaagcagatgttatctcagtgccttttgcaatttgtgtgtgggtttttttttttaaaagccacacaataattttgggaaaacaatgtttgggtagaacatgtgtctgttaattgcacacaaaaccacttttaatgggtacagagttaaatttgaaggaataagttctagctgaagtattgtgaactccaaataatgctttgaggacctccaaaggtaaaagtactaatccctttggccatttattgagagagagagagagagagagtagggtgactatagttaatgtattgaatgttcttgctacaaataaatgatatttgagctgatgggtgtgctaattacactgatttgatcaatacccattgtatgtgaaacagtacatacaccatatttacaattatgtatttaacatttaaaatttctaatataagtatctctcaaactgtggattaacttcttgatttatatttaaatatgaatcttaagcaaaacagtgaaaataaccatcttgatttagtgtttttctcccatatgtgaattgtatatacttaggtgaggacaataaaatcaactgaactgtaagcttagaataggactgaggtaattctgcacagcaactttactaatggtacattgttgcttcaaaactctctctctctctctctgtctgtctcaataaatggccaaagggattagtagtttacctgtggaggtcctccaagcattatttggagttgataatacttcagctacaaccaagcagaatctcttttttttggaggtcctcgaagcattatttggagttgataatacttcagcttcaatttggagttgataatatttcagctagaacctagtagaatctgtttttttcctttggaggtcctcaaagcattattggagttcataatactgaagctagaaccaagcagaatctgtttttttctgaggagtatcggtagcataaatgtgattataaacatagtacacttgatatatggaggcagtgacagctatttttacaaaatttaaatctgcaaatggattcaacatgtttatgggttattaaaattgtctgatttcttaggttctttatagtacacgtgttgaaaataaatgattaagaattgtttcaagaatgcaattatttgatcttaaatttttatgagttgttaaaatagaaattatttgaatatcatatatttgggtaacaaaaggcacaagtctgaatgtgtttctttttctggaatggccatgcctgcccactttagaaatacaaatatcactgggcagcttgaagcagttgggagcctccaatgagagcaacttgagagaatgatgttgcaagttagtaggagtaagaaatgctgtgttctccctgtcttctcttaggtcacatggcagcctggcctaagtgatcgtgaatggtctataagggaggtagctgggacagggaggggagtttgggctagccaccgtaccacttgtcagcgtgaaaagtaagattgtaattgcctgtttagttttctgcctcatctttgaaagttccaccaagctgggaacctcttgattgtgatgcacaaatgtaagtacatcagaaaaaaacaaaaaaactggctttaaagcaggagcttgtgggcccctaagccagacggggactagctttggcattatataattaagattttttaaatccttaataagggttttattttatttttatttattttttgagacggagtcttgctctgtggctcaggctggagtacagtggtgcaatcttggctcactgcaacctctgcctcctggctgtgttcaagtggttctgcttcagcctcccaagtagctggggttagagcaccctgtcaccacgccccgctaattttgtatttctagcagagatgaagtttcactatgttggccaggctgggctcaaactcctgacctcaagtgatctgcccgccttggccccccaaagtgctgtgattacaggcgtgagccaccacgcccagcctaataagggttttaaagataattagtgtgtaggtctgtaggcttatgatggtaaccacaagttgttaatggcattgtgaaaagtttttagttgcgctttatgggtggatgctgaattacattttgatttgatacttataaaaagaaaaagtatttcttcagcttaaaaaattgtttaaaagtttgtgatcatattgtctaccatgtagccagctttcaattatatgtaagagggactttttgacatttacaaataatactttgaggtagatatctgaaagcaccagcacttggaaggtgttcagaagtaacaaattataaaatgagctaacaaacgaaaggcaaaataaaaccgtaaagcaagcagatgggaggcgtgttcagtaacttattcataatgcatctgaaatgattgctgtactcaaatatttaacgttagagtaatagtattttgaatgaaaaccatagttgattgtctttagagagaggagtggtactgaaacatacttgaattcgtattgctttcctttaaagct

SEQ ID NO: 374385 - DNA, 3402 bp, Homo sapiens
  misc_feature (25)..(25): n is a, c, g, or t
gatgaagcttcttcatgaagtaaanaatgtatttaaaagaaaattcaagaaaaaggactacggaaagttcaggacatcaaagaagtcaggcaaaactcatcttgacccctgttgcaggcaaaggaacgcagctggaagaaaagatgatataacagttaacaggatgcagacatggcagaggtttcctaaaaatctcattatctataaccatttctatatttacatttgaaaatctcctttggagacttagaacctctaaattattgacttattttttatataaggtcactccgatgaaaggtgattacaaaatcatctacattgctgtctacaaaaacagataatatggatgtttgatcgcatctcattgttaactctttactgatatgtttgtaaatacagaagtgaaatgtggacataaaatagttacgctatttggttaatggtactagacaacatgtaattaatgacattcaaaaatttatggctagtgatatatataaagtaaaattttctttgcagtaaaatatgccctttattatagaagggaggatataaggaaccaacagtttgtatgaaaatagctcaaataatatcttttattttgattttaatatttcttattttggtttattagtgtcttagaacaaaatggccttatataatgaagcctagttatgctggactgttttgatctcttttaattgttctgacagatagttggggatgagagccgaataaggtttgcctgaaataactgacactatataatttctgctttggcaaatactaagttctaacttgtcattcctggtagaacaagctttatttttcgagcctagcaatgatctagaagcagatgttatctcagtgccttttgcaatttgtgtgtgggtttttttttttaaaagccacacaataattttgggaaaacaatgtttgggtagaacatgtgtctgttaattgcacacaaaaccacttttaatgggtacagagttaaatttgaaggaataagttctagctgaagtattgtgaactccaaataatgctttgaggacctccaaaggtaaaagtactaatccctttggccatttattgagagagagagagagagagagtagggtgactatagttaatgtattgaatgttcttgctacaaataaatgatatttgagctgatgggtgtgctaattacactgatttgatcaatacccattgtatgtgaaacagtacatacaccatatttacaattatgtatttaacatttaaaatttctaatataagtatctctcaaactgtggattaacttcttgatttatatttaaatatgaatcttaagcaaaacagtgaaaataaccatcttgatttagtgtttttctcccatatgtgaattgtatatacttaggtgaggacaataaaatcaactgaactgtaagcttagaataggactgaggtaattctgcacagcaactttactaatggtacattgttgcttcaaaactctctctctctctctctgtctgtctcaataaatggccaaagggattagtagtttacctgtggaggtcctccaagcattatttggagttgataatacttcagctacaaccaagcagaatctcttttttttggaggtcctcgaagcattatttggagttgataatacttcagcttcaatttggagttgataatatttcagctagaacctagtagaatctgtttttttcctttggaggtcctcaaagcattattggagttcataatactgaagctagaaccaagcagaatctgtttttttctgaggagtatcggtagcataaatgtgattataaacatagtacacttgatatatggaggcagtgacagctatttttacaaaatttaaatctgcaaatggattcaacatgtttatgggttattaaaattgtctgatttcttaggttctttatagtacacgtgttgaaaataaatgattaagaattgtttcaagaatgcaattatttgatcttaaatttttatgagttgttaaaatagaaattatttgaatatcatatatttgggtaacaaaaggcacaagtctgaatgtgtttctttttctggaatggccatgcctgcccactttagaaatacaaatatcactgggcagcttgaagcagttgggagcctccaatgagagcaacttgagagaatgatgttgcaagttagtaggagtaagaaatgctgtgttctccctgtcttctcttaggtcacatggcagcctggcctaagtgatcgtgaatggtctataagggaggtagctgggacagggaggggagtttgggctagccaccgtaccacttgtcagcgtgaaaagtaagattgtaattgcctgtttagttttctgcctcatctttgaaagttccaccaagctgggaacctcttgattgtgatgcacaaatgtaagtacatcagaaaaaaacaaaaaaactggctttaaagcaggagcttgtgggcccctaagccagacggggactagctttggcattatataattaagattttttaaatccttaataagggttttattttatttttatttattttttgagacggagtcttgctctgtggctcaggctggagtacagtggtgcaatcttggctcactgcaacctctgcctcctggctgtgttcaagtggttctgcttcagcctcccaagtagctggggttagagcaccctgtcaccacgccccgctaattttgtatttctagcagagatgaagtttcactatgttggccaggctgggctcaaactcctgacctcaagtgatctgcccgccttggccccccaaagtgctgtgattacaggcgtgagccaccacgcccagcctaataagggttttaaagataattagtgtgtaggtctgtaggcttatgatggtaaccacaagttgttaatggcattgtgaaaagtttttagttgcgctttatgggtggatgctgaattacattttgatttgatacttataaaaagaaaaagtatttcttcagcttaaaaaattgtttaaaagtttgtgatcatattgtctaccatgtagccagctttcaattatatgtaagagggactttttgacatttacaaataatactttgaggtagatatctgaaagcaccagcacttggaaggtgttcagaagtaacaaattataaaatgagctaacaaacgaaaggcaaaataaaaccgtaaagcaagcagatgggaggcgtgttcagtaacttattcataatgcatctgaaatgattgctgtactcaaatatttaacgttagagtaatagtattttgaatgaaaaccatagttgattgtctttagagagaggagtggtactgaaacatacttgaattcgtattgctttcctttaaagct

SEQ ID NO: 374386 - DNA, 3680 bp, Homo sapiens
  misc_feature (19)..(21): n is a, c, g, or t
  misc_feature (44)..(45): n is a, c, g, or t
tccgaaccccgtccccggnnnttttattgggggaaacccacccnngtccggcccggtgttcctggggacccgcttgtggcccggtgcctaacctactggcgcccggcgcccacacggaatggtttaaaaaccttttccagggcccaagccccccacaaatttttttttttttttttttttttgagacagagtcttgctccatcacccatgctagagtgcagtggagtgatctcggctcactgcaacttccgccttctgggttcaagctattctcctgcctcagccttccaagtaactgggattacaggcatgtaccaccataccagctgatttttttgtatttttagtaaagacagggtttcaccatgttagccaggctgatcttgaactcctaaactcaagtgatctactcacctcagcctccccaaatgctgggattacagatgtgaggcacctggcctcagatttttgatactcttaaaccttctgatccttagtttctctctcccaaatactctttctaggttaaaaaaaaaaggctcttatatttggtgctatgtaaatgaaaatgttttttaggttttcttgatttaacaatagagacagggtctccctgtgttgcccaggctggtctcgaactcctgggctcaagagatcctcctgtcttggcctcgcaaagtgctaagtaggattacaggcgttagccaccacacccggctgtaaaaatgtacttattctccagcctcttttgtataaaccatagtaagggatgggagtaatgatgttatctgtgaaaatagccaccatttacccgtaagacaaaacttgttaaagcctcctgagtctaacctagattacatcaggccctttttcacacacaaaaaaatcctttatgggatttaatggaatctgttgtttccccctaagttgaaaaacaactctaagacactttaaagtaccttcttggcctgggttacatggttcccagcctaggtttcagacttttgcttaaggccagttttagaaacccgtgaattcagaaaagttaattcagaaatttgataaacagaattgttatttaaaaactaactggaaagattgttaagttctttctgaattattcagaaattatgcatcattttccttcaagaatgacagggtcagcatgtggaattccaagatacctcttgacttcctctcaagctccgtgtttggtcagtggaggcccatccgagctcagcactgagaagtgttagtttctttgggacccatctaccctgaccacatcatgatgttcatctgcagctgttgcaaggtgttcagattgtataaacataaatgtcacaaaaactttaaaagaagtgcaattctcaaaaggttaggtggactaaagcattctgtaaagcaactgctaataatgagcttacagtggatttgaatttgaaaaatatagtaacaagcctgtcaaatatctgcaagaactatggaataaaactactgatgcagtgaagacagttgaaaagatcaaacaaatgccaagctatatttataatgaacaaattcaagaaaaaggactacggaaagttcaggacatcaaagaagtcaggcaaaactcatcttgacccctgttgcaggcaaaggaacgcagctggaagaaaagatgatataacagttaacaggatgcagacatggcagaggtttcctaaaaatctcattatctataaccatttctatatttacatttgaaaatctcctttggagacttagaacctctaaattattgacttattttttatataaggtcactccgatgaaaggtgattacaaaatcatctacattgctgtcctccaagcattatttggagttgataatacttcagctacaaccaagcagaatctcttttttttggaggtcctcgaagcattatttggagttgataatacttcagcttcaatttggagttgataatatttcagctagaacctagtagaatctgtttttttcctttggaggtcctcaaagcattattggagttcataatactgaagctagaaccaagcagaatctgtttttttctgaggagtatcggtagcataaatgtgattataaacatagtacacttgatatatggaggcagtgacagctatttttacaaaatttaaatctgcaaatggattcaacatgtttatgggttattaaaattgtctgatttcttaggttctttatagtacacgtgttgaaaataaatgattaagaattgtttcaagaatgcaattatttgatcttaaatttttatgagttgttaaaatagaaattatttgaatatcatatatttgggtaacaaaaggcacaagtctgaatgtgtttctttttctggaatggccatgcctgcccactttagaaatacaaatatcactgggcagcttgaagcagttgggagcctccaatgagagcaacttgagagaatgatgttgcaagttagtaggagtaagaaatgctgtgttctccctgtcttctcttaggtcacatggcagcctggcctaagtgatcgtgaatggtctataagggaggtagctgggacagggaggggagtttgggctagccaccgtaccacttgtcagcgtgaaaagtaagattgtaattgcctgtttagttttctgcctcatctttgaaagttccaccaagctgggaacctcttgattgtgatgcacaaatgtaagtacatcagaaaaaaacaaaaaaactggctttaaagcaggagcttgtgggcccctaagccagacggggactagctttggcattatataattaagattttttaaatccttaataagggttttattttatttttatttattttttgagacggagtcttgctctgtggctcaggctggagtacagtggtgcaatcttggctcactgcaacctctgcctcctggctgtgttcaagtggttctgcttcagcctcccaagtagctggggttagagcaccctgtcaccacgccccgctaattttgtatttctagcagagatgaagtttcactatgttggccaggctgggctcaaactcctgacctcaagtgatctgcccgccttggccccccaaagtgctgtgattacaggcgtgagccaccacgcccagcctaataagggttttaaagataattagtgtgtaggtctgtaggcttatgatggtaaccacaagttgttaatggcattgtgaaaagtttttagttgcgctttatgggtggatgctgaattacattttgatttgatacttataaaaagaaaaagtatttcttcagcttaaaaaattgtttaaaagtttgtgatcatattgtctaccatgtagccagctttcaattatatgtaagagggactttttgacatttacaaataatactttgaggtagatatctgaaagcaccagcacttggaaggtgttcagaagtaacaaattataaaatgagctaacaaacgaaaggcaaaataaaaccgtaaagcaagcagatgggaggcgtgttcagtaacttattcataatgcatctgaaatgattgctgtactcaaatatttaacgttagagtaatagtattttgaatgaaaaccatagttgattgtctttagagagaggagtggtactgaaacatacttgaattcgtattgctttcctttaaagct

SEQ ID NO: 374387 - DNA, 1932 bp, Homo sapiens
  misc_feature (19)..(21): n is a, c, g, or t
  misc_feature (44)..(45): n is a, c, g, or t
tccgaaccccgtccccggnnnttttattgggggaaacccacccnngtccggcccggtgttcctggggacccgcttgtggcccggtgcctaacctactggcgcccggcgcccacacggaatggtttaaaaaccttttccagggcccaagccccccacaaatttttttttttttttttttttttgagacagagtcttgctccatcacccatgctagagtgcagtggagtgatctcggctcactgcaacttccgccttctgggttcaagctattctcctgcctcagccttccaagtaactgggattacaggcatgtaccaccataccagctgatttttttgtatttttagtaaagacagggtttcaccatgttagccaggctgatcttgaactcctaaactcaagtgatctactcacctcagcctccccaaatgctgggattacagatgtgaggcacctggcctcagatttttgatactcttaaaccttctgatccttagtttctctctcccaaatactctttctaggttaaaaaaaaaaggctcttatatttggtgctatgtaaatgaaaatgttttttaggttttcttgatttaacaatagagacagggtctccctgtgttgcccaggctggtctcgaactcctgggctcaagagatcctcctgtcttggcctcgcaaagtgctaagtaggattacaggcgttagccaccacacccggctgtaaaaatgtacttattctccagcctcttttgtataaaccatagtaagggatgggagtaatgatgttatctgtgaaaatagccaccatttacccgtaagacaaaacttgttaaagcctcctgagtctaacctagattacatcaggccctttttcacacacaaaaaaatcctttatgggatttaatggaatctgttgtttccccctaagttgaaaaacaactctaagacactttaaagtaccttcttggcctgggttacatggttcccagcctaggtttcagacttttgcttaaggccagttttagaaacccgtgaattcagaaaagttaattcagaaatttgataaacagaattgttatttaaaaactaactggaaagattgttaagttctttctgaattattcagaaattatgcatcattttccttcaagaatgacagggtcagcatgtggaattccaagatacctcttgacttcctctcaagctccgtgtttggtcagtggaggcccatccgagctcagcactgagaagtgttagtttctttgggacccatctaccctgaccacatcatgatgttcatctgcagctgttgcaaggtgttcagattgtataaacataaatgtcacaaaaactttaaaagaagtgcaattctcaaaaggttaggtggactaaagcattctgtaaagcaactgctaataatgagcttacagtggatttgaatttgaaaaatatagtaacaagcctgtcaaatatctgcaagaactatggaataaaactactgatgcagtgaagacagttgaaaagatcaaacaaatgccaagctatatttataatgaacaaattcaagaaaaaggactacggaaagttcaggacatcaaagaagtcaggcaaaactcatcttgacccctgttgcaggcaaaggaacgcagctggaagaaaagatgatataacagttaacaggatgcagacatggcagaggtttcctaaaaatctcattatctataaccatttctatatttacatttgaaaatctcctttggagacttagaacctctaaattattgacttattttttatataaggtcactccgatgaaaggtgattacaaaatcatctacattgctgtctacaaaaacagataatatggatgtttgatcgcatctcattgttaactctttactgatatgtttgtaaatacagaagtgaaatgtgg

SEQ ID NO: 374388 - DNA, 2576 bp, Homo sapiens
ccggtaccgcagctgctcccatcagagaagcagatgttatctcagtgccttttgcaatttgtgtgtgggtttttttttttaaaagccacacaataattttgggaaaacaatgtttgggtagaacatgtgtctgttaattgcacacaaaaccacttttaatgggtacagagttaaatttgaaggaataagttctagctgaagtattgtgaactccaaataatgctttgaggacctccaaaggtaaaagtactaatccctttggccatttattgagagagagagagagagagagtagggtgactatagttaatgtattgaatgttcttgctacaaataaatgatatttgagctgatgggtgtgctaattacactgatttgatcaatacccattgtatgtgaaacagtacatacaccatatttacaattatgtatttaacatttaaaatttctaatataagtatctctcaaactgtggattaacttcttgatttatatttaaatatgaatcttaagcaaaacagtgaaaataaccatcttgatttagtgtttttctcccatatgtgaattgtatatacttaggtgaggacaataaaatcaactgaactgtaagcttagaataggactgaggtaattctgcacagcaactttactaatggtacattgttgcttcaaaactctctctctctctctctgtctgtctcaataaatggccaaagggattagtagtttacctgtggaggtcctccaagcattatttggagttgataatacttcagctacaaccaagcagaatctcttttttttggaggtcctcgaagcattatttggagttgataatacttcagcttcaatttggagttgataatatttcagctagaacctagtagaatctgtttttttcctttggaggtcctcaaagcattattggagttcataatactgaagctagaaccaagcagaatctgtttttttctgaggagtatcggtagcataaatgtgattataaacatagtacacttgatatatggaggcagtgacagctatttttacaaaatttaaatctgcaaatggattcaacatgtttatgggttattaaaattgtctgatttcttaggttctttatagtacacgtgttgaaaataaatgattaagaattgtttcaagaatgcaattatttgatcttaaatttttatgagttgttaaaatagaaattatttgaatatcatatatttgggtaacaaaaggcacaagtctgaatgtgtttctttttctggaatggccatgcctgcccactttagaaatacaaatatcactgggcagcttgaagcagttgggagcctccaatgagagcaacttgagagaatgatgttgcaagttagtaggagtaagaaatgctgtgttctccctgtcttctcttaggtcacatggcagcctggcctaagtgatcgtgaatggtctataagggaggtagctgggacagggaggggagtttgggctagccaccgtaccacttgtcagcgtgaaaagtaagattgtaattgcctgtttagttttctgcctcatctttgaaagttccaccaagctgggaacctcttgattgtgatgcacaaatgtaagtacatcagaaaaaaacaaaaaaactggctttaaagcaggagcttgtgggcccctaagccagacggggactagctttggcattatataattaagattttttaaatccttaataagggttttattttatttttatttattttttgagacggagtcttgctctgtggctcaggctggagtacagtggtgcaatcttggctcactgcaacctctgcctcctggctgtgttcaagtggttctgcttcagcctcccaagtagctggggttagagcaccctgtcaccacgccccgctaattttgtatttctagcagagatgaagtttcactatgttggccaggctgggctcaaactcctgacctcaagtgatctgcccgccttggccccccaaagtgctgtgattacaggcgtgagccaccacgcccagcctaataagggttttaaagataattagtgtgtaggtctgtaggcttatgatggtaaccacaagttgttaatggcattgtgaaaagtttttagttgcgctttatgggtggatgctgaattacattttgatttgatacttataaaaagaaaaagtatttcttcagcttaaaaaattgtttaaaagtttgtgatcatattgtctaccatgtagccagctttcaattatatgtaagagggactttttgacatttacaaataatactttgaggtagatatctgaaagcaccagcacttggaaggtgttcagaagtaacaaattataaaatgagctaacaaacgaaaggcaaaataaaaccgtaaagcaagcagatgggaggcgtgttcagtaacttattcataatgcatctgaaatgattgctgtactcaaatatttaacgttagagtaatagtattttgaatgaaaaccatagttgattgtctttagagagaggagtggtactgaaacatacttgaattcgtattgctttcctttaaagct

SEQ ID NO: 374389 - DNA, 1927 bp, Homo sapiens
cccgtatgttatccccaacacccaaatctctctctctctctctgtctgtctcaataaatggccaaagggattagtagtttacctgtggaggtcctccaagcattatttggagttgataatacttcagctacaaccaagcagaatctcttttttttggaggtcctcgaagcattatttggagttgataatacttcagcttcaatttggagttgataatatttcagctagaacctagtagaatctgtttttttcctttggaggtcctcaaagcattattggagttcataatactgaagctagaaccaagcagaatctgtttttttctgaggagtatcggtagcataaatgtgattataaacatagtacacttgatatatggaggcagtgacagctatttttacaaaatttaaatctgcaaatggattcaacatgtttatgggttattaaaattgtctgatttcttaggttctttatagtacacgtgttgaaaataaatgattaagaattgtttcaagaatgcaattatttgatcttaaatttttatgagttgttaaaatagaaattatttgaatatcatatatttgggtaacaaaaggcacaagtctgaatgtgtttctttttctggaatggccatgcctgcccactttagaaatacaaatatcactgggcagcttgaagcagttgggagcctccaatgagagcaacttgagagaatgatgttgcaagttagtaggagtaagaaatgctgtgttctccctgtcttctcttaggtcacatggcagcctggcctaagtgatcgtgaatggtctataagggaggtagctgggacagggaggggagtttgggctagccaccgtaccacttgtcagcgtgaaaagtaagattgtaattgcctgtttagttttctgcctcatctttgaaagttccaccaagctgggaacctcttgattgtgatgcacaaatgtaagtacatcagaaaaaaacaaaaaaactggctttaaagcaggagcttgtgggcccctaagccagacggggactagctttggcattatataattaagattttttaaatccttaataagggttttattttatttttatttattttttgagacggagtcttgctctgtggctcaggctggagtacagtggtgcaatcttggctcactgcaacctctgcctcctggctgtgttcaagtggttctgcttcagcctcccaagtagctggggttagagcaccctgtcaccacgccccgctaattttgtatttctagcagagatgaagtttcactatgttggccaggctgggctcaaactcctgacctcaagtgatctgcccgccttggccccccaaagtgctgtgattacaggcgtgagccaccacgcccagcctaataagggttttaaagataattagtgtgtaggtctgtaggcttatgatggtaaccacaagttgttaatggcattgtgaaaagtttttagttgcgctttatgggtggatgctgaattacattttgatttgatacttataaaaagaaaaagtatttcttcagcttaaaaaattgtttaaaagtttgtgatcatattgtctaccatgtagccagctttcaattatatgtaagagggactttttgacatttacaaataatactttgaggtagatatctgaaagcaccagcacttggaaggtgttcagaagtaacaaattataaaatgagctaacaaacgaaaggcaaaataaaaccgtaaagcaagcagatgggaggcgtgttcagtaacttattcataatgcatctgaaatgattgctgtactcaaatatttaacgttagagtaatagtattttgaatgaaaaccatagttgattgtctttagagagaggagtggtactgaaacatacttgaattcgtattgctttcctttaaagct

SEQ ID NO: 374390 - DNA, 1094 bp, Homo sapiens
  misc_feature (19)..(21): n is a, c, g, or t
  misc_feature (44)..(45): n is a, c, g, or t
tccgaaccccgtccccggnnnttttattgggggaaacccacccnngtccggcccggtgttcctggggacccgcttgtggcccggtgcctaacctactggcgcccggcgcccacacggaatggtttaaaaaccttttccagggcccaagccccccacaaatttttttttttttttttttttttgagacagagtcttgctccatcacccatgctagagtgcagtggagtgatctcggctcactgcaacttccgccttctgggttcaagctattctcctgcctcagccttccaagtaactgggattacaggcatgtaccaccataccagctgatttttttgtatttttagtaaagacagggtttcaccatgttagccaggctgatcttgaactcctaaactcaagtgatctactcacctcagcctccccaaatgctgggattacagatgtgaggcacctggcctcagatttttgatactcttaaaccttctgatccttagtttctctctcccaaatactctttctaggttaaaaaaaaaaggctcttatatttggtgctatgtaaatgaaaatgttttttaggttttcttgatttaacaatagagacagggtctccctgtgttgcccaggctggtctcgaactcctgggctcaagagatcctcctgtcttggcctcgcaaagtgctaagtaggattacaggcgttagccaccacacccggctgtaaaaatgtacttattctccagcctcttttgtataaaccatagtaagggatgggagtaatgatgttatctgtgaaaatagccaccatttacccgtaagacaaaacttgttaaagcctcctgagtctaacctagattacatcaggccctttttcacacacaaaaaaatcctttatgggatttaatggaatctgttgtttccccctaagttgaaaaacaactctaagacactttaaagtaccttcttggcctgggttacatggttcccagcctaggtttcagacttttgcttaaggccagactagtcttgaactcctgacctcaagcgatctacctacctcggcctttcaaagtcttttatttttggttaataact

SEQ ID NO: 374391 - DNA, 2058 bp, Homo sapiens
ggtacccccaaatgggatccctataatgaagcctagttatgctggactgttttgatctcttttaattgttctgacagatagttggggatgagagccgaataaggtttgcctgaaataactgacactatataatttctgctttggcaaatactaagttctaacttgtcattcctggtagaacaagctttatttttcgagcctagcaatgatctagaagcagatgttatctcagtgccttttgcaatttgtgtgtgggtttttttttttaaaagccacacaataattttgggaaaacaatgtttgggtagaacatgtgtctgttaattgcacacaaaaccacttttaatgggtacagagttaaatttgaaggaataagttctagctgaagtattgtgaactagcattattggagttcataatactgaagctagaaccaagcagaatctgtttttttctgaggagtatcggtagcataaatgtgattataaacatagtacacttgatatatggaggcagtgacagctatttttacaaaatttaaatctgcaaatggattcaacatgtttatgggttattaaaattgtctgatttcttaggttctttatagtacacgtgttgaaaataaatgattaagaattgtttcaagaatgcaattatttgatcttaaatttttatgagttgttaaaatagaaattatttgaatatcatatatttgggtaacaaaaggcacaagtctgaatgtgtttctttttctggaatggccatgcctgcccactttagaaatacaaatatcactgggcagcttgaagcagttgggagcctccaatgagagcaacttgagagaatgatgttgcaagttagtaggagtaagaaatgctgtgttctccctgtcttctcttaggtcacatggcagcctggcctaagtgatcgtgaatggtctataagggaggtagctgggacagggaggggagtttgggctagccaccgtaccacttgtcagcgtgaaaagtaagattgtaattgcctgtttagttttctgcctcatctttgaaagttccaccaagctgggaacctcttgattgtgatgcacaaatgtaagtacatcagaaaaaaacaaaaaaactggctttaaagcaggagcttgtgggcccctaagccagacggggactagctttggcattatataattaagattttttaaatccttaataagggttttattttatttttatttattttttgagacggagtcttgctctgtggctcaggctggagtacagtggtgcaatcttggctcactgcaacctctgcctcctggctgtgttcaagtggttctgcttcagcctcccaagtagctggggttagagcaccctgtcaccacgccccgctaattttgtatttctagcagagatgaagtttcactatgttggccaggctgggctcaaactcctgacctcaagtgatctgcccgccttggccccccaaagtgctgtgattacaggcgtgagccaccacgcccagcctaataagggttttaaagataattagtgtgtaggtctgtaggcttatgatggtaaccacaagttgttaatggcattgtgaaaagtttttagttgcgctttatgggtggatgctgaattacattttgatttgatacttataaaaagaaaaagtatttcttcagcttaaaaaattgtttaaaagtttgtgatcatattgtctaccatgtagccagctttcaattatatgtaagagggactttttgacatttacaaataatactttgaggtagatatctgaaagcaccagcacttggaaggtgttcagaagtaacaaattataaaatgagctaacaaacgaaaggcaaaataaaaccgtaaagcaagcagatgggaggcgtgttcagtaacttattcataatgcatctgaaatgattgctgtactcaaatatttaacgttagagtaatagtattttgaatgaaaaccatagttgattgtctttagagagaggagtggtactgaaacatacttgaattcgtattgctttcctttaaagct

SEQ ID NO: 374392 - DNA, 1686 bp, Homo sapiens
gtttccccccttccccaacaaagggccagcattattggagttcataatactgaagctagaaccaagcagaatctgtttttttctgaggagtatcggtagcataaatgtgattataaacatagtacacttgatatatggaggcagtgacagctatttttacaaaatttaaatctgcaaatggattcaacatgtttatgggttattaaaattgtctgatttcttaggttctttatagtacacgtgttgaaaataaatgattaagaattgtttcaagaatgcaattatttgatcttaaatttttatgagttgttaaaatagaaattatttgaatatcatatatttgggtaacaaaaggcacaagtctgaatgtgtttctttttctggaatggccatgcctgcccactttagaaatacaaatatcactgggcagcttgaagcagttgggagcctccaatgagagcaacttgagagaatgatgttgcaagttagtaggagtaagaaatgctgtgttctccctgtcttctcttaggtcacatggcagcctggcctaagtgatcgtgaatggtctataagggaggtagctgggacagggaggggagtttgggctagccaccgtaccacttgtcagcgtgaaaagtaagattgtaattgcctgtttagttttctgcctcatctttgaaagttccaccaagctgggaacctcttgattgtgatgcacaaatgtaagtacatcagaaaaaaacaaaaaaactggctttaaagcaggagcttgtgggcccctaagccagacggggactagctttggcattatataattaagattttttaaatccttaataagggttttattttatttttatttattttttgagacggagtcttgctctgtggctcaggctggagtacagtggtgcaatcttggctcactgcaacctctgcctcctggctgtgttcaagtggttctgcttcagcctcccaagtagctggggttagagcaccctgtcaccacgccccgctaattttgtatttctagcagagatgaagtttcactatgttggccaggctgggctcaaactcctgacctcaagtgatctgcccgccttggccccccaaagtgctgtgattacaggcgtgagccaccacgcccagcctaataagggttttaaagataattagtgtgtaggtctgtaggcttatgatggtaaccacaagttgttaatggcattgtgaaaagtttttagttgcgctttatgggtggatgctgaattacattttgatttgatacttataaaaagaaaaagtatttcttcagcttaaaaaattgtttaaaagtttgtgatcatattgtctaccatgtagccagctttcaattatatgtaagagggactttttgacatttacaaataatactttgaggtagatatctgaaagcaccagcacttggaaggtgttcagaagtaacaaattataaaatgagctaacaaacgaaaggcaaaataaaaccgtaaagcaagcagatgggaggcgtgttcagtaacttattcataatgcatctgaaatgattgctgtactcaaatatttaacgttagagtaatagtattttgaatgaaaaccatagttgattgtctttagagagaggagtggtactgaaacatacttgaattcgtattgctttcctttaaagct

SEQ ID NO: 374393 - DNA, 5059 bp, Homo sapiens
  misc_feature (1)..(1): n is a, c, g, or t
ncgtctcttgttgttgagttttgttcttctgtcgttgtttgtgttgttctttcggtttctctttgtttgtgttatttgctttttgtcctgcgccgcgcgggtggactacgatgtgctcgttagaccgtgagcgcccgaacccttgttttccagccgcgggcgcccgcttttttttgtggaaccccccccattccagaccggtttcttggacccttatggaccagtgtccatacctacttggtccgcgggccccacccgagtggtttaataccctctcgtggcccgcgccccccaaaatttttttttttttttttttttttttgagacagagtcttgctccatcacccatgctagagtgcagtggagtgatctcggctcactgcaacttccgccttctgggttcaagctattctcctgcctcagccttccaagtaactgggattacaggcatgtaccaccataccagctgatttttttgtatttttagtaaagacagggtttcaccatgttagccaggctgatcttgaactcctaaactcaagtgatctactcacctcagcctccccaaatgctgggattacagatgtgaggcacctggcctcagatttttgatactcttaaaccttctgatccttagtttctctctcccaaatactctttctaggttaaaaaaaaaaggctcttatatttggtgctatgtaaatgaaaatgttttttaggttttcttgatttaacaatagagacagggtctccctgtgttgcccaggctggtctcgaactcctgggctcaagagatcctcctgtcttggcctcgcaaagtgctaagtaggattacaggcgttagccaccacacccggctgtaaaaatgtacttattctccagcctcttttgtataaaccatagtaagggatgggagtaatgatgttatctgtgaaaatagccaccatttacccgtaagacaaaacttgttaaagcctcctgagtctaacctagattacatcaggccctttttcacacacaaaaaaatcctttatgggatttaatggaatctgttgtttccccctaagttgaaaaacaactctaagacactttaaagtaccttcttggcctgggttacatggttcccagcctaggtttcagacttttgcttaaggccagttttagaaacccgtgaattcagaaaagttaattcagaaatttgataaacagaattgttatttaaaaactaactggaaagattgttaagttctttctgaattattcagaaattatgcatcattttccttcaagaatgacagggtcagcatgtggaattccaagatacctcttgacttcctctcaagctccgtgtttggtcagtggaggcccatccgagctcagcactgagaagtgttagtttctttgggacccatctaccctgaccacatcatgatgttcatctgcagctgttgcaaggtgttcagattgtataaacataaatgtcacaaaaactttaaaagaagtgcaattctcaaaaggttaggtggactaaagcattctgtaaagcaactgctaataatgagcttacagtggatttgaatttgaaaaatatagtaacaagcctgtcaaatatctgcaagaactatggaataaaactactgatgcagtgaagacagttgaaaagatcaaacaaatgccaagctatatttataatgaacaaattcaagaaaaaggactacggaaagttcaggacatcaaagaagtcaggcaaaactcatcttgacccctgttgcaggcaaaggaacgcagctggaagaaaagatgatataacagttaacaggatgcagacatggcagaggtttcctaaaaatctcattatctataaccatttctatatttacatttgaaaatctcctttggagacttagaacctctaaattattgacttattttttatataaggtcactccgatgaaaggtgattacaaaatcatctacattgctgtctacaaaaacagataatatggatgtttgatcgcatctcattgttaactctttactgatatgtttgtaaatacagaagtgaaatgtggacataaaatagttacgctatttggttaatggtactagacaacatgtaattaatgacattcaaaaatttatggctagtgatatatataaagtaaaattttctttgcagtaaaatatgccctttattatagaagggaggatataaggaaccaacagtttgtatgaaaatagctcaaataatatcttttattttgattttaatatttcttattttggtttattagtgtcttagaacaaaatggccttatataatgaagcctagttatgctggactgttttgatctcttttaattgttctgacagatagttggggatgagagccgaataaggtttgcctgaaataactgacactatataatttctgctttggcaaatactaagttctaacttgtcattcctggtagaacaagctttatttttcgagcctagcaatgatctagaagcagatgttatctcagtgccttttgcaatttgtgtgtgggtttttttttttaaaagccacacaataattttgggaaaacaatgtttgggtagaacatgtgtctgttaattgcacacaaaaccacttttaatgggtacagagttaaatttgaaggaataagttctagctgaagtattgtgaactccaaataatgctttgaggacctccaaaggtaaaagtactaatccctttggccatttattgagagagagagagagagagagtagggtgactatagttaatgtattgaatgttcttgctacaaataaatgatatttgagctgatgggtgtgctaattacactgatttgatcaatacccattgtatgtgaaacagtacatacaccatatttacaattatgtatttaacatttaaaatttctaatataagtatctctcaaactgtggattaacttcttgatttatatttaaatatgaatcttaagcaaaacagtgaaaataaccatcttgatttagtgtttttctcccatatgtgaattgtatatacttaggtgaggacaataaaatcaactgaactgtaagcttagaataggactgaggtaattctgcacagcaactttactaatggtacattgttgcttcaaaactctctctctctctctctgtctgtctcaataaatggccaaagggattagtagtttacctgtggaggtcctccaagcattatttggagttgataatacttcagctacaaccaagcagaatctcttttttttggaggtcctcgaagcattatttggagttgataatacttcagcttcaatttggagttgataatatttcagctagaacctagtagaatctgtttttttcctttggaggtcctcaaagcattattggagttcataatactgaagctagaaccaagcagaatctgtttttttctgaggagtatcggtagcataaatgtgattataaacatagtacacttgatatatggaggcagtgacagctatttttacaaaatttaaatctgcaaatggattcaacatgtttatgggttattaaaattgtctgatttcttaggttctttatagtacacgtgttgaaaataaatgattaagaattgtttcaagaatgcaattatttgatcttaaatttttatgagttgttaaaatagaaattatttgaatatcatatatttgggtaacaaaaggcacaagtctgaatgtgtttctttttctggaatggccatgcctgcccactttagaaatacaaatatcactgggcagcttgaagcagttgggagcctccaatgagagcaacttgagagaatgatgttgcaagttagtaggagtaagaaatgctgtgttctccctgtcttctcttaggtcacatggcagcctggcctaagtgatcgtgaatggtctataagggaggtagctgggacagggaggggagtttgggctagccaccgtaccacttgtcagcgtgaaaagtaagattgtaattgcctgtttagttttctgcctcatctttgaaagttccaccaagctgggaacctcttgattgtgatgcacaaatgtaagtacatcagaaaaaaacaaaaaaactggctttaaagcaggagcttgtgggcccctaagccagacggggactagctttggcattatataattaagattttttaaatccttaataagggttttattttatttttatttattttttgagacggagtcttgctctgtggctcaggctggagtacagtggtgcaatcttggctcactgcaacctctgcctcctggctgtgttcaagtggttctgcttcagcctcccaagtagctggggttagagcaccctgtcaccacgccccgctaattttgtatttctagcagagatgaagtttcactatgttggccaggctgggctcaaactcctgacctcaagtgatctgcccgccttggccccccaaagtgctgtgattacaggcgtgagccaccacgcccagcctaataagggttttaaagataattagtgtgtaggtctgtaggcttatgatggtaaccacaagttgttaatggcattgtgaaaagtttttagttgcgctttatgggtggatgctgaattacattttgatttgatacttataaaaagaaaaagtatttcttcagcttaaaaaattgtttaaaagtttgtgatcatattgtctaccatgtagccagctttcaattatatgtaagagggactttttgacatttacaaataatactttgaggtagatatctgaaagcaccagcacttggaaggtgttcagaagtaacaaattataaaatgagctaacaaacgaaaggcaaaataaaaccgtaaagcaagcagatgggaggcgtgttcagtaacttattcataatgcatctgaaatgattgctgtactcaaatatttaacgttagagtaatagtattttgaatgaaaaccatagttgattgtctttagagagaggagtggtactgaaacatacttgaattcgtattgctttcctttaaagct

SEQ ID NO: 374394 - DNA, 4883 bp, Homo sapiens
  misc_feature (19)..(21): n is a, c, g, or t
  misc_feature (44)..(45): n is a, c, g, or t
tccgaaccccgtccccggnnnttttattgggggaaacccacccnngtccggcccggtgttcctggggacccgcttgtggcccggtgcctaacctactggcgcccggcgcccacacggaatggtttaaaaaccttttccagggcccaagccccccacaaatttttttttttttttttttttttgagacagagtcttgctccatcacccatgctagagtgcagtggagtgatctcggctcactgcaacttccgccttctgggttcaagctattctcctgcctcagccttccaagtaactgggattacaggcatgtaccaccataccagctgatttttttgtatttttagtaaagacagggtttcaccatgttagccaggctgatcttgaactcctaaactcaagtgatctactcacctcagcctccccaaatgctgggattacagatgtgaggcacctggcctcagatttttgatactcttaaaccttctgatccttagtttctctctcccaaatactctttctaggttaaaaaaaaaaggctcttatatttggtgctatgtaaatgaaaatgttttttaggttttcttgatttaacaatagagacagggtctccctgtgttgcccaggctggtctcgaactcctgggctcaagagatcctcctgtcttggcctcgcaaagtgctaagtaggattacaggcgttagccaccacacccggctgtaaaaatgtacttattctccagcctcttttgtataaaccatagtaagggatgggagtaatgatgttatctgtgaaaatagccaccatttacccgtaagacaaaacttgttaaagcctcctgagtctaacctagattacatcaggccctttttcacacacaaaaaaatcctttatgggatttaatggaatctgttgtttccccctaagttgaaaaacaactctaagacactttaaagtaccttcttggcctgggttacatggttcccagcctaggtttcagacttttgcttaaggccagttttagaaacccgtgaattcagaaaagttaattcagaaatttgataaacagaattgttatttaaaaactaactggaaagattgttaagttctttctgaattattcagaaattatgcatcattttccttcaagaatgacagggtcagcatgtggaattccaagatacctcttgacttcctctcaagctccgtgtttggtcagtggaggcccatccgagctcagcactgagaagtgttagtttctttgggacccatctaccctgaccacatcatgatgttcatctgcagctgttgcaaggtgttcagattgtataaacataaatgtcacaaaaactttaaaagaagtgcaattctcaaaaggttaggtggactaaagcattctgtaaagcaactgctaataatgagcttacagtggatttgaatttgaaaaatatagtaacaagcctgtcaaatatctgcaagaactatggaataaaactactgatgcagtgaagacagttgaaaagatcaaacaaatgccaagctatatttataatgaacaaattcaagaaaaaggactacggaaagttcaggacatcaaagaagtcaggcaaaactcatcttgacccctgttgcaggcaaaggaacgcagctggaagaaaagatgatataacagttaacaggatgcagacatggcagaggtttcctaaaaatctcattatctataaccatttctatatttacatttgaaaatctcctttggagacttagaacctctaaattattgacttattttttatataaggtcactccgatgaaaggtgattacaaaatcatctacattgctgtctacaaaaacagataatatggatgtttgatcgcatctcattgttaactctttactgatatgtttgtaaatacagaagtgaaatgtggacataaaatagttacgctatttggttaatggtactagacaacatgtaattaatgacattcaaaaatttatggctagtgatatatataaagtaaaattttctttgcagtaaaatatgccctttattatagaagggaggatataaggaaccaacagtttgtatgaaaatagctcaaataatatcttttattttgattttaatatttcttattttggtttattagtgtcttagaacaaaatggccttatataatgaagcctagttatgctggactgttttgatctcttttaattgttctgacagatagttggggatgagagccgaataaggtttgcctgaaataactgacactatataatttctgctttggcaaatactaagttctaacttgtcattcctggtagaacaagctttatttttcgagcctagcaatgatctagaagcagatgttatctcagtgccttttgcaataattttgggaaaacaatgtttgggtagaacatgtgtctgttaattgcacacaaaaccacttttaatgggtacagagttaaatttgaaggaataagttctagctgaagtattgtgaactccaaataatgctttgaggacctccaaaggtaaaagtactaatccctttggccatttattgagagagagagagagagagagtagggtgactatagttaatgtattgaatgttcttgctacaaataaatgatatttgagctgatgggtgtgctaattacactgatttgatcaatacccattgtatgtgaaacagtacatacaccatatttacaattatgtatttaacatttaaaatttctaatataagtatctctcaaactgtggattaacttcttgatttatatttaaatatgaatcttaagcaaaacagtgaaaataaccatcttgatttagtgtttttctcccatatgtgaattgtatatacttaggtgaggacaataaaatcaactgaactgtaagcttagaataggactgaggtaattctgcacagcaactttactaatggtacattgttgcttcaaaactctctctctctctctctgtctgtctcaataaatggccaaagggattagtagtttacctgtggaggtcctccaagcattatttggagttgataatacttcagctacaaccaagcagaatctcttttttttggaggtcctcgaagcattatttggagttgataatacttcagcttcaatttggagttgataatatttcagctagaacctagtagaatctgtttttttcctttggaggtcctcaaagcattattggagttcataatactgaagctagaaccaagcagaatctgtttttttctgaggagtatcggtagcataaatgtgattataaacatagtacacttgatatatggaggcagtgacagctatttttacaaaatttaaatctgcaaatggattcaacatgtttatgggttattaaaattgtctgatttcttaggttctttatagtacacgtgttgaaaataaatgattaagaattgtttcaagaatgcaattatttgatcttaaatttttatgagttgttaaaatagaaattatttgaatatcatatatttgggtaacaaaaggcacaagtctgaatgtgtttctttttctggaatggccatgcctgcccactttagaaatacaaatatcactgggcagcttgaagcagttgggagcctccaatgagagcaacttgagagaatgatgttgcaagttagtaggagtaagaaatgctgtgttctccctgtcttctcttaggtcacatggcagcctggcctaagtgatcgtgaatggtctataagggaggtagctgggacagggaggggagtttgggctagccaccgtaccacttgtcagcgtgaaaagtaagattgtaattgcctgtttagttttctgcctcatctttgaaagttccaccaagctgggaacctcttgattgtgatgcacaaatgtaagtacatcagaaaaaaacaaaaaaactggctttaaagcaggagcttgtgggcccctaagccagacggggactagctttggcattatataattaagattttttaaatccttaataagggttttattttatttttatttattttttgagacggagtcttgctctgtggctcaggctggagtacagtggtgcaatcttggctcactgcaacctctgcctcctggctgtgttcaagtggttctgcttcagcctcccaagtagctggggttagagcaccctgtcaccacgccccgctaattttgtatttctagcagagatgaagtttcactatgttggccaggctgggctcaaactcctgacctcaagtgatctgcccgccttggccccccaaagtgctgtgattacaggcgtgagccaccacgcccagcctaataagggttttaaagataattagtgtgtaggtctgtaggcttatgatggtaaccacaagttgttaatggcattgtgaaaagtttttagttgcgctttatgggtggatgctgaattacattttgatttgatacttataaaaagaaaaagtatttcttcagcttaaaaaattgtttaaaagtttgtgatcatattgtctaccatgtagccagctttcaattatatgtaagagggactttttgacatttacaaataatactttgaggtagatatctgaaagcaccagcacttggaaggtgttcagaagtaacaaattataaaatgagctaacaaacgaaaggcaaaataaaaccgtaaagcaagcagatgggaggcgtgttcagtaacttattcataatgcatctgaaatgattgctgtactcaaatatttaacgttagagtaatagtattttgaatgaaaaccatagttgattgtctttagagagaggagtggtactgaaacatacttgaattcgtattgctttcctttaaagct

SEQ ID NO: 374395 - DNA, 4392 bp, Homo sapiens
  misc_feature (19)..(21): n is a, c, g, or t
  misc_feature (44)..(45): n is a, c, g, or t
tccgaaccccgtccccggnnnttttattgggggaaacccacccnngtccggcccggtgttcctggggacccgcttgtggcccggtgcctaacctactggcgcccggcgcccacacggaatggtttaaaaaccttttccagggcccaagccccccacaaatttttttttttttttttttttttgagacagagtcttgctccatcacccatgctagagtgcagtggagtgatctcggctcactgcaacttccgccttctgggttcaagctattctcctgcctcagccttccaagtaactgggattacaggcatgtaccaccataccagctgatttttttgtatttttagtaaagacagggtttcaccatgttagccaggctgatcttgaactcctaaactcaagtgatctactcacctcagcctccccaaatgctgggattacagatgtgaggcacctggcctcagatttttgatactcttaaaccttctgatccttagtttctctctcccaaatactctttctaggttaaaaaaaaaaggctcttatatttggtgctatgtaaatgaaaatgttttttaggttttcttgatttaacaatagagacagggtctccctgtgttgcccaggctggtctcgaactcctgggctcaagagatcctcctgtcttggcctcgcaaagtgctaagtaggattacaggcgttagccaccacacccggctgtaaaaatgtacttattctccagcctcttttgtataaaccatagtaagggatgggagtaatgatgttatctgtgaaaatagccaccatttacccgtaagacaaaacttgttaaagcctcctgagtctaacctagattacatcaggccctttttcacacacaaaaaaatcctttatgggatttaatggaatctgttgtttccccctaagttgaaaaacaactctaagacactttaaagtaccttcttggcctgggttacatggttcccagcctaggtttcagacttttgcttaaggccagttttagaaacccgtgaattcagaaaagttaattcagaaatttgataaacagaattgttatttaaaaactaactggaaagattgttaagttctttctgaattattcagaaattatgcatcattttccttcaagaatgacagggtcagcatgtggaattccaagatacctcttgacttcctctcaagctccgtgtttggtcagtggaggcccatccgagctcagcactgagaagtgttagtttctttgggacccatctaccctgaccacatcatgatgttcatctgcagctgttgcaaggtgttcagattgtataaacataaatgtcacaaaaactttaaaagaagtgcaattctcaaaaggttaggtggactaaagcattctgtaaagcaactgctaataatgagcttacagtggatttgaatttgaaaaatatagtaacaagcctgtcaaatatctgcaagaactatggaataaaactactgatgcagtgaagacagttgaaaagatcaaacaaatgccaagctatatttataatgaacaaattcaagaaaaaggactacggaaagttcaggacatcaaagaagtcaggcaaaactcatcttgacccctgttgcaggcaaaggaacgcagctggaagaaaagatgatataacagttaacaggatgcagacatggcagaggtttcctaaaaatctcattatctataaccatttctatatttacatttgaaaatctcctttggagacttagaacctctaaattattgacttattttttatataaggtcactccgatgaaaggtgattacaaaatcatctacattgctgtctacaaaaacagataatatggatgtttgatcgcatctcattgttaactctttactgatatgtttgtaaatacagaagtgaaatgtggacataaaatagttacgctatttggttaatggtactagacaacatgtaattaatgacattcaaaaatttatggctagtgatatatataaagtaaaattttctttgcagtaaaatatgccctttattatagaagggaggatataaggaaccaacagtttgtatgaaaatagctcaaataatatcttttattttgattttaatatttcttattttggtttattagtgtcttagaacaaaatggccttatataatgaagcctagttatgctggactgttttgatctcttttaattgttctgacagatagttggggatgagagccgaataaggtttgcctgaaataactgacactatataatttctgctttggcaaatactaagttctaacttgtcattcctggtagaacaagctttatttttcgagcctagcaatgatctagaagcagatgttatctcagtgccttttgcaatttgtgtgtgggtttttttttttaaaagccacacaataattttgggaaaacaatgtttgggtagaacatgtgtctgttaattgcacacaaaaccacttttaatgggtacagagttaaatttgaaggaataagttctagctgaagtattgtgaactgtcctccaagcattatttggagttgataatacttcagctacaaccaagcagaatctcttttttttggaggtcctcgaagcattatttggagttgataatacttcagcttcaatttggagttgataatatttcagctagaacctagtagaatctgtttttttcctttggaggtcctcaaagcattattggagttcataatactgaagctagaaccaagcagaatctgtttttttctgaggagtatcggtagcataaatgtgattataaacatagtacacttgatatatggaggcagtgacagctatttttacaaaatttaaatctgcaaatggattcaacatgtttatgggttattaaaattgtctgatttcttaggttctttatagtacacgtgttgaaaataaatgattaagaattgtttcaagaatgcaattatttgatcttaaatttttatgagttgttaaaatagaaattatttgaatatcatatatttgggtaacaaaaggcacaagtctgaatgtgtttctttttctggaatggccatgcctgcccactttagaaatacaaatatcactgggcagcttgaagcagttgggagcctccaatgagagcaacttgagagaatgatgttgcaagttagtaggagtaagaaatgctgtgttctccctgtcttctcttaggtcacatggcagcctggcctaagtgatcgtgaatggtctataagggaggtagctgggacagggaggggagtttgggctagccaccgtaccacttgtcagcgtgaaaagtaagattgtaattgcctgtttagttttctgcctcatctttgaaagttccaccaagctgggaacctcttgattgtgatgcacaaatgtaagtacatcagaaaaaaacaaaaaaactggctttaaagcaggagcttgtgggcccctaagccagacggggactagctttggcattatataattaagattttttaaatccttaataagggttttattttatttttatttattttttgagacggagtcttgctctgtggctcaggctggagtacagtggtgcaatcttggctcactgcaacctctgcctcctggctgtgttcaagtggttctgcttcagcctcccaagtagctggggttagagcaccctgtcaccacgccccgctaattttgtatttctagcagagatgaagtttcactatgttggccaggctgggctcaaactcctgacctcaagtgatctgcccgccttggccccccaaagtgctgtgattacaggcgtgagccaccacgcccagcctaataagggttttaaagataattagtgtgtaggtctgtaggcttatgatggtaaccacaagttgttaatggcattgtgaaaagtttttagttgcgctttatgggtggatgctgaattacattttgatttgatacttataaaaagaaaaagtatttcttcagcttaaaaaattgtttaaaagtttgtgatcatattgtctaccatgtagccagctttcaattatatgtaagagggactttttgacatttacaaataatactttgaggtagatatctgaaagcaccagcacttggaaggtgttcagaagtaacaaattataaaatgagctaacaaacgaaaggcaaaataaaaccgtaaagcaagcagatgggaggcgtgttcagtaacttattcataatgcatctgaaatgattgctgtactcaaatatttaacgttagagtaatagtattttgaatgaaaaccatagttgattgtctttagagagaggagtggtactgaaacatacttgaattcgtattgctttcctttaaagct

SEQ ID NO: 374396 - DNA, 4057 bp, Homo sapiens
  misc_feature (19)..(21): n is a, c, g, or t
  misc_feature (44)..(45): n is a, c, g, or t
tccgaaccccgtccccggnnnttttattgggggaaacccacccnngtccggcccggtgttcctggggacccgcttgtggcccggtgcctaacctactggcgcccggcgcccacacggaatggtttaaaaaccttttccagggcccaagccccccacaaatttttttttttttttttttttttgagacagagtcttgctccatcacccatgctagagtgcagtggagtgatctcggctcactgcaacttccgccttctgggttcaagctattctcctgcctcagccttccaagtaactgggattacaggcatgtaccaccataccagctgatttttttgtatttttagtaaagacagggtttcaccatgttagccaggctgatcttgaactcctaaactcaagtgatctactcacctcagcctccccaaatgctgggattacagatgtgaggcacctggcctcagatttttgatactcttaaaccttctgatccttagtttctctctcccaaatactctttctaggttaaaaaaaaaaggctcttatatttggtgctatgtaaatgaaaatgttttttaggttttcttgatttaacaatagagacagggtctccctgtgttgcccaggctggtctcgaactcctgggctcaagagatcctcctgtcttggcctcgcaaagtgctaagtaggattacaggcgttagccaccacacccggctgtaaaaatgtacttattctccagcctcttttgtataaaccatagtaagggatgggagtaatgatgttatctgtgaaaatagccaccatttacccgtaagacaaaacttgttaaagcctcctgagtctaacctagattacatcaggccctttttcacacacaaaaaaatcctttatgggatttaatggaatctgttgtttccccctaagttgaaaaacaactctaagacactttaaagtaccttcttggcctgggttacatggttcccagcctaggtttcagacttttgcttaaggccagttttagaaacccgtgaattcagaaaagttaattcagaaatttgataaacagaattgttatttaaaaactaactggaaagattgttaagttctttctgaattattcagaaattatgcatcattttccttcaagaatgacagggtcagcatgtggaattccaagatacctcttgacttcctctcaagctccgtgtttggtcagtggaggcccatccgagctcagcactgagaagtgttagtttctttgggacccatctaccctgaccacatcatgatgttcatctgcagctgttgcaaggtgttcagattgtataaacataaatgtcacaaaaactttaaaagaagtgcaattctcaaaaggttaggtggactaaagcattctgtaaagcaactgctaataatgagcttacagtggatttgaatttgaaaaatatagtaacaagcctgtcaaatatctgcaagaactatggaataaaactactgatgcagtgaagacagttgaaaagatcaaacaaatgccaagctatatttataatgaacaaattcaagaaaaaggactacggaaagttcaggacatcaaagaagtcaggcaaaactcatcttgacccctgttgcaggcaaaggaacgcagctggaagaaaagatgatataacagttaacaggatgcagacatggcagaggtttcctaaaaatctcattatctataaccatttctatatttacatttgaaaatctcctttggagacttagaacctctaaattattgacttattttttatataaggtcactccgatgaaaggtgattacaaaatcatctacattgctgtctacaaaaacagataatatggatgtttgatcgcatctcattgttaactctttactgatatgtttgtaaatacagaagtgaaatgtggacataaaatagttacgctatttggttaatggtactagacaacatgtaattaatgacattcaaaaatttatggctagtgatatatataaagtaaaattttctttgcagtaaaatatgccctttattatagaagggaggatataaggaaccaacagtttgtatgaaaatagctcaaataatatcttttattttgattttaatatttcttattttggtttattagtgtcttagaacaaaatggccttatataatgaagcctagttatgctggactgttttgatctcttttaattgttctgacagatagttggggatgagagccgaataaggtttgcctgaaataactgacactatataatttctgctttggcaaatactaagttctaacttgtcattcctggtagaacaagctttatttttcgagcctagcaatgatctagaagcagatgttatctcagtgccttttgcaatttgtgtgtgggtttttttttttaaaagccacacaataattttgggaaaacaatgtttgggtagaacatgtgtctgttaattgcacacaaaaccacttttaatgggtacagagttaaatttgaaggaataagttctagctgaagtattgtgaactccaaataatgctttgaggacctccaaaggtaaaagtactaatccctttggccatttattgagagagagagagagagagagtagggtgactatagttaatgtattgaatgttcttgctacaaataaatgatatttgagctgatgggtgtgctaattacactgatttgatcaatacccattgtatgtgaaacagtacatacaccatatttacaattatgtatttaacatttaaaatttctaatataagtatctctcaaactgtggattaacttcttgatttatatttaaatatgaatcttaagcaaaacagtgaaaataaccatcttgatttagtgtttttctcccatatgtgaattgtatatacttaggtgaggacaataaaatcaactgaactgtaagcttagaataggactgaggtaattctgcacagcaactttactaatggtacattgttgcttcaaaactctctctctctctctctgtctgtctcaataaatggccaaagggattagtagtttacctgtggaggtcctccaagcattatttggagttgataatacttcagctacaaccaagcagaatctcttttttttggagagcattattggagttcataatactgaagctagaaccaagcagaatctgtttttttctgaggagtatcggtagcataaatgtgattataaacatagtacacttgatatatggaggcagtgacagctatttttacaaaatttaaatctgcaaatggattcaacatgtttatgggttattaaaattgtctgatttcttaggttctttatagtacacgtgttgaaaataaatgattaagaattgtttcaagaaaaaaaaaaaaaaaaaaaaaaaaaaaaaaaaacacacaaaaaaaacaaaaaacacacacaacaacaaaaaaaaaaagagcgagggggggacccccgctgcccccccgaggggcccccacaagccacgcgcagcccgccaccctcaggcgcgcacacagacgcgaggggccaacaaggaggcggcccagacaaaacaagaacaccgggggcgaccagaaacgacaggacaacaacacagacgacgcacacgacgaaaggagacaacacaggcaggacgcctcgccaggcaccgggggggcaggacaaacacaaaacgccgcgcggggcgaccgagagacacacacgaagggaggggaacacaccaaacgcagtagataaaacagagagaataatacccggcacgcaacacgagagagaaaaacacacagacacccaggcccccacccaggggcgaaacacaaagacggctccgaagaacaagagcagcaccgacaaatgaaaacccacatccccgaccgcacacgacaaaccactatagcccaccaccaagcaccaaccaatgaccacgcaccaccaagagacaaaattctcaaaacaagggcacgatcacacagaccagtaacaacacccagccagatgagagagcataaaggatcag

SEQ ID NO: 374397 - DNA, 4258 bp, Homo sapiens
  misc_feature (19)..(21): n is a, c, g, or t
  misc_feature (44)..(45): n is a, c, g, or t
tccgaaccccgtccccggnnnttttattgggggaaacccacccnngtccggcccggtgttcctggggacccgcttgtggcccggtgcctaacctactggcgcccggcgcccacacggaatggtttaaaaaccttttccagggcccaagccccccacaaatttttttttttttttttttttttgagacagagtcttgctccatcacccatgctagagtgcagtggagtgatctcggctcactgcaacttccgccttctgggttcaagctattctcctgcctcagccttccaagtaactgggattacaggcatgtaccaccataccagctgatttttttgtatttttagtaaagacagggtttcaccatgttagccaggctgatcttgaactcctaaactcaagtgatctactcacctcagcctccccaaatgctgggattacagatgtgaggcacctggcctcagatttttgatactcttaaaccttctgatccttagtttctctctcccaaatactctttctaggttaaaaaaaaaaggctcttatatttggtgctatgtaaatgaaaatgttttttaggttttcttgatttaacaatagagacagggtctccctgtgttgcccaggctggtctcgaactcctgggctcaagagatcctcctgtcttggcctcgcaaagtgctaagtaggattacaggcgttagccaccacacccggctgtaaaaatgtacttattctccagcctcttttgtataaaccatagtaagggatgggagtaatgatgttatctgtgaaaatagccaccatttacccgtaagacaaaacttgttaaagcctcctgagtctaacctagattacatcaggccctttttcacacacaaaaaaatcctttatgggatttaatggaatctgttgtttccccctaagttgaaaaacaactctaagacactttaaagtaccttcttggcctgggttacatggttcccagcctaggtttcagacttttgcttaaggccagttttagaaacccgtgaattcagaaaagttaattcagaaatttgataaacagaattgttatttaaaaactaactggaaagattgttaagttctttctgaattattcagaaattatgcatcattttccttcaagaatgacagggtcagcatgtggaattccaagatacctcttgacttcctctcaagctccgtgtttggtcagtggaggcccatccgagctcagcactgagaagtgttagtttctttgggacccatctaccctgaccacatcatgatgttcatctgcagctgttgcaaggtgttcagattgtataaacataaatgtcacaaaaactttaaaagaagtgcaattctcaaaaggttaggtggactaaagcattctgtaaagcaactgctaataatgagcttacagtggatttgaatttgaaaaatatagtaacaagcctgtcaaatatctgcaagaactatggaataaaactactgatgcagtgaagacagttgaaaagatcaaacaaatgccaagctatatttataatgaacaaattcaagaaaaaggactacggaaagttcaggacatcaaagaagtcaggcaaaactcatcttgacccctgttgcaggcaaaggaacgcagctggaagaaaagatgatataacagttaacaggatgcagacatggcagaggtttcctaaaaatctcattatctataaccatttctatatttacatttgaaaatctcctttggagacttagaacctctaaattattgacttattttttatataaggtcactccgatgaaaggtgattacaaaatcatctacattgctgtctacaaaaacagataatatggatgtttgatcgcatctcattgttaactctttactgatatgtttgtaaatacagaagtgaaatgtggacataaaatagttacgctatttggttaatggtactagacaacatgtaattaatgacattcaaaaatttatggctagtgatatatataaagtaaaattttctttgcagtaaaatatgccctttattatagaagggaggatataaggaaccaacagtttgtatgaaaatagctcaaataatatcttttattttgattttaatatttcttattttggtttattagtgtcttagaacaaaatggccttatataatgaagcctagttatgctggactgttttgatctcttttaattgttctgacagatagttggggatgagagccgaataaggtttgcctgaaataactgacactatataatttctgctttggcaaatactaagttctaacttgtcattcctggtagaacaagctttatttttcgagcctagcaatgatctagaagcagatgttatctcagtgccttttgcaatttgtgtgtgggtttttttttttaaaagccacacaataattttgggaaaacaatgtttgggtagaacatgtgtctgttaattgcacacaaaaccacttttaatgggtacagattgataatacttcagcttcaatttggagttgataatatttcagctagaacctagtagaatctgtttttttcctttggaggtcctcaaagcattattggagttcataatactgaagctagaaccaagcagaatctgtttttttctgaggagtatcggtagcataaatgtgattataaacatagtacacttgatatatggaggcagtgacagctatttttacaaaatttaaatctgcaaatggattcaacatgtttatgggttattaaaattgtctgatttcttaggttctttatagtacacgtgttgaaaataaatgattaagaattgtttcaagaatgcaattatttgatcttaaatttttatgagttgttaaaatagaaattatttgaatatcatatatttgggtaacaaaaggcacaagtctgaatgtgtttctttttctggaatggccatgcctgcccactttagaaatacaaatatcactgggcagcttgaagcagttgggagcctccaatgagagcaacttgagagaatgatgttgcaagttagtaggagtaagaaatgctgtgttctccctgtcttctcttaggtcacatggcagcctggcctaagtgatcgtgaatggtctataagggaggtagctgggacagggaggggagtttgggctagccaccgtaccacttgtcagcgtgaaaagtaagattgtaattgcctgtttagttttctgcctcatctttgaaagttccaccaagctgggaacctcttgattgtgatgcacaaatgtaagtacatcagaaaaaaacaaaaaaactggctttaaagcaggagcttgtgggcccctaagccagacggggactagctttggcattatataattaagattttttaaatccttaataagggttttattttatttttatttattttttgagacggagtcttgctctgtggctcaggctggagtacagtggtgcaatcttggctcactgcaacctctgcctcctggctgtgttcaagtggttctgcttcagcctcccaagtagctggggttagagcaccctgtcaccacgccccgctaattttgtatttctagcagagatgaagtttcactatgttggccaggctgggctcaaactcctgacctcaagtgatctgcccgccttggccccccaaagtgctgtgattacaggcgtgagccaccacgcccagcctaataagggttttaaagataattagtgtgtaggtctgtaggcttatgatggtaaccacaagttgttaatggcattgtgaaaagtttttagttgcgctttatgggtggatgctgaattacattttgatttgatacttataaaaagaaaaagtatttcttcagcttaaaaaattgtttaaaagtttgtgatcatattgtctaccatgtagccagctttcaattatatgtaagagggactttttgacatttacaaataatactttgaggtagatatctgaaagcaccagcacttggaaggtgttcagaagtaacaaattataaaatgagctaacaaacgaaaggcaaaataaaaccgtaaagcaagcagatgggaggcgtgttcagtaacttattcataatgcatctgaaatgattgctgtactcaaatatttaacgttagagtaatagtattttgaatgaaaaccatagttgattgtctttagagagaggagtggtactgaaacatacttgaattcgtattgctttcctttaaagct

SEQ ID NO: 374398 - DNA, 2788 bp, Homo sapiens
  misc_feature (19)..(21): n is a, c, g, or t
  misc_feature (44)..(45): n is a, c, g, or t
tccgaaccccgtccccggnnnttttattgggggaaacccacccnngtccggcccggtgttcctggggacccgcttgtggcccggtgcctaacctactggcgcccggcgcccacacggaatggtttaaaaaccttttccagggcccaagccccccacaaatttttttttttttttttttttttgagacagagtcttgctccatcacccatgctagagtgcagtggagtgatctcggctcactgcaacttccgccttctgggttcaagctattctcctgcctcagccttccaagtaactgggattacaggcatgtaccaccataccagctgatttttttgtatttttagtaaagacagggtttcaccatgttagccaggctgatcttgaactcctaaactcaagtgatctactcacctcagcctccccaaatgctgggattacagatgtgaggcacctggcctcagatttttgatactcttaaaccttctgatccttagtttctctctcccaaatactctttctaggttaaaaaaaaaaggctcttatatttggtgctatgtaaatgaaaatgttttttaggttttcttgatttaacaatagagacagggtctccctgtgttgcccaggctggtctcgaactcctgggctcaagagatcctcctgtcttggcctcgcaaagtgctaagtaggattacaggcgttagccaccacacccggctgtaaaaatgtacttattctccagcctcttttgtataaaccatagtaagggatgggagtaatgatgttatctgtgaaaatagccaccatttacccgtaagacaaaacttgttaaagcctcctgagtctaacctagattacatcaggccctttttcacacacaaaaaaatcctttatgggatttaatggaatctgttgtttccccctaagttgaaaaacaactctaagacactttaaagtaccttcttggcctgggttacatggttcccagcctaggtttcagacttttgcttaaggccagttttagaaacccgtgaattcagaaaagttaattcagaaatttgataaacagaattgttatttaaaaactaactggaaagattgttaagttctttctgaattattcagaaattatgcatcattttccttcaagaatgacagggtcagcatgtggaattccaagatacctcttgacttcctctcaagctccgtgtttggtcagtggaggcccatccgagctcagcactgagaagtgttagtttctttgggacccatctaccctgaccacatcatgatgttcatctgcagctgttgcaaggtgttcagattgtataaacataaatgtcacaaaaactttaaaagaagtgcaattctcaaaaggttaggtggactaaagcattctgtaaagcaactgctaataatgagcttacagtggatttgaatttgaaaaatatagtaacaagcctgtcaaatatctgcaagaactatggaataaaactactgatgcagtgaagacagttgaaaagatcaaacaaatgccaagctatatttataatgaacaaattcaagaaaaaggactacggaaagttcaggacatcaaagaagtcaggcaaaactcatcttgacccctgttgcaggcaaaggaacgcagctggaagaaaagatgatataacagttaacaggatgcagacatggcagaggtttcctaaaaatctcattatctataaccatttctatatttacatttgaaaatctcctttggagacttagaacctctaaattattgacttattttttatataaggtcactccgatgaaaggtgattacaaaatcatctacattgctgtctacaaaaacagataatatggatgtttgatcgcatctcattgttaactctttactgatatgtttgtaaatacagaagtgaaatgtggacataaaatagttacgctatttggttaatggtactagacaacatgtaattaatgacattcaaaaatttatggctagtgatatatataaagtaaaattttctttgcagtaaaatatgccctttattatagaagggaggatataaggaaccaacagtttgtatgaaaatagctcaaataatatcttttattttgattttaatatttcttattttggtttattagtgtcttagaacaaaatggccttatataatgaagcctagttatgctggactgttttgatctcttttaattgttctgacagatagttggggatgagagccgaataaggtttgcctgaaataactgacactatataatttctgctttggcaaatactaagttctaacttgtcattcctggtagaacaagctttatttttcgagcctagcaatgatctagaagcagatgttatctcagtgccttttgcaatttgtgtgtgggtttttttttttaaaagccacacaataattttgggaaaacaatgtttgggtagaacatgtgtctgttaattgcacacaaaaccacttttaatgggtacagagttaaatttgaaggaataagttctagctgaagtattgtgaactccaaataatgctttgaggacctccaaaggtaaaagtactaatccctttggccatttattgagagagagagagagagagagtagggtgcgggggacatctatggttttggtgttcggcacacacaagaatttgcgggggggggcaacaccgggttgtaaccctgtgtggacgctccccttaacttttccaaaaaaaattctgcgcaaagagaggaatccgggcacattgggttt

SEQ ID NO: 374399 - DNA, 3164 bp, Homo sapiens
  misc_feature (19)..(21): n is a, c, g, or t
  misc_feature (44)..(45): n is a, c, g, or t
tccgaaccccgtccccggnnnttttattgggggaaacccacccnngtccggcccggtgttcctggggacccgcttgtggcccggtgcctaacctactggcgcccggcgcccacacggaatggtttaaaaaccttttccagggcccaagccccccacaaatttttttttttttttttttttttgagacagagtcttgctccatcacccatgctagagtgcagtggagtgatctcggctcactgcaacttccgccttctgggttcaagctattctcctgcctcagccttccaagtaactgggattacaggcatgtaccaccataccagctgatttttttgtatttttagtaaagacagggtttcaccatgttagccaggctgatcttgaactcctaaactcaagtgatctactcacctcagcctccccaaatgctgggattacagatgtgaggcacctggcctcagatttttgatactcttaaaccttctgatccttagtttctctctcccaaatactctttctaggttaaaaaaaaaaggctcttatatttggtgctatgtaaatgaaaatgttttttaggttttcttgatttaacaatagagacagggtctccctgtgttgcccaggctggtctcgaactcctgggctcaagagatcctcctgtcttggcctcgcaaagtgctaagtaggattacaggcgttagccaccacacccggctgtaaaaatgtacttattctccagcctcttttgtataaaccatagtaagggatgggagtaatgatgttatctgtgaaaatagccaaataatgctttgaggacctccaaaggtaaaagtactaatccctttggccatttattgagagagagagagagagagagtagggtgactatagttaatgtattgaatgttcttgctacaaataaatgatatttgagctgatgggtgtgctaattacactgatttgatcaatacccattgtatgtgaaacagtacatacaccatatttacaattatgtatttaacatttaaaatttctaatataagtatctctcaaactgtggattaacttcttgatttatatttaaatatgaatcttaagcaaaacagtgaaaataaccatcttgatttagtgtttttctcccatatgtgaattgtatatacttaggtgaggacaataaaatcaactgaactgtaagcttagaataggactgaggtaattctgcacagcaactttactaatggtacattgttgcttcaaaactctctctctctctctctgtctgtctcaataaatggccaaagggattagtagtttacctgtggaggtcctccaagcattatttggagttgataatacttcagctacaaccaagcagaatctcttttttttggaggtcctcgaagcattatttggagttgataatacttcagcttcaatttggagttgataatatttcagctagaacctagtagaatctgtttttttcctttggaggtcctcaaagcattattggagttcataatactgaagctagaaccaagcagaatctgtttttttctgaggagtatcggtagcataaatgtgattataaacatagtacacttgatatatggaggcagtgacagctatttttacaaaatttaaatctgcaaatggattcaacatgtttatgggttattaaaattgtctgatttcttaggttctttatagtacacgtgttgaaaataaatgattaagaattgtttcaagaatgcaattatttgatcttaaatttttatgagttgttaaaatagaaattatttgaatatcatatatttgggtaacaaaaggcacaagtctgaatgtgtttctttttctggaatggccatgcctgcccactttagaaatacaaatatcactgggcagcttgaagcagttgggagcctccaatgagagcaacttgagagaatgatgttgcaagttagtaggagtaagaaatgctgtgttctccctgtcttctcttaggtcacatggcagcctggcctaagtgatcgtgaatggtctataagggaggtagctgggacagggaggggagtttgggctagccaccgtaccacttgtcagcgtgaaaagtaagattgtaattgcctgtttagttttctgcctcatctttgaaagttccaccaagctgggaacctcttgattgtgatgcacaaatgtaagtacatcagaaaaaaacaaaaaaactggctttaaagcaggagcttgtgggcccctaagccagacggggactagctttggcattatataattaagattttttaaatccttaataagggttttattttatttttatttattttttgagacggagtcttgctctgtggctcaggctggagtacagtggtgcaatcttggctcactgcaacctctgcctcctggctgtgttcaagtggttctgcttcagcctcccaagtagctggggttagagcaccctgtcaccacgccccgctaattttgtatttctagcagagatgaagtttcactatgttggccaggctgggctcaaactcctgacctcaagtgatctgcccgccttggccccccaaagtgctgtgattacaggcgtgagccaccacgcccagcctaataagggttttaaagataattagtgtgtaggtctgtaggcttatgatggtaaccacaagttgttaatggcattgtgaaaagtttttagttgcgctttatgggtggatgctgaattacattttgatttgatacttataaaaagaaaaagtatttcttcagcttaaaaaattgtttaaaagtttgtgatcatattgtctaccatgtagccagctttcaattatatgtaagagggactttttgacatttacaaataatactttgaggtagatatctgaaagcaccagcacttggaaggtgttcagaagtaacaaattataaaatgagctaacaaacgaaaggcaaaataaaaccgtaaagcaagcagatgggaggcgtgttcagtaacttattcataatgcatctgaaatgattgctgtactcaaatatttaacgttagagtaatagtattttgaatgaaaaccatagttgattgtctttagagagaggagtggtactgaaacatacttgaattcgtattgctttcctttaaagct

SEQ ID NO: 374400 - DNA, 3024 bp, Homo sapiens
  misc_feature (19)..(21): n is a, c, g, or t
  misc_feature (44)..(45): n is a, c, g, or t
tccgaaccccgtccccggnnnttttattgggggaaacccacccnngtccggcccggtgttcctggggacccgcttgtggcccggtgcctaacctactggcgcccggcgcccacacggaatggtttaaaaaccttttccagggcccaagccccccacaaatttttttttttttttttttttttgagacagagtcttgctccatcacccatgctagagtgcagtggagtgatctcggctcactgcaacttccgccttctgggttcaagctattctcctgcctcagccttccaagtaactgggattacaggcatgtaccaccataccagctgatttttttgtatttttagtaaagacagggtttcaccatgttagccaggctgatcttgaactcctaaactcaagtgatctactcacctcagcctccccaaatgctgggattacagatgtgaggcacctggcctcagatttttgatactcttaaaccttctgatccttagtttctctctcccaaatactctttctaggttaaaaaaaaaaggctcttatatttggtgctatgtaaatgaaaatgttttttaggttttcttgatttaacaatagagacagggtctccctgtgttgcccaggctggtctcgaactcctgggctcaagagatcctcctgtcttggcctcgcaaagtgctaagtaggattacaggcgttagccaccacacccggctgtaaaaatgtacttattctccagcctcttttgtataaaccatagtaagggatgggagtaatgatgttatctgtgaaaatagccaccatttacccgtaagacaaaacttgttaaagcctcctgagtctaacctagattacatcaggccctttttcacacacaaaaaaatcctttatgggatttaatggaatctgttgtttccccctaagttgaaaaacaactctaagacactttaaagtaccttcttggcctgggttacatggttcccagcctaggtttcagacttttgcttatataatgaagcctagttatgctggactgttttgatctcttttaattgttctgacagatagttggggatgagagccgaataaggtttgcctgaaataactgacactatataatttctgctttggcaaatactaagttctaacttgtcattcctggtagaacaagctttatttttcgagcctagcaatgatctagaagcagatgttatctcagtgccttttgcaatttgtgtgtgggtttttttttttaaaagccacacaataattttgggaaaacaatgtttgggtagaacatgtgtctgttaattgcacacaaaaccacttttaatgggtacagagttaaatttgaaggaataaagcattattggagttcataatactgaagctagaaccaagcagaatctgtttttttctgaggagtatcggtagcataaatgtgattataaacatagtacacttgatatatggaggcagtgacagctatttttacaaaatttaaatctgcaaatggattcaacatgtttatgggttattaaaattgtctgatttcttaggttctttatagtacacgtgttgaaaataaatgattaagaattgtttcaagaatgcaattatttgatcttaaatttttatgagttgttaaaatagaaattatttgaatatcatatatttgggtaacaaaaggcacaagtctgaatgtgtttctttttctggaatggccatgcctgcccactttagaaatacaaatatcactgggcagcttgaagcagttgggagcctccaatgagagcaacttgagagaatgatgttgcaagttagtaggagtaagaaatgctgtgttctccctgtcttctcttaggtcacatggcagcctggcctaagtgatcgtgaatggtctataagggaggtagctgggacagggaggggagtttgggctagccaccgtaccacttgtcagcgtgaaaagtaagattgtaattgcctgtttagttttctgcctcatctttgaaagttccaccaagctgggaacctcttgattgtgatgcacaaatgtaagtacatcagaaaaaaacaaaaaaactggctttaaagcaggagcttgtgggcccctaagccagacggggactagctttggcattatataattaagattttttaaatccttaataagggttttattttatttttatttattttttgagacggagtcttgctctgtggctcaggctggagtacagtggtgcaatcttggctcactgcaacctctgcctcctggctgtgttcaagtggttctgcttcagcctcccaagtagctggggttagagcaccctgtcaccacgccccgctaattttgtatttctagcagagatgaagtttcactatgttggccaggctgggctcaaactcctgacctcaagtgatctgcccgccttggccccccaaagtgctgtgattacaggcgtgagccaccacgcccagcctaataagggttttaaagataattagtgtgtaggtctgtaggcttatgatggtaaccacaagttgttaatggcattgtgaaaagtttttagttgcgctttatgggtggatgctgaattacattttgatttgatacttataaaaagaaaaagtatttcttcagcttaaaaaattgtttaaaagtttgtgatcatattgtctaccatgtagccagctttcaattatatgtaagagggactttttgacatttacaaataatactttgaggtagatatctgaaagcaccagcacttggaaggtgttcagaagtaacaaattataaaatgagctaacaaacgaaaggcaaaataaaaccgtaaagcaagcagatgggaggcgtgttcagtaacttattcataatgcatctgaaatgattgctgtactcaaatatttaacgttagagtaatagtattttgaatgaaaaccatagttgattgtctttagagagaggagtggtactgaaacatacttgaattcgtattgctttcctttaaagct

SEQ ID NO: 374401 - DNA, 212 bp, Homo sapiens
gctgttgcaaaaagaaatataaacagcttaacaccagaaggaagcaaaactatatatgtctttttgcttccttctggtgttaagctgtttatatttcagtttcagttttaacttctaagttgccttgtaattgggactgtgtttcagcatcacaaaaaccaaatatttattatggatgcatctgtatcagcaattaaaaaataaacaagtaa

SEQ ID NO: 374402 - DNA, 2227 bp, Homo sapiens
gtattttcccaggctcagcatccagaagtctagctctgggctggaagaaaagggtactaatatttagggaagagatgagaataagtagtgggtggcaggagagggctgagctagtgcctgctaacattttagttgtatcttggaaagatttagcaaaaataactcaccaggatagctgctgaagagttgatgaatgggagaagaaagatgtttgagaaataaagaaaacagcagcctgcaatacaataacttgcctttttaatagttttgattactcttgatacctacagcacaaatgctggacctgaatcagctcttcaaggaccctagcacaaatgtcaactgatcacctctgggagagtagaaaacttttttttttttgagacgaagtctcgctctgttgcccaggctggagtgcagtggcaccatctcagctcactgcagcgtccgcctcttgggttcaagtgattctcctgccttgtcctcctgagtcgctggtattacaggtgcctgccatcacacccagctaatttttggagttctgatagagacagggtttctccatgttggccaggcttgtctcaagctcctgacctcaagtgacctacccacccttggcctcccacagtgctggaagccactgcacctggctcagaatacttttttttttgagatgcagtcttgctctcatcacgcaggctggagtgcagtggcgtatctcggctcactgcgacctccacctcccgagttcaagcgattctccttcctcagtcccccaagtagcttggattataggtgtgcgccaccacgtacagctaatttttgtatttttagtagagatggggtttcgccatgttgaccaggctggtctcaaaacgcctgacctcaggtgatccacccacctcggccccacaaagtgctaggattacaggtgtgagccaccatgcccggcccagaatactttttaaaagaagagcaggttagaggaaagaaaaaaattgatgctgaatgtggtgatgaaagcatgtttctaaaatgggaagcagatgcttaaagaggaaagactaatctgggattttgccccatttctctggtttttcactcctatatttaattctcacaatcgtgtcgtcacatagtgcaaaaaacaaaattcttgtaaagtccccaggagtttatgcttgggtgaaagttttagcctgagtattttcttcctctaaaaaaggtgggaaatgagacattgaggaattaacatataaatgtctgctatgggtttaagagaactggcgtatttggaatgcttcttacactaacactgtctcattgtaaaatataaaaccccttactctaactacatttttattcctctggtagtgtggtatccaggcaacatatcacttctgctatgtaattctaagaattctcatttctagagtacctgagccaaacaaatacacaacggaagctgcagctgtatcatcactagcaatttgctcatcattatttactacctttgaacctaaggtttcctgcctatgcttttgaaagcaaaaatcagtctcctttgcatgaaaaagagccttagatttttaaacatgttagttaccagaatgctaaaataccagttgattacccaaattattttggaaatctatccataatggaagtctacaacaaacacataaaacagattacactaagagctgagaaattcaaaggaactgaagattctgagagataaactgttcaagtcttagcaatgatactgcacttctctttgacaggttctgggcttaagttagaggccctactggttccaaaccatattccactgactttgcaagtaaaataaatttgattctgaaataggaaacaaaaaaaggagaaataaccgaatagtagaagaaaaactgtttgtaggaagacgatgcagatggaatgatgtggacattgagtaaccatgtcaataaaatatataaaccaaacttaaatttgtgaaataaggaagttggtacctttgttgttacagtgtataaaaacaatttcggaactgctgttgcaaaaagacatatatagttttgcttccttctggtgttaagctgtttatatttcagtttcagttttaacttctaagttgccttgtaattgggactgtgtttcagcatcacaaaaaccaaatatttattatggatgcatctgtatcagcaattaaaaaataaacaagtaa

SEQ ID NO: 374403 - DNA, 1351 bp, Homo sapiens
  misc_feature (1)..(1): n is a, c, g, or t
nttagtgtgaatcaaggatgtggttcactatactgttcttaccattgaaaaagaagtgtgagccaccatgcccggcccagaatactttttaaaagaagagcaggttagaggaaagaaaaaaattgatgctgaatgtggtgatgaaagcatgtttctaaaatgggaagcagatgcttaaagaggaaagactaatctgggattttgccccatttctctggtttttcactcctatatttaattctcacaatcgtgtcgtcacatagtgcaaaaaacaaaattcttgtaaagtccccaggagtttatgcttgggtgaaagttttagcctgagtattttcttcctctaaaaaaggtgggaaatgagacattgaggaattaacatataaatgtctgctatgggtttaagagaactggcgtatttggaatgcttcttacactaacactgtctcattgtaaaatataaaaccccttactctaactacatttttattcctctggtagtgtggtatccaggcaacatatcacttctgctatgtaattctaagaattctcatttctagagtacctgagccaaacaaatacacaacggaagctgcagctgtatcatcactagcaatttgctcatcattatttactacctttgaacctaaggtttcctgcctatgcttttgaaagcaaaaatcagtctcctttgcatgaaaaagagccttagatttttaaacatgttagttaccagaatgctaaaataccagttgattacccaaattattttggaaatctatccataatggaagtctacaacaaacacataaaacagattacactaagagctgagaaattcaaaggaactgaagattctgagagataaactgttcaagtcttagcaatgatactgcacttctctttgacaggttctgggcttaagttagaggccctactggttccaaaccatattccactgactttgcaagtaaaataaatttgattctgaaataggaaacaaaaaaaggagaaataaccgaatagtagaagaaaaactgtttgtaggaagacgatgcagatggaatgatgtggacattgagtaaccatgtcaataaaatatataaaccaaacttaaatttgtgaaataaggaagttggtacctttgttgttacagtgtataaaaacaatttcggaactgctgttgcaaaaagacatatatagttttgcttccttctggtgttaagctgtttatatttcagtttcagttttaacttctaagttgccttgtaattgggactgtgtttcagcatcacaaaaaccaaatatttattatggatgcatctgtatcagcaattaaaaaataaacaagtaa

SEQ ID NO: 374404 - DNA, 2259 bp, Homo sapiens
gtattttcccaggctcagcatccagaagtctagctctgggctggaagaaaagggtactaatatttagggaagagatgagaataagtagtgggtggcaggagagggctgagctagtgcctgctaacattttagttgtatcttggaaagatttagcaaaaataactcaccaggatagctgctgaagagttgatgaatgggagaagaaagatgtttgagaaataaagaaaacagcagcctgcaatacaataacttgcctttttaatagttttgattactcttgatacctacagcacaaatgctggacctgaatcagctcttcaaggaccctagcacaaatgtcaactgatcacctctgggagagtagaaaacttttttttttttgagacgaagtctcgctctgttgcccaggctggagtgcagtggcaccatctcagctcactgcagcgtccgcctcttgggttcaagtgattctcctgccttgtcctcctgagtcgctggtattacaggtgcctgccatcacacccagctaatttttggagttctgatagagacagggtttctccatgttggccaggcttgtctcaagctcctgacctcaagtgacctacccacccttggcctcccacagtgctggaagccactgcacctggctcagaatacttttttttttgagatgcagtcttgctctcatcacgcaggctggagtgcagtggcgtatctcggctcactgcgacctccacctcccgagttcaagcgattctccttcctcagtcccccaagtagcttggattataggtgtgcgccaccacgtacagctaatttttgtatttttagtagagatggggtttcgccatgttgaccaggctggtctcaaaacgcctgacctcaggtgatccacccacctcggccccacaaagtgctaggattacaggtgtgagccaccatgcccggcccagaatactttttaaaagaagagcaggttagaggaaagaaaaaaattgatgctgaatgtggtgatgaaagcatgtttctaaaatgggaagcagatgcttaaagaggaaagactaatctgggattttgccccatttctctggtttttcactcctatatttaattctcacaatcgtgtcgtcacatagtgcaaaaaacaaaattcttgtaaagtccccaggagtttatgcttgggtgaaagttttagcctgagtattttcttcctctaaaaaaggtgggaaatgagacattgaggaattaacatataaatgtctgctatgggtttaagagaactggcgtatttggaatgcttcttacactaacactgtctcattgtaaaatataaaaccccttactctaactacatttttattcctctggtagtgtggtatccaggcaacatatcacttctgctatgtaattctaagaattctcatttctagagtacctgagccaaacaaatacacaacggaagctgcagctgtatcatcactagcaatttgctcatcattatttactacctttgaacctaaggtttcctgcctatgcttttgaaagcaaaaatcagtctcctttgcatgaaaaagagccttagatttttaaacatgttagttaccagaatgctaaaataccagttgattacccaaattattttggaaatctatccataatggaagtctacaacaaacacataaaacagattacactaagagctgagaaattcaaaggaactgaagattctgagagataaactgttcaagtcttagcaatgatactgcacttctctttgacaggttctgggcttaagttagaggccctactggttccaaaccatattccactgactttgcaagtaaaataaatttgattctgaaataggaaacaaaaaaaggagaaataaccgaatagtagaagaaaaactgtttgtaggaagacgatgcagatggaatgatgtggacattgagtaaccatgtcaataaaatatataaaccaaacttaaatttgtgaaataaggaagttggtacctttgttgttacagtgtataaaaacaatttcggaactgctgttgcaaaaagacatatatagttttgcttccttctggtgttaagctgtttatatttcagtttcagttttaacttctaagttgccttgtaattgggactgtgtttcagcatcacaaaaaccaaatatttattatggatgcatctgtatcagcaattaaaaaataaacaagtaaaagtgatactgtaggagaagctgaagctcata

SEQ ID NO: 374405 - DNA, 1019 bp, Homo sapiens
ggacgcgtgggtcgacccacgcgtccgagacattgaggaattaacatataaatgtctgctatgggtttaagagaactggcgtatttggaatgcttcttacactaacactgtctcattgtaaaatataaaaccccttactctaactacatttttattcctctggtagtgtggtatccaggcaacatatcacttctgctatgtaattctaagaattctcatttctagagtacctgagccaaacaaatacacaacggaagctgcagctgtatcatcactagcaatttgctcatcattatttactacctttgaacctaaggtttcctgcctatgcttttgaaagcaaaaatcagtctcctttgcatgaaaaagagccttagatttttaaacatgttagttaccagaatgctaaaataccagttgattacccaaattattttggaaatctatccataatggaagtctacaacaaacacataaaacagattacactaagagctgagaaattcaaaggaactgaagattctgagagataaactgttcaagtcttagcaatgatactgcacttctctttgacaggttctgggcttaagttagaggccctactggttccaaaccatattccactgactttgcaagtaaaataaatttgattctgaaataggaaacaaaaaaaggagaaataaccgaatagtagaagaaaaactgtttgtaggaagacgatgcagatggaatgatgtggacattgagtaaccatgtcaataaaatatataaaccaaacttaaatttgtgaaataaggaagttggtacctttgttgttacagtgtataaaaacaatttcggaactgctgttgcaaaaagacatatatagttttgcttccttctggtgttaagctgtttatatttcagtttcagttttaacttctaagttgccttgtaattgggactgtgtttcagcatcacaaaaaccaaatatttattatggatgcatctgtatcagcaattaaaaaataaacaagtaa

SEQ ID NO: 374406 - DNA, 1198 bp, Homo sapiens
gtattttcccaggctcagcatccagaagtctagctctgggctggaagaaaagggtactaatatttagggaagagatgagaataagtagtgggtggcaggagagggctgagctagtgcctgctaacattttagttgtatcttggaaagatttagcaaaaataactcaccaggatagctgctgaagagttgatgaatgggagaagaaagatgtttgagaaataaagaaaacagcagcctgcaatacaataacttgcctttttaatagttttgattactcttgatacctacagcacaaatgctggacctgaatcagctcttcaaggaccctagcacaaatgtcaactgatcacctctgggagagtagaaaacttttttttttttgagacgaagtctcgctctgttgcccaggctggagtgcagtggcaccatctcagctcactgcagcgtccgcctcttgggttcaagtgattctcctgccttgtcctcctgagtcgctggtattacaggtgcctgccatcacacccagctaatttttggagttctgatagagacagggtttctccatgttggccaggcttgtctcaagctcctgacctcaagtgacctacccacccttggcctcccacagtgctggaagccactgcacctggctcagaatacttttttttttgagatgcagtcttgctctcatcacgcaggctggagtgcagtggcgtatctcggctcactgcgacctccacctcccgagttcaagcgattctccttcctcagtcccccaagtagcttggattataggtgtgcgccaccacgtacagctaatttttgtatttttagtagagatggggtttcgccatgttgaccaggctggtctcaaaacgcctgacctcaggtgatccacccacctcggccccacaaagtgctaggattacaggtgtgagccaccatgcccggcccagaatactttttaaaagaagagcaggttagaggaaagaaaaaaattgatgctgaatgtggtgatgaaagcatgtttctaaaatgggaagcagatgcttaaagaggaaagactaatctgggattttgccccatttctctggtttttcactcctatatttaattctccgaggagatgtggagatcccaaatttgattgatttgaagacatgtgagaggttgactagatgatgatgcaaatgtagcc

SEQ ID NO: 374407 - DNA, 437 bp, Homo sapiens
gctgacttacaggattggggctagctgttgtcttcttccctatactctgttactgcaagttttcaacagaaatgaaatatctctaatttttttgtaatgtaaagttatttttaaaatattttggaacaatgtgcttgagtagctaaaattatttttatgctatgaaaatgagccatgtggctggatgtggtagtcacacctgtaatcccagcactttagggggcagaggtgggaagattgcttgagcccaggagttcgagacttaggcaacatgttaagaccccatctctacgaaaaatttaaaaagtcaaaaattaactgggtatggtggcgcacacctgtattcccagctacttgggaggctgaggtgggaggattgcttaagcccaagatctcaaggcttcagtgagctgtgattgtgccactgcactccagcc

SEQ ID NO: 374408 - DNA, 943 bp, Homo sapiens
ggccacgagaccagcagcatgcacggtggcacgggcactggtctaccaggactgtccctcaggagggggtcaaacttgaggtataaggactacttcctcgtttaaggagtcggccttgaggaagcagcattcggttatctctaacgttggaaaacgatggagctaacacccattatggagattaaccacttttcatcaggtttttaacttaagtcgtgaggaatacaacggtgaacacaagattcattttattttcatcaccatgggacgtatcctgttgttgagttctctgggtcagacctctgaagacttctcagatggatcctagtctctgggcttgccctgaaattactcgctgctcagggagagagttgaaatggttggcatcctcccactctgttgctccggctgtgtcccctcgctctgttgttccagctatgtcccctctgttgctccaactgcagctcattctgttagagttcctcattcagctggtcactgtggccagagggtgttggcctgctcccttcctcaagtattcttaaagccatggatttttgtggagcatttttcttcctggctctcccttgagttattttcctttcttcgctatcttgggactcttctttgtgcttgcggacatcggttgagagaaggacttcttcttccttgtctccttggtgttggctcgtggttgctcttcaacaactggactggaggctcttggttttctcttcatcttcaacaagtcagtctctctcaagggtctcacgttgcagcattcttaccagaggccattgggcctggagttccagttccagtgtctggagagtccacctcagctcagcaatctcatgccggttggcaattgtcagcagaagccgatgcctgcccatcagttctttactctgaggtgttagagtggaataaaaatataaatact

SEQ ID NO: 374409 - DNA, 1626 bp, Homo sapiens
ggccacgagaccagcagcatgcacggtggcacgggcactggtctaccaggactgtccctcaggagggggtcaaacttgaggtataaggactacttcctcgtttaaggagtcggccttgaggaagcagcattcggttatctctaacgttggaaaacgatggagctaacacccattatggagattaaccacttttcatcaggtttttaacttaagtcgtgaggaatacaacggtgaacacaagattcattttattttcatcaccatgggacgtatcctgttgttgagttctctgggtcagacctctgaagacttctcagatggatcctagtctctgggcttgccctgaaattactcgctgctcagggagagagttgaaatggttggcatcctcccactctgttgctccggctgtgtcccctcgctctgttgttccagctatgtcccctctgttgctccaactgcagctcattctgttagagttcctcattcagctggtcactgtggccagagggtgttggcctgctcccttcctcaagtattcttaaagccatggatttttgtggagcatttttcttcctggctctcccttgagttattttcctttcttcgctatcttgggactcttctttgtgcttgcggacatcggttgagagaaggacttcttcttccttgtctccttggtgttggctcgtggttgctcttcaacaactggactggaggctcttggttttctcttcatcttcaacaagtcagtctctctcaagggtctcacgttgcagcattcttaccagaggccattgggcctggagttccagttccagtgtctggagagtccacctcagctcagcaatctcatgccggttggcaattgtcagcagaagccgatgcctgcccatcagttctttactctgaggtgttagagtggaataaaaatataaatacttatactagttttcatgacttctgcttaatattgggtatttttttgttttgttttgttttggcggtgataggcttaccttacattaaaccaggccttagcctttctgtggctttgttatggcaaagcctcatattactctctagtctggttcagcaggacagtcaggtccacacctggggctgtttgttttctacgtttacctcaacataaggtaccttatcattgtcagccttcatctcctgatccaaaataaaataaaatgccacaggttacttgatttgcatctggaatatgattatttaaagaaattaaaaatttaaaactgaaaatgtagagtttagaaatcttttttaaggtttcaaaaaaatttctaggagacaacaaaatagtgttactagatttagcaaataaaatacagaatgccaattaaatttgaatttcaaatgaacattgaatactttttttggtataactatattccatgcaatatttgggacatatctgttatattattcattgtttacctgaaattataatttaaactgagagttctgtattttatctggcaaccttattatgaaaatatttaggatcaatataaaggaataatatttttaatttttacaaactattttaatataagtaatttatttgattttcattgtcatcctgagagttaagtt

SEQ ID NO: 374410 - DNA, 1164 bp, Homo sapiens
gacttgtggcctccgctggagctgccgccgccgtatccgccgccggagctgctgccgccgccggagctgccgcccccgtagccgccgccgccgccgccggaactgccaccaccgtagccgccgctggaactgccgccgtggccgccgctggagcttccgcccccgtagccgccgccggagcttccgccgccggagcttccgcctccgtagccgccgccggaactgccgccgtggccgccgccgtggccgccgccggagcttccgccgccggagcttccgccgacgtagccgccgccgaaacttccgccgccgcgtccgccgcctccggaactaaacggggtgaggtcacattcggttatctctaacgttggaaaacgatggagctaacacccattatggagattaaccacttttcatcaggtttttaacttaagtcgtgaggaatacaacggtgaacacaagattcattttattttcatcaccatgggacgtatcctgttgttgagttctctgggtcagacctctgaagacttctcagatggatcctagtctctgggcttgccctgaaattactcgctgctcagggagagagttgaaatggttggcatcctcccactctgttgctccggctgtgtcccctcgctctgttgttccagctatgtcccctctgttgctccaactgcagctcattctgttagagttcctcattcagctggtcactgtggccagagggtgttggcctgctcccttcctcaagtattcttaaagccatggatttttgtggagcatttttcttcctggctctcccttgagttattttcctttcttcgctatcttgggactcttctttgtgcttgcggacatcggttgagagaaggacttcttcttccttgtctccttggtgttggctcgtggttgctcttcaacaactggactggaggctcttggttttctcttcatcttcaacaagtcagtctctctcaagggtctcacgttgcagcattcttaccagaggccattgggcctggagttccagttccagtgtctggagagtccacctcagctcagcaatctcatgccggttggcaattgtcagcagaagccgatgcctgcccatcagttctttactctgaggtgttagagtggaataaaaatataaatact

SEQ ID NO: 374411 - DNA, 1126 bp, Homo sapiens
gacttgtggcctccgctggagctgccgccgccgtatccgccgccggagctgctgccgccgccggagctgccgcccccgtagccgccgccgccgccgccggaactgccaccaccgtagccgccgctggaactgccgccgtggccgccgctggagcttccgcccccgtagccgccgccggagcttccgccgccggagcttccgcctccgtagccgccgccggaactgccgccgtggccgccgccgtggccgccgccggagcttccgccgccggagcttccgccgacgtagccgccgccgaaacttccgccgccgcgtccgccgcctccggaactaaacgggatggagctaacacccattatggagattaaccacttttcatcaggtttttaacttaagtcgtgaggaatacaacggtgaacacaagattcattttattttcatcaccatgggacgtatcctgttgttgagttctctgggtcagacctctgaagacttctcagatggatcctagtctctgggcttgccctgaaattactcgctgctcagggagagagttgaaatggttggcatcctcccactctgttgctccggctgtgtcccctcgctctgttgttccagctatgtcccctctgttgctccaactgcagctcattctgttagagttcctcattcagctggtcactgtggccagagggtgttggcctgctcccttcctcaagtattcttaaagccatggatttttgtggagcatttttcttcctggctctcccttgagttattttcctttcttcgctatcttgggactcttctttgtgcttgcggacatcggttgagagaaggacttcttcttccttgtctccttggtgttggctcgtggttgctcttcaacaactggactggaggctcttggttttctcttcatcttcaacaagtcagtctctctcaagggtctcacgttgcagcattcttaccagaggccattgggcctggagttccagttccagtgtctggagagtccacctcagctcagcaatctcatgccggttggcaattgtcagcagaagccgatgcctgcccatcagttctttactctgaggtgttagagtggaataaaaatataaatact

SEQ ID NO: 374412 - DNA, 1683 bp, Homo sapiens
gacttgtggcctccgctggagctgccgccgccgtatccgccgccggagctgctgccgccgccggagctgccgcccccgtagccgccgccgccgccgccggaactgccaccaccgtagccgccgctggaactgccgccgtggccgccgctggagcttccgcccccgtagccgccgccggagcttccgccgccggagcttccgcctccgtagccgccgccggaactgccgccgtggccgccgccgtggccgccgccggagcttccgccgccggagcttccgccgacgtagccgccgccgaaacttccgccgccgcgtccgccgcctccggaactaaacggggtgaggtcacattcggttatctctaacgttggaaaacgatggagctaacacccattatggagattaaccacttttcatcaggtttttaacttaagtcgtgaggaatacaacggtgaacacaagattcattttattttcatcaccatgggacgtatcctgttgttgagttctctgggtcagacctctgaagacttctcagatggatcctagtctctgggcttgccctgaaattactcgctgctcccttcctcaagtattcttaaagccatggatttttgtggagcatttttcttcctggctctcccttgagttattttcctttcttcgctatcttgggactcttctttgtgcttgcggacatcggttgagagaaggacttcttcttccttgtctccttggtgttggctcgtggttgctcttcaacaactggactggaggctcttggttttctcttcatcttcaacaagtcagtctctctcaagggtctcacgttgcagcattcttaccagaggccattgggcctggagttccagttccagtgtctggagagtccacctcagctcagcaatctcatgccggttggcaattgtcagcagaagccgatgcctgcccatcagttctttactctgaggtgttagagtggaataaaaatataaatacttatactagttttcatgacttctgcttaatattgggtatttttttgttttgttttgttttggcggtgataggcttaccttacattaaaccaggccttagcctttctgtggctttgttatggcaaagcctcatattactctctagtctggttcagcaggacagtcaggtccacacctggggctgtttgttttctacgtttacctcaacataaggtaccttatcattgtcagccttcatctcctgatccaaaataaaataaaatgccacaggttacttgatttgcatctggaatatgattatttaaagaaattaaaaatttaaaactgaaaatgtagagtttagaaatcttttttaaggtttcaaaaaaatttctaggagacaacaaaatagtgttactagatttagcaaataaaatacagaatgccaattaaatttgaatttcaaatgaacattgaatactttttttggtataactatattccatgcaatatttgggacatatctgttatattattcattgtttacctgaaattataatttaaactgagagttctgtattttatctggcaaccttattatgaaaatatttaggatcaatataaaggaataatatttttaatttttacaaactattttaatataagtaatttatttgattttcattgtcatcctgagagttaagtt

SEQ ID NO: 374413 - DNA, 1235 bp, Homo sapiens
gacttgtggcctccgctggagctgccgccgccgtatccgccgccggagctgctgccgccgccggagctgccgcccccgtagccgccgccgccgccgccggaactgccaccaccgtagccgccgctggaactgccgccgtggccgccgctggagcttccgcccccgtagccgccgccggagcttccgccgccggagcttccgcctccgtagccgccgccggaactgccgccgtggccgccgccgtggccgccgccggagcttccgccgccggagcttccgccgacgtagccgccgccgaaacttccgccgccgcgtccgccgcctccggaactaaacggggtgaggtcacattcggttatctctaacgttggaaaacggtgggtagctttccagttgccgttaatttagaaaataagcaaaacgtgttgaaaaaataaaaccctgccagatggagctaacacccattatggagattaaccacttttcatcaggtttttaacttaagtcgtgaggaatacaacggtgaacacaagattcattttattttcatcaccatgggacgtatcctgttgttgagttctctgggtcagacctctgaagacttctcagatggatcctagtctctgggcttgccctgaaattactcgctgctcagggagagagttgaaatggttggcatcctcccactctgttgctccggctgtgtcccctcgctctgttgttccagctatgtcccctctgttgctccaactgcagctcattctgttagagttcctcattcagctggtcactgtggccagagggtgttggcctgctcccttcctcaagtattcttaaagccatggatttttgtggagcatttttcttcctggctctcccttgagttattttcctttcttcgctatcttgggactcttctttgtgcttgcggacatcggttgagagaaggacttcttcttccttgtctccttggtgttggctcgtggttgctcttcaacaactggactggaggctcttggttttctcttcatcttcaacaagtcagtctctctcaagggtctcacgttgcagcattcttaccagaggccattgggcctggagttccagttccagtgtctggagagtccacctcagctcagcaatctcatgccggttggcaattgtcagcagaagccgatgcctgcccatcagttctttactctgaggtgttagagtggaataaaaatataaatact

SEQ ID NO: 374414 - DNA, 1000 bp, Homo sapiens
gacttgtggcctccgctggagctgccgccgccgtatccgccgccggagctgctgccgccgccggagctgccgcccccgtagccgccgccgccgccgccggaactgccaccaccgtagccgccgctggaactgccgccgtggccgccgctggagcttccgcccccgtagccgccgccggagcttccgccgccggagcttccgcctccgtagccgccgccggaactgccgccgtggccgccgccgtggccgccgccggagcttccgccgccggagcttccgccgacgtagccgccgccgaaacttccgccgccgcgtccgccgcctccggaactaaacggggtgaggtcacattcggttatctctaacgttggaaaacgatggagctaacacccattatggagattaaccacttttcatcaggtttttaacttaagtcgtgaggaatacaacggtgaacacaagattcattttattttcatcaccatgggacgtatcctgttgttgagttctctgggtcagacctctgaagacttctcagatggatcctagtctctgggcttgccctgaaattactcgctgctcccttcctcaagtattcttaaagccatggatttttgtggagcatttttcttcctggctctcccttgagttattttcctttcttcgctatcttgggactcttctttgtgcttgcggacatcggttgagagaaggacttcttcttccttgtctccttggtgttggctcgtggttgctcttcaacaactggactggaggctcttggttttctcttcatcttcaacaagtcagtctctctcaagggtctcacgttgcagcattcttaccagaggccattgggcctggagttccagttccagtgtctggagagtccacctcagctcagcaatctcatgccggttggcaattgtcagcagaagccgatgcctgcccatcagttctttactctgaggtgttagagtggaataaaaatataaatact

SEQ ID NO: 374415 - DNA, 403 bp, Homo sapiens
  misc_feature (276)..(276): n is a, c, g, or t
  misc_feature (281)..(281): n is a, c, g, or t
ttctccctctagccttattccttgtttctgactccctgaaggcctacaaccccacttacaggtccttgttgcttttgtaagccaggggagtgatgctgttgaatactcttcctcaaaagcatggccttttgtggctcccaattttaaacacacaggtcaattgcaattctctgactctcagaagcctaaagtcttttctcctcacctcatatagcccttaaaactatggttcccactccccattggccattttggctttagctctctttcatatcnaaganggtcttcgtcccatcagtctaacaaaaacaagtagggaaacaaccaaagaataaggcaactcctgtgagcttcacaaaagtgaattcatcgaaaaagacagcgcctttaaattccttgtttc

SEQ ID NO: 374416 - DNA, 3821 bp, Homo sapiens
tggatcccccgggctgcaggttttttttttattaaagatcataatgctatcatttattgaagaaagaaagcaaaaaaaactaacaattgtgatgggggaggagagacagcttggcaacattccttttaaagttaagttagcataaagaaaacaatatttagtaaatgaaatagattttcaaggtaggaaaagtagtactcaagaatgtatttttggatacaaaaattcagttacacaatcagtagcattcaaaattagttatgagtatttatacaattacaaaaatggattcatgttttaacaacgtattttaaaagctcaaacattttaaaacaggcacaatattctaaaggcatatgcattcaccatgggcttttgaatgtcctcactcccaacttcacaatcaaaatctacagaagcggcaaaagatcagagttcagagggctattttttttttccctttccttacttaaggttgcaaacacattgacagaggcaaaataaacacgtttcatagcagaaagaccaaaaaattgaatgtaaaccatagctctcccttgggagattacacaaatacaaggttcatctgtacttagaacaaggctcataacttcttgtagcatggacattcaacaggcacagagcaacaacattcacccaaataccagctgcaatttgtcctttaaggatgcctcacaaggatattatgtccaggtagctagtccatttatatcggggaccagttgtccttttgttgtttgtggctgtttattaaatgtagtggcacaactttgttgtgaatatgtaccatcatttgctacaatctagacagatcatcctgtctacaaaaaatcattttctacatttctaagaccattatcagtttatctgctcctgctagaaaaggacatactttttgtcaatttacattaacaaaaggctctgctactccccatttactcgctgcaatgaaaactggtaagccaagggtaaagcttaagtatcagggactatgaatttagggtagaagtgaaaataaccaaagtggaactaaatcccctattcttgagtgcaactgagatcaagtaaacttcgctggactttcttcttaactataaaactattaaccagaaggtaaagtcacacaattttacctcccaacaaacttttaaaataaaaatttccaaaaaatttagatgtctaggttttgttatatcttaccaagagttacacagacataaatttgtatttaacttcagttaaacatctattcactttttaaaaatgctgtctgcaaataaactactggacatcttaagcttactaaaaaaaacttaagatttttaaattaaaaaaaaaaaactaggacaaaaatctagcaaatggtttcacgtacctttaaacactgattcttaaaaatttatatgctgaaaatgaggtttgagaatacgtattttaaaccatttataatcctaccgtcgactctagtcagaagttatctgagcaaagagaaaataaagcctggcgtagacagtcccatagaaaatagaatccatagccactgggctgcccttcaatttcccaattcattccactaagtctcatgatgcaaatctgtcactttcatagagctatcaaaaacagaagccaagccagatcctccacactttaagatatggttccttattatctattttaacagaagtatcaaaaagtgatttttttttttatttatttttgagacagagtctcactctgttgctcaggctggagtgcaggggtgcgatctcggctcactgaacttccacctcctgggttcaagcaattcttgtgcctcagcctccctcccaagtagctgggattataggcgcacaccagctagcctggctgatttttttgctgttgtattttttgtagagatggggttttgccatgttggccaggctggtcttgaactcctgacctcaagcgatccacccacctcagcctcccaaagtgctcagattacaggtgtgagccactgcacccagccaaaaggtaattttatttggaatgcatttcatgattttatttcttgctccctgagcctgcagtgattagggtggaagggaagtggcactcaggcagataattcacaaagtcaccacacaagggtgatagatgatccaccactgagataatcaacccagtgaaaatgctacactggggaccatgttttgcccttcccagacaagacatcttgagctaggatctgagctacggctatgcagaggagcagaactgaaggctccgtttgagccctttctgcaaaaggggatgcatttcagataatgagacaagagacgggagtgagttagtacacagcacgcccaatacccaacaagcagcctcagagagactgggagaagggggagaggggactggaagccatctcttctgttctgaagggcagtgctcctcccaagacagcactcagagagccaacagcccagggcagatcacgccaggacagtgcttccatatggctggctgagcaccatattccaatctgcaaaagagtcaccttattggttcccttaacttccaaaatgcagcaagccctccttctcccatcagtgaacggaagggaagggaatgcagggcagcagggagacagagaccatcattaactacaggtctgaaaccctaattctttactcactcatcaggttgcttttaatcactgctgttgcttggtaacaggtttcagcagatttgaaatggatttcttcctcccacagtctaacaaaaacaagtagggaaacaaccaaagaataaggcaacttaaggaaaaacgcaggaagaccctgggaggcagggtcatgcaaaagctgccaatggtgtcctgatgggagctgtctgagcaaactggccacaggccgtgagtgaaagcaaagcagaagcctttctacaagacccatctcctgccaagaacccctccctgacgcctccactcgtggggtctgggataggctctttaccttctcagaggatggaggcaataccattcactgggcagtcactgtgaatattgaatgagataaaacatggcagtgtctacagcgccgggcacatagtactagataagtatttgttaaataaattaatgatcggagacattcactctcatcttccaaagttgtcagttatttctgggattaaataacacctaccctactgagactctacttatgccaagccctattctaagcacttgacacgtctcactgacatcttgcaatgacccagcaggaactgttattcccacaatttttaaacagatgaacaaactgaggagccagaggttaggtaacctgttcaaaatgacacaactagtatatgactagtcacagctcacagccagatgcatctgacttcaaagcctacattcactactagtatgctatacaggtgacatcttaaaaggtaccttggcctcatgtcccacaaagtcaatccaggcattaaaaaggacatggggctgggcatggtggctcacgcctgtaatcccagcactttgggaggccgaggcaggaggatcacttgaggtcaggagttcgagaccagcctggccaacatggtgaaaccctgtttctactaaaaatacaaaaattagccgggtgtggtggcacatgcctgtatcccagctactcaggaggctgaggcaggagaatggcttgaacccaggaggcagaggttgcagtgagccaagattgtgccacttcactccagcctgggcaacagagtgagactctgtctcaaaaaaaaaaaaaaaagaaaaa

SEQ ID NO: 374417 - DNA, 2980 bp, Homo sapiens
tggatcccccgggctgcaggttttttttttattaaagatcataatgctatcatttattgaagaaagaaagcaaaaaaaactaacaattgtgatgggggaggagagacagcttggcaacattccttttaaagttaagttagcataaagaaaacaatatttagtaaatgaaatagattttcaaggtaggaaaagtagtactcaagaatgtatttttggatacaaaaattcagttacacaatcagtagcattcaaaattagttatgagtatttatacaattacaaaaatggattcatgttttaacaacgtattttaaaagctcaaacattttaaaacaggcacaatattctaaaggcatatgcattcaccatgggcttttgaatgtcctcactcccaacttcacaatcaaaatctacagaagcggcaaaagatcagagttcagagggctattttttttttccctttccttacttaaggttgcaaacacattgacagaggcaaaataaacacgtttcatagcagaaagaccaaaaaattgaatgtaaaccatagctctcccttgggagattacacaaatacaaggttcatctgtacttagaacaaggctcataacttcttgtagcatggacattcaacaggcacagagcaacaacattcacccaaataccagctgcaatttgtcctttaaggatgcctcacaaggatattatgtccaggtagctagtccatttatatcggggaccagttgtccttttgttgtttgtggctgtttattaaatgtagtggcacaactttgttgtgaatatgtaccatcatttgctacaatctagacagatcatcctgtctacaaaaaatcattttctacatttctaagaccattatcagtttatctgctcctgctagaaaaggacatactttttgtcaatttacattaacaaaaggctctgctactccccatttactcgctgcaatgaaaactggtaagccaagggtaaagcttaagtatcagggactatgaatttagggtagaagtgaaaataaccaaagtggaactaaatcccctattcttgagtgcaactgagatcaagtaaacttcgctggactttcttcttaactataaaactattaaccagaaggtaaagtcacacaattttacctcccaacaaacttttaaaataaaaatttccaaaaaatttagatgtctaggttttgttatatcttaccaagagttacacagacataaatttgtatttaacttcagttaaacatctattcactttttaaaaatgctgtctgcaaataaactactggacatcttaagcttactaaaaaaaacttaagatttttaaattaaaaaaaaaaaactaggacaaaaatctagcaaatggtttcacgtacctttaaacactgattcttaaaaatttatatgctgaaaatgaggtttgagaatacgtattttaaaccatttataatcctaccgtcgactctagtcagaagttatctgagcaaagagaaaataaagcctggcgtagacagtcccatagaaaatagaatccatagccactgggctgcccttcaatttcccaattcattccactaagtctcatgatgcaaatctgtcactttcatagagctatcaaaaacagaagccaagccagatcctccacactttaagatatggttccttattatctattttaacagaagtatcaaaaagtgatttttttttttatttatttttgagacagagtctcactctgttgctcaggctggagtgcaggggtgcgatctcggctcactgaacttccacctcctgggttcaagcaattcttgtgcctcagcctccctcccaagtagctgggattataggcgcacaccagctagcctggctgatttttttgctgttgtattttttgtagagatggggttttgccatgttggccaggctggtcttgaactcctgacctcaagcgatccacccacctcagcctcccaaagtgctcagattacaggtgtgagccactgcacccagccaaaaggtaattttatttggaatgcatttcatgattttatttcttgctccctgagcctgcagtgattagggtggaagggaagtggcactcaggcagataattcacaaagtcaccacacaagggtgatagatgatccaccactgagataatcaacccagtgaaaatgctacactggggaccatgttttgcccttcccagacaagacatcttgagctaggatctgagctacggctatgcagaggagcagaactgaaggctccgtttgagccctttctgcaaaaggggatgcatttcagataatgagacaagagacgggagtgagttagtacacagcacgcccaatacccaacaagcagcctcagagagactgggagaagggggagaggggactggaagccatctcttctgttctgaagggcagtgctcctcccaagacagcactcagagagccaacagcccagggcagatcacgccaggacagtgcttccatatggctggctgagcaccatattccaatctgcaaaagagtcaccttattggttcccttaacttccaaaatgcagcaagccctccttctcccatcagtgaacggaagggaagggaatgcagggcagcagggagacagagaccatcattaactacaggtctgaaaccctaattctttactcactcatcaggttgcttttaatcactgctgttgcttggtaacaggtttcagcagatttgaaatggatttcttcctcccacagtctaacaaaaacaagtagggaaacaaccaaagaataaggcaacttaaggaaaaacgcaggaagaccctgggaggcagggtcatgcaaaagctgccaatggtgtcctgatgggaagatgcgcgcagtcttctcccatcagattgtgtgacacgtcgttggactctttttataaccaacaaaggtcaatgtatagaaatccg

SEQ ID NO: 374418 - DNA, 3845 bp, Homo sapiens
tggatcccccgggctgcaggttttttttttattaaagatcataatgctatcatttattgaagaaagaaagcaaaaaaaactaacaattgtgatgggggaggagagacagcttggcaacattccttttaaagttaagttagcataaagaaaacaatatttagtaaatgaaatagattttcaaggtaggaaaagtagtactcaagaatgtatttttggatacaaaaattcagttacacaatcagtagcattcaaaattagttatgagtatttatacaattacaaaaatggattcatgttttaacaacgtattttaaaagctcaaacattttaaaacaggcacaatattctaaaggcatatgcattcaccatgggcttttgaatgtcctcactcccaacttcacaatcaaaatctacagaagcggcaaaagatcagagttcagagggctattttttttttccctttccttacttaaggttgcaaacacattgacagaggcaaaataaacacgtttcatagcagaaagaccaaaaaattgaatgtaaaccatagctctcccttgggagattacacaaatacaaggttcatctgtacttagaacaaggctcataacttcttgtagcatggacattcaacaggcacagagcaacaacattcacccaaataccagctgcaatttgtcctttaaggatgcctcacaaggatattatgtccaggtagctagtccatttatatcggggaccagttgtccttttgttgtttgtggctgtttattaaatgtagtggcacaactttgttgtgaatatgtaccatcatttgctacaatctagacagatcatcctgtctacaaaaaatcattttctacatttctaagaccattatcagtttatctgctcctgctagaaaaggacatactttttgtcaatttacattaacaaaaggctctgctactccccatttactcgctgcaatgaaaactggtaagccaagggtaaagcttaagtatcagggactatgaatttagggtagaagtgaaaataaccaaagtggaactaaatcccctattcttgagtgcaactgagatcaagtaaacttcgctggactttcttcttaactataaaactattaaccagaaggtaaagtcacacaattttacctcccaacaaacttttaaaataaaaatttccaaaaaatttagatgtctaggttttgttatatcttaccaagagttacacagacataaatttgtatttaacttcagttaaacatctattcactttttaaaaatgctgtctgcaaataaactactggacatcttaagcttactaaaaaaaacttaagatttttaaattaaaaaaaaaaaactaggacaaaaatctagcaaatggtttcacgtacctttaaacactgattcttaaaaatttatatgctgaaaatgaggtttgagaatacgtattataaatggtttaaaatacgtattcttaaaccatttataatcctaccgtcgactctagtcagaagttatctgagcaaagagaaaataaagcctggcgtagacagtcccatagaaaatagaatccatagccactgggctgcccttcaatttcccaattcattccactaagtctcatgatgcaaatctgtcactttcatagagctatcaaaaacagaagccaagccagatcctccacactttaagatatggttccttattatctattttaacagaagtatcaaaaagtgatttttttttttatttatttttgagacagagtctcactctgttgctcaggctggagtgcaggggtgcgatctcggctcactgaacttccacctcctgggttcaagcaattcttgtgcctcagcctccctcccaagtagctgggattataggcgcacaccagctagcctggctgatttttttgctgttgtattttttgtagagatggggttttgccatgttggccaggctggtcttgaactcctgacctcaagcgatccacccacctcagcctcccaaagtgctcagattacaggtgtgagccactgcacccagccaaaaggtaattttatttggaatgcatttcatgattttatttcttgctccctgagcctgcagtgattagggtggaagggaagtggcactcaggcagataattcacaaagtcaccacacaagggtgatagatgatccaccactgagataatcaacccagtgaaaatgctacactggggaccatgttttgcccttcccagacaagacatcttgagctaggatctgagctacggctatgcagaggagcagaactgaaggctccgtttgagccctttctgcaaaaggggatgcatttcagataatgagacaagagacgggagtgagttagtacacagcacgcccaatacccaacaagcagcctcagagagactgggagaagggggagaggggactggaagccatctcttctgttctgaagggcagtgctcctcccaagacagcactcagagagccaacagcccagggcagatcacgccaggacagtgcttccatatggctggctgagcaccatattccaatctgcaaaagagtcaccttattggttcccttaacttccaaaatgcagcaagccctccttctcccatcagtgaacggaagggaagggaatgcagggcagcagggagacagagaccatcattaactacaggtctgaaaccctaattctttactcactcatcaggttgcttttaatcactgctgttgcttggtaacaggtttcagcagatttgaaatggatttcttcctcccacagtctaacaaaaacaagtagggaaacaaccaaagaataaggcaacttaaggaaaaacgcaggaagaccctgggaggcagggtcatgcaaaagctgccaatggtgtcctgatgggagctgtctgagcaaactggccacaggccgtgagtgaaagcaaagcagaagcctttctacaagacccatctcctgccaagaacccctccctgacgcctccactcgtggggtctgggataggctctttaccttctcagaggatggaggcaataccattcactgggcagtcactgtgaatattgaatgagataaaacatggcagtgtctacagcgccgggcacatagtactagataagtatttgttaaataaattaatgatcggagacattcactctcatcttccaaagttgtcagttatttctgggattaaataacacctaccctactgagactctacttatgccaagccctattctaagcacttgacacgtctcactgacatcttgcaatgacccagcaggaactgttattcccacaatttttaaacagatgaacaaactgaggagccagaggttaggtaacctgttcaaaatgacacaactagtatatgactagtcacagctcacagccagatgcatctgacttcaaagcctacattcactactagtatgctatacaggtgacatcttaaaaggtaccttggcctcatgtcccacaaagtcaatccaggcattaaaaaggacatggggctgggcatggtggctcacgcctgtaatcccagcactttgggaggccgaggcaggaggatcacttgaggtcaggagttcgagaccagcctggccaacatggtgaaaccctgtttctactaaaaatacaaaaattagccgggtgtggtggcacatgcctgtatcccagctactcaggaggctgaggcaggagaatggcttgaacccaggaggcagaggttgcagtgagccaagattgtgccacttcactccagcctgggcaacagagtgagactctgtctcaaaaaaaaaaaaaaaagaaaaa

SEQ ID NO: 374419 - DNA, 4138 bp, Homo sapiens
ccgagttgtctacgctgcttttcctcgctgatcgggttcccatcatcggtgttttttccgcggtgatgcgtctggatggtgccgttgtaccccccggtgggtggtctcctccattactccctcgtgctgtgttcgcttcctgccgtttgttcgcgcgggcgctccctgttatctacctgtttgtggcgcgtctttttctttacacgcggtggtggtttcttgtcgccccttccgtggggattatataccccccccccctcttttttttttttttttctctttcctcttttttttttcttttttctttttttttttccttttttttttttttttttttttttttttttattaaagatcataatgctatcatttattgaagaaagaaagcaaaaaaaactaacaattgtgatgggggaggagagacagcttggcaacattccttttaaagttaagttagcataaagaaaacaatatttagtaaatgaaatagattttcaaggtaggaaaagtagtactcaagaatgtatttttggatacaaaaattcagttacacaatcagtagcattcaaaattagttatgagtatttatacaattacaaaaatggattcatgttttaacaacgtattttaaaagctcaaacattttaaaacaggcacaatattctaaaggcatatgcattcaccatgggcttttgaatgtcctcactcccaacttcacaatcaaaatctacagaagcggcaaaagatcagagttcagagggctattttttttttccctttccttacttaaggttgcaaacacattgacagaggcaaaataaacacgtttcatagcagaaagaccaaaaaattgaatgtaaaccatagctctcccttgggagattacacaaatacaaggttcatctgtacttagaacaaggctcataacttcttgtagcatggacattcaacaggcacagagcaacaacattcacccaaataccagctgcaatttgtcctttaaggatgcctcacaaggatattatgtccaggtagctagtccatttatatcggggaccagttgtccttttgttgtttgtggctgtttattaaatgtagtggcacaactttgttgtgaatatgtaccatcatttgctacaatctagacagatcatcctgtctacaaaaaatcattttctacatttctaagaccattatcagtttatctgctcctgctagaaaaggacatactttttgtcaatttacattaacaaaaggctctgctactccccatttactcgctgcaatgaaaactggtaagccaagggtaaagcttaagtatcagggactatgaatttagggtagaagtgaaaataaccaaagtggaactaaatcccctattcttgagtgcaactgagatcaagtaaacttcgctggactttcttcttaactataaaactattaaccagaaggtaaagtcacacaattttacctcccaacaaacttttaaaataaaaatttccaaaaaatttagatgtctaggttttgttatatcttaccaagagttacacagacataaatttgtatttaacttcagttaaacatctattcactttttaaaaatgctgtctgcaaataaactactggacatcttaagcttactaaaaaaaacttaagatttttaaattaaaaaaaaaaaactaggacaaaaatctagcaaatggtttcacgtacctttaaacactgattcttaaaaatttatatgctgaaaatgaggtttgagaatacgtattttaaaccatttataatcctaccgtcgactctagtcagaagttatctgagcaaagagaaaataaagcctggcgtagacagtcccatagaaaatagaatccatagccactgggctgcccttcaatttcccaattcattccactaagtctcatgatgcaaatctgtcactttcatagagctatcaaaaacagaagccaagccagatcctccacactttaagatatggttccttattatctattttaacagaagtatcaaaaagtgatttttttttttatttatttttgagacagagtctcactctgttgctcaggctggagtgcaggggtgcgatctcggctcactgaacttccacctcctgggttcaagcaattcttgtgcctcagcctccctcccaagtagctgggattataggcgcacaccagctagcctggctgatttttttgctgttgtattttttgtagagatggggttttgccatgttggccaggctggtcttgaactcctgacctcaagcgatccacccacctcagcctcccaaagtgctcagattacaggtgtgagccactgcacccagccaaaaggtaattttatttggaatgcatttcatgattttatttcttgctccctgagcctgcagtgattagggtggaagggaagtggcactcaggcagataattcacaaagtcaccacacaagggtgatagatgatccaccactgagataatcaacccagtgaaaatgctacactggggaccatgttttgcccttcccagacaagacatcttgagctaggatctgagctacggctatgcagaggagcagaactgaaggctccgtttgagccctttctgcaaaaggggatgcatttcagataatgagacaagagacgggagtgagttagtacacagcacgcccaatacccaacaagcagcctcagagagactgggagaagggggagaggggactggaagccatctcttctgttctgaagggcagtgctcctcccaagacagcactcagagagccaacagcccagggcagatcacgccaggacagtgcttccatatggctggctgagcaccatattccaatctgcaaaagagtcaccttattggttcccttaacttccaaaatgcagcaagccctccttctcccatcagtgaacggaagggaagggaatgcagggcagcagggagacagagaccatcattaactacaggtctgaaaccctaattctttactcactcatcaggttgcttttaatcactgctgttgcttggtaacaggtttcagcagatttgaaatggatttcttcctcccacagtctaacaaaaacaagtagggaaacaaccaaagaataaggcaacttaaggaaaaacgcaggaagaccctgggaggcagggtcatgcaaaagctgccaatggtgtcctgatgggagctgtctgagcaaactggccacaggccgtgagtgaaagcaaagcagaagcctttctacaagacccatctcctgccaagaacccctccctgacgcctccactcgtggggtctgggataggctctttaccttctcagaggatggaggcaataccattcactgggcagtcactgtgaatattgaatgagataaaacatggcagtgtctacagcgccgggcacatagtactagataagtatttgttaaataaattaatgatcggagacattcactctcatcttccaaagttgtcagttatttctgggattaaataacacctaccctactgagactctacttatgccaagccctattctaagcacttgacacgtctcactgacatcttgcaatgacccagcaggaactgttattcccacaatttttaaacagatgaacaaactgaggagccagaggttaggtaacctgttcaaaatgacacaactagtatatgactagtcacagctcacagccagatgcatctgacttcaaagcctacattcactactagtatgctatacaggtgacatcttaaaaggtaccttggcctcatgtcccacaaagtcaatccaggcattaaaaaggacatggggctgggcatggtggctcacgcctgtaatcccagcactttgggaggccgaggcaggaggatcacttgaggtcaggagttcgagaccagcctggccaacatggtgaaaccctgtttctactaaaaatacaaaaattagccgggtgtggtggcacatgcctgtatcccagctactcaggaggctgaggcaggagaatggcttgaacccaggaggcagaggttgcagtgagccaagattgtgccacttcactccagcctgggcaacagagtgagactctgtctcaaaaaaaaaaaaaaaagaaaaa

SEQ ID NO: 374420 - DNA, 3003 bp, Homo sapiens
tggatcccccgggctgcaggttttttttttattaaagatcataatgctatcatttattgaagaaagaaagcaaaaaaaactaacaattgtgatgggggaggagagacagcttggcaacattccttttaaagttaagttagcataaagaaaacaatatttagtaaatgaaatagattttcaaggtaggaaaagtagtactcaagaatgtatttttggatacaaaaattcagttacacaatcagtagcattcaaaattagttatgagtatttatacaattacaaaaatggattcatgttttaacaacgtattttaaaagctcaaacattttaaaacaggcacaatattctaaaggcatatgcattcaccatgggcttttgaatgtcctcactcccaacttcacaatcaaaatctacagaagcggcaaaagatcagagttcagagggctattttttttttccctttccttacttaaggttgcaaacacattgacagaggcaaaataaacacgtttcatagcagaaagaccaaaaaattgaatgtaaaccatagctctcccttgggagattacacaaatacaaggttcatctgtacttagaacaaggctcataacttcttgtagcatggacattcaacaggcacagagcaacaacattcacccaaataccagctgcaatttgtcctttaaggatgcctcacaaggatattatgtccaggtagctagtccatttatatcggggaccagttgtccttttgttgtttgtggctgtttattaaatgtagtggcacaactttgttgtgaatatgtaccatcatttgctacaatctagacagatcatcctgtctacaaaaaatcattttctacatttctaagaccattatcagtttatctgctcctgctagaaaaggacatactttttgtcaatttacattaacaaaaggctctgctactccccatttactcgctgcaatgaaaactggtaagccaagggtaaagcttaagtatcagggactatgaatttagggtagaagtgaaaataaccaaagtggaactaaatcccctattcttgagtgcaactgagatcaagtaaacttcgctggactttcttcttaactataaaactattaaccagaaggtaaagtcacacaattttacctcccaacaaacttttaaaataaaaatttccaaaaaatttagatgtctaggttttgttatatcttaccaagagttacacagacataaatttgtatttaacttcagttaaacatctattcactttttaaaaatgctgtctgcaaataaactactggacatcttaagcttactaaaaaaaacttaagatttttaaattaaaaaaaaaaaactaggacaaaaatctagcaaatggtttcacgtacctttaaacactgattcttaaaaatttatatgctgaaaatgaggtttgagaatacgtattttaaaccatttataatcctaccgtcgactctagtcagaagttatctgagcaaagagaaaataaagcctggcgtagacagtcccatagaaaatagaatccatagccactgggctgcccttcaatttcccaattcattccactaagtctcatgatgcaaatctgtcactttcatagagctatcaaaaacagaagccaagccagatcctccacactttaagatatggttccttattatctattttaacagaagtatcaaaaagtgatttttttttttatttatttttgagacagagtctcactctgttgctcaggctggagtgcaggggtgcgatctcggctcactgaacttccacctcctgggttcaagcaattcttgtgcctcagcctccctcccaagtagctgggattataggcgcacaccagctagcctggctgatttttttgctgttgtattttttgtagagatggggttttgccatgttggccaggctggtcttgaactcctgacctcaagcgatccacccacctcagcctcccaaagtgctcagattacaggtgtgagccactgcacccagccaaaaggtaattttatttggaatgcatttcatgattttatttcttgctccctgagcctgcagtgattagggtggaagggaagtggcactcaggcagataattcacaaagtcaccacacaagggtgatagatgatccaccactgagataatcaacccagtgaaaatgctacactggggaccatgttttgcccttcccagacaagacatcttgagctaggatctgagctacggctatgcagaggagcagaactgaaggctccgtttgagccctttctgcaaaaggggatgcatttcagataatgagacaagagacgggagtgagttagtacacagcacgcccaatacccaacaagcagcctcagagagactgggagaagggggagaggggactggaagccatctcttctgttctgaagggcagtgctcctcccaagacagcactcagagagccaacagcccagggcagatcacgccaggacagtgcttccatatggctggctgagcaccatattccaatctgcaaaagagtcaccttattggttcccttaacttccaaaatgcagcaagccctccttctcccatcagtgaacggaagggaagggaatgcagggcagcagggagacagagaccatcattaactacaggtctgaaaccctaattctttactcactcatcaggttgcttttaatcactgctgttgcttggtaacaggtttcagcagatttgaaatggatttcttcctcccacagtctaacaaaaacaagtagggaaacaaccaaagaataaggcaacttaaggaaaaacgcaggaagaccctgggaggcagggtcatgcaaaagctgccaatggtgtcctgatgggaagatgctgtcccatcgtgggaaggtgctgtggtgagtttagggaaagctggggtaggaggggagtgggagagcccgtggagacccctgaagatcctgatgggagcagact

SEQ ID NO: 374421 - DNA, 3257 bp, Homo sapiens
tggatcccccgggctgcaggttttttttttattaaagatcataatgctatcatttattgaagaaagaaagcaaaaaaaactaacaattgtgatgggggaggagagacagcttggcaacattccttttaaagttaagttagcataaagaaaacaatatttagtaaatgaaatagattttcaaggtaggaaaagtagtactcaagaatgtatttttggatacaaaaattcagttacacaatcagtagcattcaaaattagttatgagtatttatacaattacaaaaatggattcatgttttaacaacgtattttaaaagctcaaacattttaaaacaggcacaatattctaaaggcatatgcattcaccatgggcttttgaatgtcctcactcccaacttcacaatcaaaatctacagaagcggcaaaagatcagagttcagagggctattttttttttccctttccttacttaaggttgcaaacacattgacagaggcaaaataaacacgtttcatagcagaaagaccaaaaaattgaatgtaaaccatagctctcccttgggagattacacaaatacaaggttcatctgtacttagaacaaggctcataacttcttgtagcatggacattcaacaggcacagagcaacaacattcacccaaataccagctgcaatttgtcctttaaggatgcctcacaaggatattatgtccaggtagctagtccatttatatcggggaccagttgtccttttgttgtttgtggctgtttattaaatgtagtggcacaactttgttgtgaatatgtaccatcatttgctacaatctagacagatcatcctgtctacaaaaaatcattttctacatttctaagaccattatcagtttatctgctcctgctagaaaaggacatactttttgtcaatttacattaacaaaaggctctgctactccccatttactcgctgcaatgaaaactggtaagccaagggtaaagcttaagtatcagggactatgaatttagggtagaagtgaaaataaccaaagtggaactaaatcccctattcttgagtgcaactgagatcaagtaaacttcgctggactttcttcttaactataaaactattaaccagaaggtaaagtcacacaattttacctcccaacaaacttttaaaataaaaatttccaaaaaatttagatgtctaggttttgttatatcttaccaagagttacacagacataaatttgtatttaacttcagttaaacatctattcactttttaaaaatgctgtctgcaaataaactactggacatcttaagcttactaaaaaaaacttaagatttttaaattaaaaaaaaaaaactaggacaaaaatctagcaaatggtttcacgtacctttaaacactgattcttaaaaatttatatgctgaaaatgaggtttgagaatacgtattttaaaccatttataatcctaccgtcgactctagtcagaagttatctgagcaaagagaaaataaagcctggcgtagacagtcccatagaaaatagaatccatagccactgggctgcccttcaatttcccaattcattccactaagtctcatgatgcaaatctgtcactttcatagagctatcaaaaacagaagccaagccagatcctccacactttaagatatggttccttattatctattttaacagaagtatcaaaaagtgatttttttttttatttatttttgagacagagtctcactctgttgctcaggctggagtgcaggggtgcgatctcggctcactgaacttccacctcctgggttcaagcaattcttgtgcctcagcctccctcccaagtagctgggattataggcgcacaccagctagcctggctgatttttttgctgttgtattttttgtagagatggggttttgccatgttggccaggctggtcttgaactcctgacctcaagcgatccacccacctcagcctcccaaagtgctcagattacaggtgtgagccactgcacccagccaaaaggtaattttatttggaatgcatttcatgattttatttcttgctccctgagcctgcagtgattagggtggaagggaagtggcactcaggcagataattcacaaagtcaccacacaagggtgatagatgatccaccactgagataatcaacccagtgaaaatgctacactggggaccatgttttgcccttcccagacaagacatcttgagctaggatctgagctacggctatgcagaggagcagaactgaaggctccgtttgagccctttctgcaaaaggggatgcatttcagataatgagacaagagacgggagtgagttagtacacagcacgcccaatacccaacaagcagcctcagagagactgggagaagggggagaggggactggaagccatctcttctgttctgaagggcagtgctcctcccaagacagcactcagagagccaacagcccagggcagatcacgccaggacagtgcttccatatggctggctgagcaccatattccaatctgcaaaagagtcaccttattggttcccttaacttccaaaatgcagcaagccctccttctcccatcagtgaacggaagggaagggaatgcagggcagcagggagacagagaccatcattaactacaggtctgaaaccctaattctttactcactcatcaggttgcttttaatcactgctgttgcttggtaacaggtttcagcagatttgaaatggatttcttcctcccacagtctaacaaaaacaagtagggaaacaaccaaagaataaggcaacttaaggaaaaacgcaggaagaccctgggaggcagggtcatgcaaaagctgccaatggtgtcctgatgggatcttgctcccatcagtagacaccacctagttctttctgtagtgaagggaggtagtgtgtattatagccacatttttatcctgctttgtaaaataaatgtaacttactctattagatctcagacacatctctttgattacaaggaacatgcagctttaaaaatgctttaaccccaaactggcaacttttctatcacttttttactctgttttcaagtttgaaatatttagaaaataaagatcacctctgacagttattgatgaaaaataaattgttttagatattataactttgatgtttaatgctctcaatttaaaactctgacttggaacaaagtgctgtggtttataagacctgatgagggc

SEQ ID NO: 374422 - DNA, 3009 bp, Homo sapiens
  misc_feature (2893)..(2893): n is a, c, g, or t
  misc_feature (2898)..(2898): n is a, c, g, or t
tggatcccccgggctgcaggttttttttttattaaagatcataatgctatcatttattgaagaaagaaagcaaaaaaaactaacaattgtgatgggggaggagagacagcttggcaacattccttttaaagttaagttagcataaagaaaacaatatttagtaaatgaaatagattttcaaggtaggaaaagtagtactcaagaatgtatttttggatacaaaaattcagttacacaatcagtagcattcaaaattagttatgagtatttatacaattacaaaaatggattcatgttttaacaacgtattttaaaagctcaaacattttaaaacaggcacaatattctaaaggcatatgcattcaccatgggcttttgaatgtcctcactcccaacttcacaatcaaaatctacagaagcggcaaaagatcagagttcagagggctattttttttttccctttccttacttaaggttgcaaacacattgacagaggcaaaataaacacgtttcatagcagaaagaccaaaaaattgaatgtaaaccatagctctcccttgggagattacacaaatacaaggttcatctgtacttagaacaaggctcataacttcttgtagcatggacattcaacaggcacagagcaacaacattcacccaaataccagctgcaatttgtcctttaaggatgcctcacaaggatattatgtccaggtagctagtccatttatatcggggaccagttgtccttttgttgtttgtggctgtttattaaatgtagtggcacaactttgttgtgaatatgtaccatcatttgctacaatctagacagatcatcctgtctacaaaaaatcattttctacatttctaagaccattatcagtttatctgctcctgctagaaaaggacatactttttgtcaatttacattaacaaaaggctctgctactccccatttactcgctgcaatgaaaactggtaagccaagggtaaagcttaagtatcagggactatgaatttagggtagaagtgaaaataaccaaagtggaactaaatcccctattcttgagtgcaactgagatcaagtaaacttcgctggactttcttcttaactataaaactattaaccagaaggtaaagtcacacaattttacctcccaacaaacttttaaaataaaaatttccaaaaaatttagatgtctaggttttgttatatcttaccaagagttacacagacataaatttgtatttaacttcagttaaacatctattcactttttaaaaatgctgtctgcaaataaactactggacatcttaagcttactaaaaaaaacttaagatttttaaattaaaaaaaaaaaactaggacaaaaatctagcaaatggtttcacgtacctttaaacactgattcttaaaaatttatatgctgaaaatgaggtttgagaatacgtattttaaaccatttataatcctaccgtcgactctagtcagaagttatctgagcaaagagaaaataaagcctggcgtagacagtcccatagaaaatagaatccatagccactgggctgcccttcaatttcccaattcattccactaagtctcatgatgcaaatctgtcactttcatagagctatcaaaaacagaagccaagccagatcctccacactttaagatatggttccttattatctattttaacagaagtatcaaaaagtgatttttttttttatttatttttgagacagagtctcactctgttgctcaggctggagtgcaggggtgcgatctcggctcactgaacttccacctcctgggttcaagcaattcttgtgcctcagcctccctcccaagtagctgggattataggcgcacaccagctagcctggctgatttttttgctgttgtattttttgtagagatggggttttgccatgttggccaggctggtcttgaactcctgacctcaagcgatccacccacctcagcctcccaaagtgctcagattacaggtgtgagccactgcacccagccaaaaggtaattttatttggaatgcatttcatgattttatttcttgctccctgagcctgcagtgattagggtggaagggaagtggcactcaggcagataattcacaaagtcaccacacaagggtgatagatgatccaccactgagataatcaacccagtgaaaatgctacactggggaccatgttttgcccttcccagacaagacatcttgagctaggatctgagctacggctatgcagaggagcagaactgaaggctccgtttgagccctttctgcaaaaggggatgcatttcagataatgagacaagagacgggagtgagttagtacacagcacgcccaatacccaacaagcagcctcagagagactgggagaagggggagaggggactggaagccatctcttctgttctgaagggcagtgctcctcccaagacagcactcagagagccaacagcccagggcagatcacgccaggacagtgcttccatatggctggctgagcaccatattccaatctgcaaaagagtcaccttattggttcccttaacttccaaaatgcagcaagccctccttctcccatcagtgaacggaagggaagggaatgcagggcagcagggagacagagaccatcattaactacaggtctgaaaccctaattctttactcactcatcaggttgcttttaatcactgctgttgcttggtaacaggtttcagcagatttgaaatggatttcttcctcccacagtctaacaaaaacaagtagggaaacaaccaaagaataaggcaacttaaggaaaaacgcaggaagaccctgggaggcagggtcatgcaaaagctgccaatggtgtcctgatgggnaaganggtcttcgtcccatcaggtcagagccaagaaatatggcaggattattccttagaatataacactaaattttctttagagttatccaagatgctgatgggacgaagattgcg

SEQ ID NO: 374423 - DNA, 2626 bp, Homo sapiens
tggatcccccgggctgcaggttttttttttattaaagatcataatgctatcatttattgaagaaagaaagcaaaaaaaactaacaattgtgatgggggaggagagacagcttggcaacattccttttaaagttaagttagcataaagaaaacaatatttagtaaatgaaatagattttcaaggtaggaaaagtagtactcaagaatgtatttttggatacaaaaattcagttacacaatcagtagcattcaaaattagttatgagtatttatacaattacaaaaatggattcatgttttaacaacgtattttaaaagctcaaacattttaaaacaggcacaatattctaaaggcatatgcattcaccatgggcttttgaatgtcctcactcccaacttcacaatcaaaatctacagaagcggcaaaagatcagagttcagagggctattttttttttccctttccttacttaaggttgcaaacacattgacagaggcaaaataaacacgtttcatagcagaaagaccaaaaaattgaatgtaaaccatagctctcccttgggagattacacaaatacaaggttcatctgtacttagaacaaggctcataacttcttgtagcatggacattcaacaggcacagagcaacaacattcacccaaataccagctgcaatttgtcctttaaggatgcctcacaaggatattatgtccaggtagctagtccatttatatcggggaccagttgtccttttgttgtttgtggctgtttattaaatgtagtggcacaactttgttgtgaatatgtaccatcatttgctacaatctagacagatcatcctgtctacaaaaaatcattttctacatttctaagaccattatcagtttatctgctcctgctagaaaaggacatactttttgtcaatttacattaacaaaaggctctgctactccccatttactcgctgcaatgaaaactggtaagccaagggtaaagcttaagtatcagggactatgaatttagggtagaagtgaaaataaccaaagtggaactaaatcccctattcttgagtgcaactgagatcaagtaaacttcgctggactttcttcttaactataaaactattaaccagaaggtaaagtcacacaattttacctcccaacaaacttttaaaataaaaatttccaaaaaatttagatgtctaggttttgttatatcttaccaagagttacacagacataaatttgtatttaacttcagttaaacatctattcactttttaaaaatgctgtctgcaaataaactactggacatcttaagcttactaaaaaaaacttaagatttttaaattaaaaaaaaaaaactaggacaaaaatctagcaaatggtttcacgtacctttaaacactgattcttaaaaatttatatgctgaaaatgaggtttgagaatacgtattttaaaccatttataatcctaccgtcgactctagtcagaagttatctgagcaaagagaaaataaagcctggcgtagacagtcccatagaaaatagaatccatagccactgggctgcccttcaatttcccaattcattccactaagtctcatgatgcaaatctgtcactttcatagagctatcaaaaacagaagccaagccagatcctccacactttaagatatggttccttattatctattttaacagaagtatcaaaaagtgatttttttttttatttatttttgagacagagtctcactctgttgctcaggctggagtgcaggggtgcgatctcggctcactgaacttccacctcctgggttcaagcaattcttgtgcctcagcctccctcccaagtagctgggattataggcgcacaccagctagcctggctgatttttttgctgttgtattttttgtagagatggggttttgccatgttggccaggctggtcttgaactcctgacctcaagcgatccacccacctcagcctcccaaagtgctcagattacaggtgtgagccactgcacccagccaaaaggtaattttatttggaatgcatttcatgattttatttcttgctccctgagcctgcagtgattagggtggaagggaagtggcactcaggcagataattcacaaagtcaccacacaagggtgatagatgatccaccactgagataatcaacccagtgaaaatgctacactggggaccatgttttgcccttcccagacaagacatcttgagctaggatctgagctacggctatgcagaggagcagaactgaaggctccgtttgagccctttctgcaaaaggggatgcatttcagataatgagacaagagacgggagtgagttagtacacagcacgcccaatacccaacaagcagcctcagagagactgggagaagggggagaggggactggaagccatctcttctgttctgaagggcagtgctcctcccaagacagcactcagagagccaacagcccagggcagatcacgccaggacagtgcttccatatggctggctgagcaccatattccaatctgcaaaagagtcaccttattggttcccttaacttccaaaatgcagcaagaagaaattaataaatgaaatcctgaact

SEQ ID NO: 374424 - DNA, 3305 bp, Homo sapiens
tggatcccccgggctgcaggttttttttttattaaagatcataatgctatcatttattgaagaaagaaagcaaaaaaaactaacaattgtgatgggggaggagagacagcttggcaacattccttttaaagttaagttagcataaagaaaacaatatttagtaaatgaaatagattttcaaggtaggaaaagtagtactcaagaatgtatttttggatacaaaaattcagttacacaatcagtagcattcaaaattagttatgagtatttatacaattacaaaaatggattcatgttttaacaacgtattttaaaagctcaaacattttaaaacaggcacaatattctaaaggcatatgcattcaccatgggcttttgaatgtcctcactcccaacttcacaatcaaaatctacagaagcggcaaaagatcagagttcagagggctattttttttttccctttccttacttaaggttgcaaacacattgacagaggcaaaataaacacgtttcatagcagaaagaccaaaaaattgaatgtaaaccatagctctcccttgggagattacacaaatacaaggttcatctgtacttagaacaaggctcataacttcttgtagcatggacattcaacaggcacagagcaacaacattcacccaaataccagctgcaatttgtcctttaaggatgcctcacaaggatattatgtccaggtagctagtccatttatatcggggaccagttgtccttttgttgtttgtggctgtttattaaatgtagtggcacaactttgttgtgaatatgtaccatcatttgctacaatctagacagatcatcctgtctacaaaaaatcattttctacatttctaagaccattatcagtttatctgctcctgctagaaaaggacatactttttgtcaatttacattaacaaaaggctctgctactccccatttactcgctgcaatgaaaactggtaagccaagggtaaagcttaagtatcagggactatgaatttagggtagaagtgaaaataaccaaagtggaactaaatcccctattcttgagtgcaactgagatcaagtaaacttcgctggactttcttcttaactataaaactattaaccagaaggtaaagtcacacaattttacctcccaacaaacttttaaaataaaaatttccaaaaaatttagatgtctaggttttgttatatcttaccaagagttacacagacataaatttgtatttaacttcagttaaacatctattcactttttaaaaatgctgtctgcaaataaactactggacatcttaagcttactaaaaaaaacttaagatttttaaattaaaaaaaaaaaactaggacaaaaatctagcaaatggtttcacgtacctttaaacactgattcttaaaaatttatatgctgaaaatgaggtttgagaatacgtattttaaaccatttataatcctaccgtcgactctagtcagaagttatctgagcaaagagaaaataaagcctggcgtagacagtcccatagaaaatagaatccatagccactgggctgcccttcaatttcccaattcattccactaagtctcatgatgcaaatctgtcactttcatagagctatcaaaaacagaagccaagccagatcctccacactttaagatatggttccttattatctattttaacagaagtatcaaaaagtgatttttttttttatttatttttgagacagagtctcactctgttgctcaggctggagtgcaggggtgcgatctcggctcactgaacttccacctcctgggttcaagcaattcttgtgcctcagcctccctcccaagtagctgggattataggcgcacaccagctagcctggctgatttttttgctgttgtattttttgtagagatggggttttgccatgttggccaggctggaaatacacacaataaaaaatcaaatcctggaaaagaaatacttaaaagacattgaaattataaaaagaaagcatgaagaccttcaaaaggctctaaaacagaatggggaaaaatcaacaaaaacgatagcccattatagtggacagcttactgctctgacagatgagaacacaatgctccgttctaaactggagaaggaaaaacaaagcaggcaaagactgacgaaatggaatcataccatcgtagactgaatgttgctctacatgatcatgatcaaagtcactcaacagaaagagaccaagagcttgatttccagggcacagtagataaattgcgtcatttacaggaaaatttgaattctcatgttctgattctttctcagcaactttctaaagctgagagtaagtccaggtgcctcaaaactgagctccataacacaagagaggctctgaaagaaaacgctttggtttttgaacacatacaaagagagctaaaccaaacggtgtcaaatgaaggacattgaaaaaatgtacacaagtggccaagataaagtagaaaaatgcacagaaaagcaagtaagattatgtcaactacgaagacaaaatatgttgcttcaacagcaactggatgatgttcacaacaaagctgacaatcaagaaaaaacagtaactgatattcaagccaaatgtgatgctacagcacaaaatcttcaagctgagtgcataaagcaccgtcttttgctagaagaacaagaggatgatcaataaagttaatcatttgaaagaaaaacaatgtcaatatgaaagagagaaagcagaaagagaagtagttgtgagacaacttcaacaaaaacagggtgacgtcctaaacaatcaacaacaaaagctttgctggatgcttcattgcgtcactgcgtccattgagaaagtgagatgtaggattcaaggaagaaattaggtcagatgagaattcaatttcaagaaaaatggaatcaacttacagcgactataaaatgtactaaggagacgcaaggccacgtacaaaaacttgaaatagaaaattctagtgttaagaaatacaattaaaaagcaagatggccaaattgagcagcttcagaaaatcctgcgaagttcaagtttgatgcagcagttattgcaagaaaatgaaactacagaaatagatgaagcttcttctgaatttaaatctggatcctctgtagcagaggttcccaacctacaggccatggacaggtccatgacctgttaggaaccagctgcacagcaggagagttactgtggatcttctagatcatctgcatgccatgtgaatcttaaaaccagtttttaatttctacaaa

SEQ ID NO: 374425 - DNA, 3780 bp, Homo sapiens
  misc_feature (4)..(4): n is a, c, g, or t
agtnctacttttcctaccttgaaaatctatttcatttactaacaattgtgatgggggaggagagacagcttggcaacattccttttaaagttaagttagcataaagaaaacaatatttagtaaatgaaatagattttcaaggtaggaaaagtagtactcaagaatgtatttttggatacaaaaattcagttacacaatcagtagcattcaaaattagttatgagtatttatacaattacaaaaatggattcatgttttaacaacgtattttaaaagctcaaacattttaaaacaggcacaatattctaaaggcatatgcattcaccatgggcttttgaatgtcctcactcccaacttcacaatcaaaatctacagaagcggcaaaagatcagagttcagagggctattttttttttccctttccttacttaaggttgcaaacacattgacagaggcaaaataaacacgtttcatagcagaaagaccaaaaaattgaatgtaaaccatagctctcccttgggagattacacaaatacaaggttcatctgtacttagaacaaggctcataacttcttgtagcatggacattcaacaggcacagagcaacaacattcacccaaataccagctgcaatttgtcctttaaggatgcctcacaaggatattatgtccaggtagctagtccatttatatcggggaccagttgtccttttgttgtttgtggctgtttattaaatgtagtggcacaactttgttgtgaatatgtaccatcatttgctacaatctagacagatcatcctgtctacaaaaaatcattttctacatttctaagaccattatcagtttatctgctcctgctagaaaaggacatactttttgtcaatttacattaacaaaaggctctgctactccccatttactcgctgcaatgaaaactggtaagccaagggtaaagcttaagtatcagggactatgaatttagggtagaagtgaaaataaccaaagtggaactaaatcccctattcttgagtgcaactgagatcaagtaaacttcgctggactttcttcttaactataaaactattaaccagaaggtaaagtcacacaattttacctcccaacaaacttttaaaataaaaatttccaaaaaatttagatgtctaggttttgttatatcttaccaagagttacacagacataaatttgtatttaacttcagttaaacatctattcactttttaaaaatgctgtctgcaaataaactactggacatcttaagcttactaaaaaaaacttaagatttttaaattaaaaaaaaaaaactaggacaaaaatctagcaaatggtttcacgtacctttaaacactgattcttaaaaatttatatgctgaaaatgaggtttgagaatacgtattttaaaccatttataatcctaccgtcgactctagtcagaagttatctgagcaaagagaaaataaagcctggcgtagacagtcccatagaaaatagaatccatagccactgggctgcccttcaatttcccaattcattccactaagtctcatgatgcaaatctgtcactttcatagagctatcaaaaacagaagccaagccagatcctccacactttaagatatggttccttattatctattttaacagaagtatcaaaaagtgatttttttttttatttatttttgagacagagtctcactctgttgctcaggctggagtgcaggggtgcgatctcggctcactgaacttccacctcctgggttcaagcaattcttgtgcctcagcctccctcccaagtagctgggattataggcgcacaccagctagcctggctgatttttttgctgttgtattttttgtagagatggggttttgccatgttggccaggctggtcttgaactcctgacctcaagcgatccacccacctcagcctcccaaagtgctcagattacaggtgtgagccactgcacccagccaaaaggtaattttatttggaatgcatttcatgattttatttcttgctccctgagcctgcagtgattagggtggaagggaagtggcactcaggcagataattcacaaagtcaccacacaagggtgatagatgatccaccactgagataatcaacccagtgaaaatgctacactggggaccatgttttgcccttcccagacaagacatcttgagctaggatctgagctacggctatgcagaggagcagaactgaaggctccgtttgagccctttctgcaaaaggggatgcatttcagataatgagacaagagacgggagtgagttagtacacagcacgcccaatacccaacaagcagcctcagagagactgggagaagggggagaggggactggaagccatctcttctgttctgaagggcagtgctcctcccaagacagcactcagagagccaacagcccagggcagatcacgccaggacagtgcttccatatggctggctgagcaccatattccaatctgcaaaagagtcaccttattggttcccttaacttccaaaatgcagcaagccctccttctcccatcagtgaacggaagggaagggaatgcagggcagcagggagacagagaccatcattaactacaggtctgaaaccctaattctttactcactcatcaggttgcttttaatcactgctgttgcttggtaacaggtttcagcagatttgaaatggatttcttcctcccacagtctaacaaaaacaagtagggaaacaaccaaagaataaggcaacttaaggaaaaacgcaggaagaccctgggaggcagggtcatgcaaaagctgccaatggtgtcctgatgggagctgtctgagcaaactggccacaggccgtgagtgaaagcaaagcagaagcctttctacaagacccatctcctgccaagaacccctccctgacgcctccactcgtggggtctgggataggctctttaccttctcagaggatggaggcaataccattcactgggcagtcactgtgaatattgaatgagataaaacatggcagtgtctacagcgccgggcacatagtactagataagtatttgttaaataaattaatgatcggagacattcactctcatcttccaaagttgtcagttatttctgggattaaataacacctaccctactgagactctacttatgccaagccctattctaagcacttgacacgtctcactgacatcttgcaatgacccagcaggaactgttattcccacaatttttaaacagatgaacaaactgaggagccagaggttaggtaacctgttcaaaatgacacaactagtatatgactagtcacagctcacagccagatgcatctgacttcaaagcctacattcactactagtatgctatacaggtgacatcttaaaaggtaccttggcctcatgtcccacaaagtcaatccaggcattaaaaaggacatggggctgggcatggtggctcacgcctgtaatcccagcactttgggaggccgaggcaggaggatcacttgaggtcaggagttcgagaccagcctggccaacatggtgaaaccctgtttctactaaaaatacaaaaattagccgggtgtggtggcacatgcctgtatcccagctactcaggaggctgaggcaggagaatggcttgaacccaggaggcagaggttgcagtgagccaagattgtgccacttcactccagcctgggcaacagagtgagactctgtctcaaaaaaaaaaaaaaaagaaaaa

SEQ ID NO: 374426 - DNA, 1847 bp, Homo sapiens
caaacaccacatgttctcactcataagtgggagttgaacaatgagaacacatggaaaagggaggggaacatcacataccggggcctgtccgggggtgggggctaggggagggataacattacatgtatacctatgtaacaaacccgcatgttctgcacatgtaccccagaacttaaagtataatttaaaaaaagaagtatttccagaatctcatataaaaaaagaaaattaaaaatgcagtttatttatgtaaaagatcagtggaacttaaagataatcactgagtgacttacagtaaaaattaaaaaatgaaaaagactagtgtactacaaaagagactatctgaaaaaaaagaaatatcacagaatatcaaaaactcgaatgggaacaagaactctgcagtttgagatttctgatagtcatgaaaaagaagaagacctgttgcataaaaaccatttgatgcaagatgaaattgccaggctcaggctggaaatacacacaataaaaaatcaaatcctggaaaagaaatacttaaaagacattgaaattataaaaagaaagcatgaagaccttcaaaaggctctaaaacagaatggggaaaaatcaacaaaaacgatagcccattatagtggacagcttactgctctgacagatgagaacacaatgctccgttctaaactggagaaggaaaaacaaagcaggcaaagactgacgaaatggaatcataccatcgtagactgaatgttgctctacatgatcatgatcaaagtcactcaacagaaagagaccaagagcttgatttccagggcacagtagataaattgcgtcatttacaggaaaatttgaattctcatgttctgattctttctcagcaactttctaaagctgagagtaagtccaggtgcctcaaaactgagctccataacacaagagaggctctgaaagaaaacgctttggtttttgaacacatacaaagagagctaaaccaaacggtgtcaaatgaaggacattgaaaaaatgtacacaagtggccaagataaagtagaaaaatgcacagaaaagcaagtaagattatgtcaactacgaagacaaaatatgttgcttcaacagcaactggatgatgttcacaacaaagctgacaatcaagaaaaaacagtaactgatattcaagccaaatgtgatgctacagcacaaaatcttcaagctgagtgcataaagcaccgtcttttgctagaagaacaagaggatgatcaataaagttaatcatttgaaagaaaaacaatgtcaatatgaaagagagaaagcagaaagagaagtagttgtgagacaacttcaacaaaaacagggtgacgtcctaaacaatcaacaacaaaagctttgctggatgcttcattgcgtcactgcgtccattgagaaagtgagatgtaggattcaaggaagaaattaggtcagatgagaattcaatttcaagaaaaatggaatcaacttacagcgactataaaatgtactaaggagacgcaaggccacgtacaaaaacttgaaatagaaaattctagtgttaagaaatacaattaaaaagcaagatggccaaattgagcagcttcagaaaatcctgcgaagttcaagtttgatgcagcagttattgcaagaaaatgaaactacagaaatagatgaagcttcttctgaatttaaatctggatcctctgtagcagaggttcccaacctacaggccatggacaggtccatgacctgttaggaaccagctgcacagcaggagagttactgtggatcttctagatcatctgcatgccatgtgaatcttaaaaccagtttttaatttctacaaa

SEQ ID NO: 374427 - DNA, 1870 bp, Homo sapiens
gtgcggggtcaagctctccgccttgatggtggccactgggcgggcgcgtggagcccggcgggctgggcagcagccgccgccgccgctgcgagtcaacgtggtgctcagcggcctcctcggcaagttgtttccaggcccagcgcgagcgtcgcaactccggcacgagggcaaccgactgtaccgcgagcgccaggtggaggcggcactgctcaagtacaacgaggcagttaagttggctccaaatgaccacttgctttatagcaatcggtctcagatttatttcaccttggagtctcatgagaatgcactgcatgatgcagaaatagcatgtaagctccgcccgatgggttttaaggacaatctggagctcccacattgttctagtcaggaggaagcagcagccaggggagatggcagcagtctgatggacccagctaaagtgaagggggatggtcagcagcaccacatgaaagaccaggaagaagaggaggagaagtgggatgctacctctccaaaagctgcttccagcaagactggaaaatgccaggaaaagaaaaggaaacattgccagattgaatcccaagaagaaacggggatgcctaataaagcctccaagcaagatcctcccactgatcagggggacaaacctgctctcagtttaccacttgcatctttcgacgcatctgaccttgaatgcgctctatgtatgagattattctatgagccagtcacaacaccttgcgggcatactttttgcttaaaatgcctagaaagatgcctagatcacaacgcaaagtgtccattgtgcaaagacggtctttcacagtgcttggcatcaagaaaatacagcaaaaatgtaataatggaggagctcatagctaaattccttccagaagaactgaaggaacgaaggaagctttatgaagaggaaatggaagaactttctaaccttaataagaatgtgcctattttcgtgtgtactatggcctatcccaccgttccttgtcccctgcacatctttgagccttgttaccgcctgatgattcgtagatgcattgagacaggcacgagacagtttggcatgtgccttggagatcctgtcaaagggtttgcagaatatggctgcatcctagagatcagaaatgttcaattctttgctgatggccgctcagtggttgacagcataggcaagaggcgcttcagggtgctccatcagagccagcgggatggctacaacacagccgacattgaatacattgaagaccaaaaggttcagggagaggattgtgctgagctcatgggattacataactgtgtctatcagcaagcgtcattgtggtttcattcgctcaaattatccctaaagaatcggatactcaatcactttggtcccatgccggagaaagacgccgatcctcagatgaacccgaatggcccagcctggtgctggtggatgttagcagttcttcccttggaaagccgagctcagctccccttcctagcaatgaggtccttaaaggacagactgaatggtattcgacgagtcctggccttcatatcccgaaaccaaaactagtgagtggattgccgaagaggagctcccaccttccccactgccgtcggggggagtcttcttgtaaatatatctaattgcaataatatcttaacagaagggggtgtcaaacagaggcatcagcctgctgttgatcacagagagaaattgagtagaaagaccaaaagaatgtgacctatttgaaactttctgtcttaagatgcttcttgacatgctgcataactacataaacagcagaggtgtttaagagcccagaaaaacataatttgattttaacattaaaatttccaaaagttt

SEQ ID NO: 374428 - DNA, 544 bp, Homo sapiens
tggagtctcatgagaatgcactgcatgatgcagaaatagcatgtaagctccgcccgatgggttttaaggtgagtgtgggatggaagaggtgggaaggggttgtactgtagacaggaattggcaggaagggctgcctccctggagcataggggcactagagctcaagcagaacaggaagaagactttgcaaaggagccagggtaaagatccctgggcaaagagtgactcaggtctgcaagggagctggattcttccccaattcagtcttcaactcatgaccttcagagcagcctgggcatagtgactctctagaatatgcacttgggagccagactgcctgggtttatgtcccaactctgctaacttttatgacctttgtggccctgggcaaatgacttaacttcccagtacttcatctcctcatctgttaaatgggggatattcaaagcagctactaaagagggctgttgtgaggattacataagctaataatgtaaggtgcttagaacagtgtctggcatgtagcactatataaacgttctct

SEQ ID NO: 374429 - DNA, 2138 bp, Homo sapiens
gtgcggggtcaagctctccgccttgatggtggccactgggcgggcgcgtggagcccggcgggctgggcagcagccgccgccgccgctgcgagtcaacgtggtgctcagcggcctcctcggcaagttgtttccaggcccagcgcgagcgtcgcaactccggcacgagggcaaccgactgtaccgcgagcgccaggtggaggcggcactgctcaagtacaacgaggcagttaagttggctccaaatgaccacttgctttatagcaatcggtctcagatttatttcaccttggagtctcatgagaatgcactgcatgatgcagaaatagcatgtaagctccgcccgatgggttttaaggcacatttcagaaaagcccaagccttagccaccctaggcaaggtggaggaggcactaagggagtttctctactgtgtatcccttgatggaaagaacaagagagcaagatgtgaagcccaaagagacaatctggagctcccacattgttctagtcaggaggaagcagcagccaggggagatggcagcagtctgatggacccagctaaagtgaagggggatggtcagcagcaccacatgaaagaccaggaagaagaggaggagaagtgggatgctacctctccaaaagctgcttccagcaagactggaaaatgccaggaaaagaaaaggaaacattgccagattgaatcccaagaagaaacggggatgcctaataaagcctccaagcaagatcctcccactgatcagggggacaaacctgctctcagtttaccacttgcatctttcgacgcatctgaccttgaatgcgctctatgtatgagattattctatgagccagtcacaacaccttgcgggcatactttttgcttaaaatgcctagaaagatgcctagatcacaacgcaaagtgtccattgtgcaaagacggtctttcacagtgcttggcatcaagaaaatacagcaaaaatgtaataatggaggagctcatagctaaattccttccagaagaactgaaggaacgaaggaagctttatgaagaggaaatggaagaactttctaaccttaataagaatgtgcctattttcgtgtgtactatggcctatcccaccgttccttgtcccctgcacatctttgagccttgttaccgcctgatgattcgtagatgcattgagacaggcacgagacagtttggcatgtgccttggagatcctgtcaaagggtttgcagaatatggctgcatcctagagatcagaaatgttcaattctttgctgatggccgctcagtggttgacagcataggcaagaggcgcttcagggtgctccatcagagccagcgggatggctacaacacagccgacattgaatacattgaagaccaaaaggttcagggagaggattgtgctgagctcatgggattacataactgtgtctatcagcaagcgtcattgtggtttcattcgctcaaattatccctaaagaatcggatactcaatcactttggtcccatgccggagaaagacgccgatcctcagatgaacccgaatggcccagcctggtgctggtggatgttagcagttcttcccttggaaagccgagctcagctccccttcctagcaatgaggtccttaaaggacagactgaatggtattcgacgagtcctggccttcatatcccgaaaccaaaactagtgagtggattgccgaagaggagctcccaccttccccactgccgtcggggggagtcttcttgtaaatatatctaattgcaataatatcttaacagaagggggtgtcaaacagaggcatcagcctgctgttgatcacagagagaaattgagtagaaagaccaaaagaatgtgacctatttgaaactttctgtcttaagatgcttcttgacatgctgcataactacataaacagcagaggtgtttaagagcccagaaaaacataatttgattttaacattaaaatttccaaaagtttaaagtggttttgctttaatattctttctttcataggatcaatgactgtgtggttgaaatgtgaaaacaaagatactaataatgttgctgtataatttcactgacttgaggtctcattccaaatggttcaggttttatagagcatt

SEQ ID NO: 374430 - DNA, 719 bp, Homo sapiens
tgcacacgccgaatgtccacactgacaataaagttgctctgagtttggaacactcacagatggatgacatggacatggacttagacaaggaatttctccaggacttgaaggagctcaaggtgctagtggctgacaaggaccttctggacctgcacaagagcctggtgtgcactgctctccggggaaagctgggcgtcttctctgagatggaagccaacttcaagaacctgtcccgggggctggtgaacgtggccgccaagctgacccacaataaagatgtcagagacctgtttgtggacctcgtggagaagtttgtggaaccctgccgctccgaccactggccactcagcgacgtgcggttcttcctgaatcagtattcagcgtctgtccactccctcgatggcttccgacaccaggccctctgggaccgctacatgggcaccctccgcggctgcctcctgcgcctgtatcatgactgaggtgcctcccaacgctccgcccacgctgacaataaagttgctctgagtttggagactggtcctcgctccggggagcaagtggggggcgtgcagatgtgcctgtgtctgtctctgagcacctggtgtccgtgtacaaggatggatgtgtacagtggctccttgggaactgagacatatctcagggaatggtgtctgtgctcagcccatccaccagaagagtctgctcacaagccaaaaaac

SEQ ID NO: 374431 - DNA, 1217 bp, Homo sapiens
ctcggcgctcccggaagtggcctgaaggcggcgcgccagtcccgagcagtgctcgctcctgctcggggcgctgcggccccgggcgtcgccatgaccagtgagctggacatcttcgtggggaacacgacccttatcgacgaggacgtgtatcgcctctggctcgatggttactcggtgaccgacgcggtggccctgcgggtgcgctcgggaatcctggagcagactggcgccacggcagcggtgctgcagagcgacaccatggaccattaccgcaccttccacatgctcgagcggctgctgcatgcgccgcccaagctactgcaccagctcatcttccagattccgccctcccggcaggcactactcatcgagaggtactatgcctttgatgaggcctttgttcgggaggtgctgggcaagaagctgtccaaaggcaccaagaaagacctggatgacatcagcaccaaaacaggcatcaccctcaagagctgccggagacagtttgacaactttaaacgggtcttcaaggtggtagaggaaatgcggggctccctggtggacaatattcagcaacacttcctcctctctgaccggttggccagggactatgcagccatcgtcttctttgctaacaaccgctttgagacagggaagaaaaaactgcagtatctgagcttcggtgactttgccttctgcgctgagctcatgatccaaaactggacccttggagccgtcgactcacagatggatgacatggacatggacttagacaaggaatttctccaggacttgaaggagctcaaggtgctagtggctgacaaggaccttctggacctgcacaagagcctggtgtgcactgctctccggggaaagctgggcgtcttctctgagatggaagccaacttcaagaacctgtcccgggggctggtgaacgtggccgccaagctgacccacaataaagatgtcagagacctgtttgtggacctcgtggagaagtttgtggaaccctgccgctccgaccactggccactcagcgacgtgcggttcttcctgaatcagtattcagcgtctgtccactccctcgatggcttccgacaccaggccctctgggaccgctacatgggcaccctccgcggctgcctcctgcgcctgtatcatgactgaggtgcctcccaacgctccgcccacgctgacaataaagttgctctgagtttgga

SEQ ID NO: 374432 - DNA, 1404 bp, Homo sapiens
ctcggcgctcccggaagtggcctgaaggcggcgcgccagtcccgagcagtgctcgctcctgctcggggcgctgcggccccgggcgtcgccatgaccagtgagctggacatcttcgtggggaacacgacccttatcgacgaggacgtgtatcgcctctggctcgatggttactcggtgaccgacgcggtggccctgcgggtgcgctcgggaatcctggagcagactggcgccacggcagcggtgctgcagagcgacaccatggaccattaccgcaccttccacatgctcgagcggctgctgcatgcgccgcccaagctactgcaccagctcatcttccagattccgccctcccggcaggcactactcatcgagaggtactatgcctttgatgaggcctttgttcgggaggtgctgggcaagaagctgtccaaaggcaccaagaaagacctggatgacatcagcaccaaaacaggcatcaccctcaagagctgccggagacagtttgacaactttaaacgggtcttcaaggtggtagaggaaatgcggggctccctggtggacaatattcagcaacacttcctcctctctgaccggttggccagggactatgcagccatcgtcttctttgctaacaaccgctttgagacagggaagaaaaaactgcagtatctgagcttcggtgactttgccttctgcgctgagctcatgatccaaaactggacccttggagccgtcgactcacagatggatgacatggacatggacttagacaaggaatttctccaggacttgaaggagctcaaggtgctagtggctgacaaggaccttctggacctgcacaagagcctggtgtgcactgctctccggggaaagctgggcgtcttctctgagatggaagccaacttcaagaacctgtcccgggggctggtgaacgtggccgccaagctgacccacaataaagatgtcagagacctgtttgtggacctcgtggagaagtttgtggaaccctgccgctccgaccactggccactcagcgacgtgcggttcttcctgaatcagtattcagcgtctgtccactccctcgatggcttccgacaccaggccctctgggaccgctacatgggcaccctccgcggctgcctcctgcgcctgtatcatgactgaggtgcctcccaacgctccgcccacgctgacaataaagttgctctgagtttggagactggtcctcgctccggggagcaagtggggggcgtgcagatgtgcctgtgtctgtctctgagcacctggtgtccgtgtacaaggatggatgtgtacagtggctccttgggaactgagacatatctcagggaatggtgtctgtgctcagcccatccaccagaagagtctgctcacaagccaaaaaac

SEQ ID NO: 374433 - DNA, 1122 bp, Homo sapiens
ttataggggtctgggatggaaacccttaagggcctctggcgtcggcggggcggggcctgatgctagcgtccgctttccagtgaccgacgcggtggccctgcgggtgcgctcgggaatcctggagcagactggcgccacggcagcggtgctgcagagcgacaccatggaccattaccgcaccttccacatgctcgagcggctgctgcatgcgccgcccaagctactgcaccagctcatcttccagattccgccctcccggcaggcactactcatcgagaggtactatgcctttgatgaggcctttgttcgggaggtgctgggcaagaagctgtccaaaggcaccaagaaagacctggatgacatcagcaccaaaacaggcatcaccctcaagagctgccggagacagtttgacaactttaaacgggtcttcaaggtggtagaggaaatgcggggctccctggtggacaatattcagcaacacttcctcctctctgaccggttggccagggactatgcagccatcgtcttctttgctaacaaccgctttgagacagggaagaaaaaactgcagtatctgagcttcggtgactttgccttctgcgctgagctcatgatccaaaactggacccttggagccgtcgactcacagatggatgacatggacatggacttagacaaggaatttctccaggacttgaaggagctcaaggtgctagtggctgacaaggaccttctggacctgcacaagagcctggtgtgcactgctctccggggaaagctgggcgtcttctctgagatggaagccaacttcaagaacctgtcccgggggctggtgaacgtggccgccaagctgacccacaataaagatgtcagagacctgtttgtggacctcgtggagaagtttgtggaaccctgccgctccgaccactggccactcagcgacgtgcggttcttcctgaatcagtattcagcgtctgtccactccctcgatggcttccgacaccaggccctctgggaccgctacatgggcaccctccgcggctgcctcctgcgcctgtatcatgactgaggtgcctcccaacgctccgcccacgctgacaataaagttgctctgagtttgga

SEQ ID NO: 374434 - DNA, 1425 bp, Homo sapiens
ctcggcgctcccggaagtggcctgaaggcggcgcgccagtcccgagcagtgctcgctcctgctcggggcgctgcggccccgggcgtcgccatgaccagtgagctggacatcttcgtggggaacacgacccttatcgacgaggacgtgtatcgcctctggctcgatggttactcggtgaccgacgcggtggccctgcgggtgcgctcgggaatcctggagcagactggcgccacggcagcggtgctgcagagcgacaccatggaccattaccgcaccttccacatgctcgagcggctgctgcatgcgccgcccaagctactgcaccagctcatcttccagattccgccctcccggcaggcactactcatcgagaggtgctcaccctgtgggatggtggagacatcaaccagtctgactgtatacccattttgccggctgaaacaggcccagggagggatgggatttacccagccatcagaaagttgagagtggaaggggtcagacctaggccctgctagggccccgccagactccctttcctgtcttttatggagggtcaatggtgttctctgactccacaaggtactatgcctttgatgaggcctttgttcgggaggtgctgggcaagaagctgtccaaaggcaccaagaaagacctggatgacatcagcaccaaaacaggcatcaccctcaagagctgccggagacagtttgacaactttaaacgggtcttcaaggtggtagaggaaatgcggggctccctggtggacaatattcagcaacacttcctcctctctgaccggttggccagggactatgcagccatcgtcttctttgctaacaaccgctttgagacagggaagaaaaaactgcagtatctgagcttcggtgactttgccttctgcgctgagctcatgatccaaaactggacccttggagccgtcgactcacagatggatgacatggacatggacttagacaaggaatttctccaggacttgaaggagctcaaggtgctagtggctgacaaggaccttctggacctgcacaagagcctggtgtgcactgctctccggggaaagctgggcgtcttctctgagatggaagccaacttcaagaacctgtcccgggggctggtgaacgtggccgccaagctgacccacaataaagatgtcagagacctgtttgtggacctcgtggagaagtttgtggaaccctgccgctccgaccactggccactcagcgacgtgcggttcttcctgaatcagtattcagcgtctgtccactccctcgatggcttccgacaccaggccctctgggaccgctacatgggcaccctccgcggctgcctcctgcgcctgtatcatgactgaggtgcctcccaacgctccgcccacgctgacaataaagttgctctgagtttgga

SEQ ID NO: 374435 - DNA, 1238 bp, Homo sapiens
ctcggcgctcccggaagtggcctgaaggcggcgcgccagtcccgagcagtgctcgctcctgctcggggcgctgcggccccgggcgtcgccatgaccagtgagctggacatcttcgtggggaacacgacccttatcgacgaggacgtgtatcgcctctggctcgatggttactcggtgaccgacgcggtggccctgcgggtgcgctcgggaatcctggagcagactggcgccacggcagcggtgctgcagagcgacaccatggaccattaccgcaccttccacatgctcgagcggctgctgcatgcgccgcccaagctactgcaccagctcatcttccagattccgccctcccggcaggcactactcatcgagaggtactatgcctttgatgaggcctttgttcgggaggtgctgggcaagaagctgtccaaaggcaccaagaaagacctggatgacatcagcaccaaaacaggcatcaccctcaagagctgccggagacagtttgacaactttaaacgggtcttcaaggtggtagaggaaatgcggggctccctggtggacaatattcagcaacacttcctcctctctgaccggttggccagggactatgcagccatcgtcttctttgctaacaaccgctttgagacagggaagaaaaaactgcagtatctgagcttcggtgactttgccttctgcgctgagctcatgatccaaaactggacccttggagccgtcggtgaggcccccactgacccagactcacagatggatgacatggacatggacttagacaaggaatttctccaggacttgaaggagctcaaggtgctagtggctgacaaggaccttctggacctgcacaagagcctggtgtgcactgctctccggggaaagctgggcgtcttctctgagatggaagccaacttcaagaacctgtcccgggggctggtgaacgtggccgccaagctgacccacaataaagatgtcagagacctgtttgtggacctcgtggagaagtttgtggaaccctgccgctccgaccactggccactcagcgacgtgcggttcttcctgaatcagtattcagcgtctgtccactccctcgatggcttccgacaccaggccctctgggaccgctacatgggcaccctccgcggctgcctcctgcgcctgtatcatgactgaggtgcctcccaacgctccgcccacgctgacaataaagttgctctgagtttgga

SEQ ID NO: 374436 - DNA, 968 bp, Homo sapiens
ggggttggatttagagataagattgagtaaacatttatccaaggcaagatacagcaggagttgctaagcatttgatttgataacaagtactaataactaatagttggttgaaggaataacaaatgctaaatcagcatctgctgactggataggtggatggggaagggagagatgttcaataagtggtttattgggtgagcgacacagtgtacactctgaccagtcctctcttctaccctaactgccctgcagtttgacaactttaaacgggtcttcaaggtggtagaggaaatgcggggctccctggtggacaatattcagcaacacttcctcctctctgaccggttggccagggactatgcagccatcgtcttctttgctaacaaccgctttgagacagggaagaaaaaactgcagtatctgagcttcggtgactttgccttctgcgctgagctcatgatccaaaactggacccttggagccgtcgactcacagatggatgacatggacatggacttagacaaggaatttctccaggacttgaaggagctcaaggtgctagtggctgacaaggaccttctggacctgcacaagagcctggtgtgcactgctctccggggaaagctgggcgtcttctctgagatggaagccaacttcaagaacctgtcccgggggctggtgaacgtggccgccaagctgacccacaataaagatgtcagagacctgtttgtggacctcgtggagaagtttgtggaaccctgccgctccgaccactggccactcagcgacgtgcggttcttcctgaatcagtattcagcgtctgtccactccctcgatggcttccgacaccaggccctctgggaccgctacatgggcaccctccgcggctgcctcctgcgcctgtatcatgactgaggtgcctcccaacgctccgcccacgctgacaataaagttgctctgagtttgga

SEQ ID NO: 374437 - DNA, 1562 bp, Homo sapiens
ctcggcgctcccggaagtggcctgaaggcggcgcgccagtcccgagcagtgctcgctcctgctcggggcgctgcggccccgggcgtcgccatgaccagtgagctggacatcttcgtggggaacacgacccttatcgacgaggacgtgtatcgcctctggctcgatggttactcggtgaccgacgcggtggccctgcgggtgcgctcgggaatcctggagcagactggcgccacggcagcggtgctgcagagcgacaccatggaccattaccgcaccttccacatgctcgagcggctgctgcatgcgccgcccaagctactgcaccagctcatcttccagattccgccctcccggcaggcactactcatcgagaggtactatgcctttgatgaggcctttgttcgggaggtgctgggcaagaagctgtccaaaggcaccaagaaagacctggatgacatcagcaccaaaacaggcatcaccctcaagagctgccggagacagtttgacaactttaaacgggtcttcaaggtggtagaggaaatgcggggctccctggtggacaatattcagcaacacttcctcctctctgaccggttggccagggactatgcagccatcgtcttctttgctaacaaccgctttgagacagggaagaaaaaactgcagtatctgagcttcggtgactttgccttctgcgctgagctcatgatccaaaactggacccttggagccgtcggtgaggcccccactgacccaggtgcctggacgcctccccatcctcaggacctgattccccaccagtagtttctcccacaggccctcagttcctggcatccgctcctgttcatggcccccacccaggctccccctgcccatagaatgttttccccacacacaccttgtctgcagacaaagggcccattgcctctctgtggcctggggcatgtcactccatctctctgacactccatttcctcttttgtccccaggggggaaataaggtggtgggtgaggaaaggcttaggctatcacaggaggggtttttatcacccacccccaccccctttcatggcctcacagaactcacagatggatgacatggacatggacttagacaaggaatttctccaggacttgaaggagctcaaggtgctagtggctgacaaggaccttctggacctgcacaagagcctggtgtgcactgctctccggggaaagctgggcgtcttctctgagatggaagccaacttcaagaacctgtcccgggggctggtgaacgtggccgccaagctgacccacaataaagatgtcagagacctgtttgtggacctcgtggagaagtttgtggaaccctgccgctccgaccactggccactcagcgacgtgcggttcttcctgaatcagtattcagcgtctgtccactccctcgatggcttccgacaccaggccctctgggaccgctacatgggcaccctccgcggctgcctcctgcgcctgtatcatgactgaggtgcctcccaacgctccgcccacgctgacaataaagttgctctgagtttgga

SEQ ID NO: 374438 - DNA, 1181 bp, Homo sapiens
ctcggcgctcccggaagtggcctgaaggcggcgcgccagtcccgagcagtgctcgctcctgctcggggcgctgcggccccgggcgtcgccatgaccagtgagctggacatcttcgtggggaacacgacccttatcgacgaggacgtgtatcgcctctggctcgatggttactcggtgaccgacgcggtggccctgcgggtgcgctcgggaatcctggagcagactggcgccacggcagcggtgctgcagagcgacaccatggaccattaccgcaccttccacatgctcgagcggctgctgcatgcgccgcccaagctactgcaccagctcatcttccagattccgccctcccggcaggcactactcatcgagaggtactatgcctttgatgaggcctttgttcgggaggtgctgggcaagaagctgtccaaaggcaccaagaaagacctggatgacatcagcaccaaaacaggcatcaccctcaagagctgccggagacagtttgacaactttaaacgggtcttcaaggtggtagaggaaatgcggggctccctggtggacaatattcagcaacacttcctcctctctgaccggttggccagggactatgcagccatcgtcttctttgctaacaaccgctttgagacagggaagaaaaaactgcagtatctgagcttcggtgactttgccttctgcgctgagctcatgatccaaaactggacccttggagccgtcgactcacagatggatgacatggacatggacttagacaaggaatttctccaggacttgaaggagctcaaggtgctagtggctgacaaggaccttctggacctgcacaagagcctggtgtgcactgctctccggggaaagctgggcgtcttctctgagatggaagccaacttcaagctgacccacaataaagatgtcagagacctgtttgtggacctcgtggagaagtttgtggaaccctgccgctccgaccactggccactcagcgacgtgcggttcttcctgaatcagtattcagcgtctgtccactccctcgatggcttccgacaccaggccctctgggaccgctacatgggcaccctccgcggctgcctcctgcgcctgtatcatgactgaggtgcctcccaacgctccgcccacgctgacaataaagttgctctgagtttgga

SEQ ID NO: 374439 - DNA, 1137 bp, Homo sapiens
ctcggcgctcccggaagtggcctgaaggcggcgcgccagtcccgagcagtgctcgctcctgctcggggcgctgcggccccgggcgtcgccatgaccagtgagctggacatcttcgtggggaacacgacccttatcgacgaggacgtgtatcgcctctggctcgatggttactcggtgaccgacgcggtggccctgcgggtgcgctcgggaatcctggagcagactggcgccacggcagcggtgctgcagagcgacaccatggaccattaccgcaccttccacatgctcgagcggctgctgcatgcgccgcccaagctactgcaccagctcatcttccagattccgccctcccggcaggcactactcatcgagaggtactatgcctttgatgaggcctttgttcgggaggtgctgggcaagaagctgtccaaaggcaccaagaaagacctggatgacatcagcaccaaaacaggcatcaccctcaagagctgccggagacagggactatgcagccatcgtcttctttgctaacaaccgctttgagacagggaagaaaaaactgcagtatctgagcttcggtgactttgccttctgcgctgagctcatgatccaaaactggacccttggagccgtcggtgaggcccccactgacccagactcacagatggatgacatggacatggacttagacaaggaatttctccaggacttgaaggagctcaaggtgctagtggctgacaaggaccttctggacctgcacaagagcctggtgtgcactgctctccggggaaagctgggcgtcttctctgagatggaagccaacttcaagaacctgtcccgggggctggtgaacgtggccgccaagctgacccacaataaagatgtcagagacctgtttgtggacctcgtggagaagtttgtggaaccctgccgctccgaccactggccactcagcgacgtgcggttcttcctgaatcagtattcagcgtctgtccactccctcgatggcttccgacaccaggccctctgggaccgctacatgggcaccctccgcggctgcctcctgcgcctgtatcatgactgaggtgcctcccaacgctccgcccacgctgacaataaagttgctctgagtttgga

SEQ ID NO: 374440 - DNA, 1483 bp, Homo sapiens
ctcggcgctcccggaagtggcctgaaggcggcgcgccagtcccgagcagtgctcgctcctgctcggggcgctgcggccccgggcgtcgccatgaccagtgagctggacatcttcgtggggaacacgacccttatcgacgaggacgtgtatcgcctctggctcgatggttactcggtgaccgacgcggtggccctgcgggtgcgctcgggaatcctggagcagactggcgccacggcagcggtgctgcagagcgacaccatggaccattaccgcaccttccacatgctcgagcggctgctgcatgcgccgcccaagctactgcaccagctcatcttccagattccgccctcccggcaggcactactcatcgagaggtactatgcctttgatgaggcctttgttcgggaggtgctgggcaagaagctgtccaaaggcaccaagaaagacctggatgacatcagcaccaaaacaggcatcaccctcaagagctgccggagacagtttgacaactttaaacgggtcttcaaggtggtagaggaaatgcggggctccctggtggacaatattcagcaacacttcctcctctctgaccggttggccagggactatgcagccatcgtcttctttgctaacaaccgctttgagacagggaagaaaaaactgcagtatctgagcttcggtgactttgccttctgcgctgagctcatgatccaaaactggacccttggagccgtcgactcacagatggatgacatggacatggacttagacaaggaatttctccaggacttgaaggagctcaaggtgctagtggctgacaaggaccttctggacctgcacaagaggtgaccttgtaggggcccatggggcggggcctgcagtaggggcccaggtggctataggcgtgaccctgtctctctgcagcctggtgtgcactgctctccggggaaagctgggcgtcttctctgagatggaagccaacttcaagaacctgtcccgggggctggtgaacgtggccgccaagctgacccacaataaagatgtcagagacctgtttgtggacctcgtggagaagtttgtggaaccctgccgctccgaccactggccactcagcgacgtgcggttcttcctgaatcagtattcagcgtctgtccactccctcgatggcttccgacaccaggccctctgggaccgctacatgggcaccctccgcggctgcctcctgcgcctgtatcatgactgaggtgcctcccaacgctccgcccacgctgacaataaagttgctctgagtttggagactggtcctcgctccggggagcaagtggggggcgtgcagatgtgcctgtgtctgtctctgagcacctggtgtccgtgtacaaggatggatgtgtacagtggctccttgggaactgagacatatctcagggaatggtgtctgtgctcagcccatccaccagaagagtctgctcacaagccaaaaaac

SEQ ID NO: 374441 - DNA, 1246 bp, Homo sapiens
ctcggcgctcccggaagtggcctgaaggcggcgcgccagtcccgagcagtgctcgctcctgctcggggcgctgcggccccgggcgtcgccatgaccagtgagctggacatcttcgtggggaacacgacccttatcgacgaggacgtgtatcgcctctggctcgatggttactcggtgaccgacgcggtggccctgcgggtgcgctcgggaatcctggagcagactggcgccacggcagcggtgctgcagagcgacaccatggaccattaccgcaccttccacatgctcgagcggctgctgcatgcgccgcccaagctactgcaccagctcatcttccagattccgccctcccggcaggcactactcatcgagaggtactatgcctttgatgaggcctttgttcgggaggtgctgggcaagaagctgtccaaaggcaccaagaaagacctggatgacatcagcaccaaaacaggcatcaccctcaagagctgccggagacagtttgacaactttaaacgggtcttcaaggtggtagaggaaatgcggggctccctggtggacaatattcagcaacacttcctcctctctgaccggttggccagggactatgcagccatcgtcttctttgctaacaaccgctttgagacagggaagaaaaaactgcagtatctgagcttcggtgactttgccttctgcgctgagctcatgatccaaaactggacccttggagccgtcggacttgaaggagctcaaggtgctagtggctgacaaggaccttctggacctgcacaagaggtgaccttgtaggggcccatggggcggggcctgcagtaggggcccaggtggctataggcgtgaccctgtctctctgcagcctggtgtgcactgctctccggggaaagctgggcgtcttctctgagatggaagccaacttcaagaacctgtcccgggggctggtgaacgtggccgccaagctgacccacaataaagatgtcagagacctgtttgtggacctcgtggagaagtttgtggaaccctgccgctccgaccactggccactcagcgacgtgcggttcttcctgaatcagtattcagcgtctgtccactccctcgatggcttccgacaccaggccctctgggaccgctacatgggcaccctccgcggctgcctcctgcgcctgtatcatgactgaggtgcctcccaacgctccgcccacgctgacaataaagttgctctgagtttgga

SEQ ID NO: 374442 - DNA, 1202 bp, Homo sapiens
ctcggcgctcccggaagtggcctgaaggcggcgcgccagtcccgagcagtgctcgctcctgctcggggcgctgcggccccgggcgtcgccatgaccagtgagctggacatcttcgtggggaacacgacccttatcgacgaggacgtgtatcgcctctggctcgatggttactcggtgaccgacgcggtggccctgcgggtgcgctcgggaatcctggagcagactggcgccacggcagcggtgctgcagagcgacaccatggaccattaccgcaccttccacatgctcgagcggctgctgcatgcgccgcccaagctactgcaccagctcatcttccagattccgccctcccggcaggcactactcatcgagaggtactatgcctttgatgaggcctttgttcgggaggtgctgggcaagaagctgtccaaaggcaccaagaaagacctggatgacatcagcaccaaaacaggcatcaccctcaagagctgccggagacagtttgacaactttaaacgggtcttcaaggtggtagaggaaatgcggggctccctggtggacaatattcagcaacacttcctcctctctgaccggttggccagggactatgcagccatcgtcttctttgctaacaaccgctttgagacagggaagaaaaaactgcagtatctgagcttcggtgactttgccttctgcgctgagctcatgatccaaaactggacccttggagccgtcggtgaggcccccactgacccagactcacagatggatgacatggacatggacttagacaaggaatttctccaggacttgaaggagctcaaggtgctagtggctgacaaggaccttctggacctgcacaagagcctggtgtgcactgctctccggggaaagctgggcgtcttctctgagatggaagccaacttcaagctgacccacaataaagatgtcagagacctgtttgtggacctcgtggagaagtttgtggaaccctgccgctccgaccactggccactcagcgacgtgcggttcttcctgaatcagtattcagcgtctgtccactccctcgatggcttccgacaccaggccctctgggaccgctacatgggcaccctccgcggctgcctcctgcgcctgtatcatgactgaggtgcctcccaacgctccgcccacgctgacaataaagttgctctgagtttgga

SEQ ID NO: 374443 - DNA, 755 bp, Homo sapiens
ctcggcgctcccggaagtggcctgaaggcggcgcgccagtcccgagcagtgctcgctcctgctcggggcgctgcggccccgggcgtcgccatgaccagtgagctggacatcttcgtggggaacacgacccttatcgacgaggacgtgtatcgcctctggctcgatggttactcggtgaccgacgcggtggccctgcgggtgcgctcgggaatcctggagcagactggcgccacggcagcggtgctgcagagcgacaccatggaccattaccgcaccttccacatgctcgagcggctgctgcatgcgccgcccaagctactgcaccagctcatcttccagattccgccctcccggcaggcactactcatcgagaggtactatgcctttgatgaggcctttgttcgggaggtgctgggcaagaagctgtccaaaggcaccaagaaagacctggatgacatcagcaccaaaacaggcatcaccctcaagagctgccggagacagggtatgcactgcatccacacggacacagcatcccatctacacttcactccctccctttggccactggcccagttccagcctctgattgtggcagcagcttcatacctagtcttctcctcccttcccctttcccctccttttttttttttttttttcgagatggagtcttgctctgtggcccaagctggagtgcagtggcgcgacctcagctcactgcaacctccgcctcctgggttcaggtaattcttgtgcct

SEQ ID NO: 374444 - DNA, 536 bp, Homo sapiens
ctcggcgctcccggaagtggcctgaaggcggcgcgccagtcccgagcagtgctcgctcctgctcggggcgctgcggccccgggcgtcgccatgaccagtgagctggacatcttcgtggggaacacgacccttatcgacgaggacgtgtatcgcctctggctcgatggttactcggtgaccgacgcggtggccctgcgggtgcgctcgggaatcctggagcagactggcgccacggcagcggtgctgcagagcgacaccatggaccattaccgcaccttccacatgctcgcaaggatccttaatttaattaatcccccccccccggcgcagcatctgtcttgctggaagctttttcctagaggttgagcggtttgcacaatgtcggaaatggctgagttgtccgagctgtatgaagagagcagtgacctgcagatggatgtgatgcctggcgagggtgaccttccgcagatggaggtaggcagcgggagccgggagctatccctgcgtccctcccgcagcggggcccaacagctcga

SEQ ID NO: 374445 - DNA, 909 bp, Homo sapiens
ggggttggatttagagataagattgagtaaacatttatccaaggcaagatacagcaggagttgctaagcatttgatttgataacaagtactaataactaatagttggttgaaggaataacaaatgctaaatcagcatctgctgactggataggtggatggggaagggagagatgttcaataagtggtttattgggtgagcgacacagtgtacactctgaccagtcctctcttctaccctaactgccctgcagtttgacaactttaaacgggtcttcaaggtggtagaggaaatgcggggctccctggtggacaatattcagcaacacttcctcctctctgaccggttggccagggactatgcagccatcgtcttctttgctaacaaccgctttgagacagggaagaaaaaactgcagtatctgagcttcggtgactttgccttctgcgctgagctcatgatccaaaactggacccttggagccgtcgactcacagatggatgacatggacatggacttagacaaggaatttctccaggacttgaaggagctcaaggtgctagtggctgacaaggaccttctggacctgcacaagagcctggtgtgcactgctctccggggaaagctgggcgtcttctctgagatggaagccaacttcaagagacctgtttgtggacctcgtggagaagtttgtggaaccctgccgctccgaccactggccactcagcgacgtgcggttcttcctgaatcagtattcagcgtctgtccactccctcgatggcttccgacaccaggccctctgggaccgctacatgggcaccctccgcggctgcctcctgcgcctgtatcatgactgaggtgcctcccaacgctccgcccacgctgacaataaagttgctctgagtttgga

SEQ ID NO: 374446 - DNA, 1245 bp, Homo sapiens
ggcacgaggagagagagagagagagagagagagagagagagagagagagagagagagagagagagagtcccgagcagtgctcgctcctgctcggggcgctgcggccccgggcgtcgccatgaccagtgagctggacatcttcgtggggaacacgacccttatcgacgaggacgtgtatcgcctctggctcgatggttactcggtgaccgacgcggtggccctgcgggtgcgctcgggaatcctggagcagactggcgccacggcagcggtgctgcagagcgacaccatggaccattaccgcaccttccacatgctcgagcggctgctgcatgcgccgcccaagctactgcaccagctcatcttccagattccgccctcccggcaggcactactcatcgagaggtactatgcctttgatgaggcctttgttcgggaggtgctgggcaagaagctgtccaaaggcaccaagaaagacctggatgacatcagcaccaaaacaggcatcaccctcaagagctgccggagacagtttgacaactttaaacgggtcttcaaggtggtagaggaaatgcggggctccctggtggacaatattcagcaacacttcctcctctctgaccggttggccagggactatgcagccatcgtcttctttgctaacaaccgctttgagacagggaagaaaaaactgcagtatctgagcttcggtgactttgccttctgcgctgagctcatgatccaaaactggacccttggagccgtcgactcacagatggatgacatggacatggacttagacaaggaatttctccaggacttgaaggagctcaaggtgctagtggctgacaaggaccttctggacctgcacaagagcctggtgtgcactgctctccggggaaagctgggcgtcttctctgagatggaagccaacttcaagaacctgtcccgggggctggtgaacgtggccgccaagctgacccacaataaagatgtcagagacctgtttgtggacctcgtggagaagtttgtggaaccctgccgctccgaccactggccactcagcgacgtgcggttcttcctgaatcagtattcagcgtctgtccactccctcgatggcttccgacaccaggccctctgggaccgctacatgggcaccctccgcggctgcctcctgcgcctgtatcatgactgaggtgcctcccaacgctccgcccacgctgacaataaagttgctctgagtttgga

SEQ ID NO: 374447 - DNA, 1307 bp, Homo sapiens
ctcggcgctcccggaagtggcctgaaggcggcgcgccagtcccgagcagtgctcgctcctgctcggggcgctgcggccccgggcgtcgccatgaccagtgagctggacatcttcgtggggaacacgacccttatcgacgaggacgtgtatcgcctctggctcgatggttactcggtgaccgacgcggtggccctgcgggtgcgctcgggaatcctggagcagactggcgccacggcagcggtgctgcagagcgacaccatggaccattaccgcaccttccacatgctcgagcggctgctgcatgcgccgcccaagctactgcaccagctcatcttccagattccgccctcccggcaggcactactcatcgagaggtactatgcctttgatgaggcctttgttcgggaggtgctgggcaagaagctgtccaaaggcaccaagaaagacctggatgacatcagcaccaaaacaggcatcaccctcaagagctgccggagacagtttgacaactttaaacgggtcttcaaggtggtagaggaaatgcggggctccctggtggacaatattcagcaacacttcctcctctctgaccggttggccagggactatgcagccatcgtcttctttgctaacaaccgctttgagacagggaagaaaaaactgcagtatctgagcttcggtgactttgccttctgcgctgagctcatgatccaaaactggacccttggagccgtcgactcacagatggatgacatggacatggacttagacaaggaatttctccaggacttgaaggagctcaaggtgctagtggctgacaaggaccttctggacctgcacaagagcctggtgtgcactgctctccggggaaagctgggcgtcttctctgagatggaagccaacttcaagaacctgtcccgggggctggtgaacgtggccgccaagctgacccacaataaagatgtcagagacctgtttgtggacctcgtggagaagtttgtggaaccctgccgctccgaccactggccactcagcgacgtgcggttcttcctgaatcagtattcagcgtctgtccactccctcgatggcttccgacaccaggccctctgggaccgctacatgggcaccctccgcggctgcctcctgcgcctgtatcatgactgaggtgcctcccaactcagagcaacggggtgcggactagggcggccgagagccatggcggcgctattggcggcggcggcagtgcgagcccggatcctgcaggtttcttccaaggtgaaatccagtcccacctggtattcagcatc

SEQ ID NO: 374448 - DNA, 1299 bp, Homo sapiens
ctcggcgctcccggaagtggcctgaaggcggcgcgccagtcccgagcagtgctcgctcctgctcggggcgctgcggccccgggcgtcgccatgaccagtgagctggacatcttcgtggggaacacgacccttatcgacgaggacgtgtatcgcctctggctcgatggttactcggtgaccgacgcggtggccctgcgggtgcgctcgggaatcctggagcagactggcgccacggcagcggtgctgcagagcgacaccatggaccattaccgcaccttccacatgctcgagcggctgctgcatgcgccgcccaagctactgcaccagctcatcttccagattccgccctcccggcaggcactactcatcgagaggtactatgcctttgatgaggcctttgttcgggaggtgctgggcaagaagctgtccaaaggcaccaagaaagacctggatgacatcagcaccaaaacaggcatcaccctcaagagctgccggagacagtttgacaactttaaacgggtcttcaaggtggtagaggaaatgcggggctccctggtggacaatattcagcaacacttcctcctctctgaccggttggccagggactatgcagccatcgtcttctttgctaacaaccgctttgagacagggaagaaaaaactgcagtatctgagcttcggtgactttgccttctgcgctgagctcatgatccaaaactggacccttggagccgtcgactcacagatggatgacatggacatggacttagacaaggaatttctccaggacttgaaggagctcaaggtgctagtggctgacaaggaccttctggacctgcacaagagcctggtgtgcactgctctccggggaaagctgggcgtcttctctgagatggaagccaacttcaagaacctgtcccgggggctggtgaacgtggccgccaagctgacccacaataaagatgtcagagacctgtttgtggacctcgtggagaagtttgtggaaccctgccgctccgaccactggccactcagcgacgtgcggttcttcctgaatcagtattcagcgtctgtccactccctcgatggcttccgggtgagcagccctgtcctcctgtccagcttggctttgccccagcctgccacctgccaggacctcgcctcctgcagactcaagacaccaggccctctgggaccgctacatgggcaccctccgcggctgcctcctgcgcctgtatcatgactgaggtgcctcccaacgctccgcccacgctgacaataaagttgctctgagtttgga

SEQ ID NO: 374449 - DNA, 1496 bp, Homo sapiens
ctcggcgctcccggaagtggcctgaaggcggcgcgccagtcccgagcagtgctcgctcctgctcggggcgctgcggccccgggcgtcgccatgaccagtgagctggacatcttcgtggggaacacgacccttatcgacgaggacgtgtatcgcctctggctcgatggttactcggtgaccgacgcggtggccctgcgggtgcgctcgggaatcctggagcagactggcgccacggcagcggtgctgcagagcgacaccatggaccattaccgcaccttccacatgctcgagcggctgctgcatgcgccgcccaagctactgcaccagctcatcttccagattccgccctcccggcaggcactactcatcgagaggtactatgcctttgatgaggcctttgttcgggaggtgctgggcaagaagctgtccaaaggcaccaagaaagacctggatgacatcagcaccaaaacaggcatcaccctcaagagctgccggagacagtttgacaactttaaacgggtcttcaaggtggtagaggaaatgcggggctccctggtggacaatattcagcaacacttcctcctctctgaccggttggccagggactatgcagccatcgtcttctttgctaacaaccgctttgagacagggaagaaaaaactgcagtatctgagcttcggtgactttgccttctgcgctgagctcatgatccaaaactggacccttggagccgtcgactcacagatggatgacatggacatggacttagacaaggaatttctccaggacttgaaggagctcaaggtgctagtggctgacaaggaccttctggacctgcacaagagcctggtgtgcactgctctccggggaaagctgggcgtcttctctgagatggaagccaacttcaagggtctgtggtcccatccagcctctgacccttggcatcttcagcctccagttcgccacccctaccgggcagctctgcccctgccagggattggccggcaggtggcactgctgctccctctggtggccgctgacgggagcagctcataaacaatggggacttggttgatggagggaggtggatggatctggggaggggcctgctcctcctcccccagcttctgtgctcagctgccaacttctggggcagaaagcagagctccaaggatccctgccccacagaacctgtcccgggggctggtgaacgtggccgccaagctgacccacaataaagatgtcagagacctgtttgtggacctcgtggagaagtttgtggaaccctgccgctccgaccactggccactcagcgacgtgcggttcttcctgaatcagtattcagcgtctgtccactccctcgatggcttccgacaccaggccctctgggaccgctacatgggcaccctccgcggctgcctcctgcgcctgtatcatgactgaggtgcctcccaacgctccgcccacgctgacaataaagttgctctgagtttgga

SEQ ID NO: 374450 - DNA, 1249 bp, Homo sapiens
ctcggcgctcccggaagtggcctgaaggcggcgcgccagtcccgagcagtgctcgctcctgctcggggcgctgcggccccgggcgtcgccatgaccagtgagctggacatcttcgtggggaacacgacccttatcgacgaggacgtgtatcgcctctggctcgatggttactcggtgaccgacgcggtggccctgcgggtgcgctcgggaatcctggagcagactggcgccacggcagcggtgctgcagagcgacaccatggaccattaccgcaccttccacatgctcgagcggctgctgcatgcgccgcccaagctactgcaccagctcatcttccagattccgccctcccggcaggcactactcatcgagaggtactatgcctttgatgaggcctttgttcgggaggtgctgggcaagaagctgtccaaaggcaccaagaaagacctggatgacatcagcaccaaaacaggcatcaccctcaagagctgccggagacagtttgacaactttaaacgggtcttcaaggtggtagaggaaatgcggggctccctggtggacaatattcagcaacacttcctcctctctgaccggttggccagggactatgcagccatcgtcttctttgctaacaaccgctttgagacagggaagaaaaaactgcagtatctgagcttcggtgactttgccttctgcgctgagctcatgatccaaaactggacccttggagccgtcgactcacagatggatgacatggacatggacttagacaaggaatttctccaggacttgaaggagctcaaggtgctagtggctgacaaggaccttctggacctgcacaagagcctggtgtgcactgctctccggggaaagctgggcgtcttctctgagatggaagccaacttcaagaaagcagagctccaaggatccctgccccacagaacctgtcccgggggctggtgaacgtggccgccaagctgacccacaataaagatgtcagagacctgtttgtggacctcgtggagaagtttgtggaaccctgccgctccgaccactggccactcagcgacgtgcggttcttcctgaatcagtattcagcgtctgtccactccctcgatggcttccgacaccaggccctctgggaccgctacatgggcaccctccgcggctgcctcctgcgcctgtatcatgactgaggtgcctcccaacgctccgcccacgctgacaataaagttgctctgagtttgga

SEQ ID NO: 374451 - DNA, 1116 bp, Homo sapiens
ctcggcgctcccggaagtggcctgaaggcggcgcgccagtcccgagcagtgctcgctcctgctcggggcgctgcggccccgggcgtcgccatgaccagtgagctggacatcttcgtggggaacacgacccttatcgacgaggacgtgtatcgcctctggctcgatggttactcggtgaccgacgcggtggccctgcgggtgcgctcgggaatcctggagcagactggcgccacggcagcggtgctgcagagcgacaccatggaccattaccgcaccttccacatgctcgagcggctgctgcatgcgccgcccaagctactgcaccagctcatcttccagattccgccctcccggcaggcactactcatcgagaggtactatgcctttgatgaggcctttgttcgggaggtgctgggcaagaagctgtccaaaggcaccaagaaagacctggatgacatcagcaccaaaacaggcatcaccctcaagagctgccggagacagggactatgcagccatcgtcttctttgctaacaaccgctttgagacagggaagaaaaaactgcagtatctgagcttcggtgactttgccttctgcgctgagctcatgatccaaaactggacccttggagccgtcgactcacagatggatgacatggacatggacttagacaaggaatttctccaggacttgaaggagctcaaggtgctagtggctgacaaggaccttctggacctgcacaagagcctggtgtgcactgctctccggggaaagctgggcgtcttctctgagatggaagccaacttcaagaacctgtcccgggggctggtgaacgtggccgccaagctgacccacaataaagatgtcagagacctgtttgtggacctcgtggagaagtttgtggaaccctgccgctccgaccactggccactcagcgacgtgcggttcttcctgaatcagtattcagcgtctgtccactccctcgatggcttccgacaccaggccctctgggaccgctacatgggcaccctccgcggctgcctcctgcgcctgtatcatgactgaggtgcctcccaacgctccgcccacgctgacaataaagttgctctgagtttgga

SEQ ID NO: 374452 - DNA, 1425 bp, Homo sapiens
ctcggcgctcccggaagtggcctgaaggcggcgcgccagtcccgagcagtgctcgctcctgctcggggcgctgcggccccgggcgtcgccatgaccagtgagctggacatcttcgtggggaacacgacccttatcgacgaggacgtgtatcgcctctggctcgatggttactcggtgaccgacgcggtggccctgcgggtgcgctcgggaatcctggagcagactggcgccacggcagcggtgctgcagagcgacaccatggaccattaccgcaccttccacatgctcgagcggctgctgcatgcgccgcccaagctactgcaccagctcatcttccagattccgccctcccggcaggcactactcatcgagaggtactatgcctttgatgaggcctttgttcgggaggtgctgggcaagaagctgtccaaaggcaccaagaaagacctggatgacatcagcaccaaaacaggcatcaccctcaagagctgccggagacagtttgacaactttaaacgggtcttcaaggtggtagaggaaatgcggggctccctggtggacaatattcagcaacacttcctcctctctgaccggttggccagggactatgcagccatcgtcttctttgctaacaaccgctttgagacagggaagaaaaaactgcagtatctgagcttcggtgactttgccttctgcgctgagctcatgatccaaaactggacccttggagccgtcggtgaggcccccactgacccagactcacagatggatgacatggacatggacttagacaaggaatttctccaggacttgaaggagctcaaggtgctagtggctgacaaggaccttctggacctgcacaagagcctggtgtgcactgctctccggggaaagctgggcgtcttctctgagatggaagccaacttcaagaacctgtcccgggggctggtgaacgtggccgccaagctgacccacaataaagatgtcagagacctgtttgtggacctcgtggagaagtttgtggaaccctgccgctccgaccactggccactcagcgacgtgcggttcttcctgaatcagtattcagcgtctgtccactccctcgatggcttccgacaccaggccctctgggaccgctacatgggcaccctccgcggctgcctcctgcgcctgtatcatgactgaggtgcctcccaacgctccgcccacgctgacaataaagttgctctgagtttggagactggtcctcgctccggggagcaagtggggggcgtgcagatgtgcctgtgtctgtctctgagcacctggtgtccgtgtacaaggatggatgtgtacagtggctccttgggaactgagacatatctcagggaatggtgtctgtgctcagcccatccaccagaagagtctgctcacaagccaaaaaac

SEQ ID NO: 374453 - DNA, 1575 bp, Homo sapiens
ctcggcgctcccggaagtggcctgaaggcggcgcgccagtcccgagcagtgctcgctcctgctcggggcgctgcggccccgggcgtcgccatgaccagtgagctggacatcttcgtggggaacacgacccttatcgacgaggacgtgtatcgcctctggctcgatggttactcggtgaccgacgcggtggccctgcgggtgcgctcgggaatcctggagcagactggcgccacggcagcggtgctgcagagcgacaccatggaccattaccgcaccttccacatgctcgagcggctgctgcatgcgccgcccaagctactgcaccagctcatcttccagattccgccctcccggcaggcactactcatcgagaggtactatgcctttgatgaggcctttgttcgggaggtgctgggcaagaagctgtccaaaggcaccaagaaagacctggatgacatcagcaccaaaacaggcatcaccctcaagagctgccggagacagtttgacaactttaaacgggtcttcaaggtggtagaggaaatgcggggctccctggtggacaatattcagcaacacttcctcctctctgaccggttggccagggactatgcagccatcgtcttctttgctaacaaccgctttgagacagggaagaaaaaactgcagtatctgagcttcggtgactttgccttctgcgctgagctcatgatccaaaactggacccttggagccgtcgactcacagatggatgacatggacatggacttagacaaggaatttctccaggacttgaaggagctcaaggtgctagtggctgacaaggaccttctggacctgcacaagaggtgaccttgtaggggcccatggggcggggcctgcagtaggggcccaggtggctataggcgtgaccctgtctctctgcagcctggtgtgcactgctctccggggaaagctgggcgtcttctctgagatggaagccaacttcaagggtctgtggtcccatccagcctctgacccttggcatcttcagcctccagttcgccacccctaccgggcagctctgcccctgccagggattggccggcaggtggcactgctgctccctctggtggccgctgacgggagcagctcataaacaatggggacttggttgatggagggaggtggatggatctggggaggggcctgctcctcctcccccagcttctgtgctcagctgccaacttctggggcagaaagcagagctccaaggatccctgccccacagaacctgtcccgggggctggtgaacgtggccgccaagctgacccacaataaagatgtcagagacctgtttgtggacctcgtggagaagtttgtggaaccctgccgctccgaccactggccactcagcgacgtgcggttcttcctgaatcagtattcagcgtctgtccactccctcgatggcttccgacaccaggccctctgggaccgctacatgggcaccctccgcggctgcctcctgcgcctgtatcatgactgaggtgcctcccaacgctccgcccacgctgacaataaagttgctctgagtttgga

SEQ ID NO: 374454 - DNA, 941 bp, Homo sapiens
aagaaggaatttcaagccctaagaggaccctcctctcgtctgtgcagggactatgcagccatcgtcttctttgctaacaaccgctttgagacagggaagaaaaaactgcagtatctgagcttcggtgactttgccttctgcgctgagctcatgatccaaaactggacccttggagccgtcgactcacagatggatgacatggacatggacttagacaaggaatttctccaggacttgaaggagctcaaggtgctagtggctgacaaggaccttctggacctgcacaagagcctggtgtgcactgctctccggggaaagctgggcgtcttctctgagatggaagccaacttcaagggtctgtggtcccatccagcctctgacccttggcatcttcagcctccagttcgccacccctaccgggcagctctgcccctgccagggattggccggcaggtggcactgctgctccctctggtggccgctgacgggagcagctcataaacaatggggacttggttgatggagggaggtggatggatctggggaggggcctgctcctcctcccccagcttctgtgctcagctgccaacttctggggcagaaagcagagctccaaggatccctgccccacagaacctgtcccgggggctggtgaacgtggccgccaagctgacccacaataaagatgtcagagacctgtttgtggacctcgtggagaagtttgtggaaccctgccgctccgaccactggccactcagcgacgtgcggttcttcctgaatcagtattcagcgtctgtccactccctcgatggcttccgacaccaggccctctgggaccgctacatgggcaccctccgcggctgcctcctgcgcctgtatcatgactgaggtgcctcccaacgctccgcccacgctgacaataaagttgctctgagtttgga

SEQ ID NO: 374455 - DNA, 561 bp, Homo sapiens
ctcggcgctcccggaagtggcctgaaggcggcgcgccagtcccgagcagtgctcgctcctgctcggggcgctgcggccccgggcgtcgccatgaccagtgagctggacatcttcgtggggaacacgacccttatcgacgaggacgtgtatcgcctctggctcgatggttactcggtgaccgacgcggtggccctgcgggtgcgctcgggaatcctggagcagactggcgccacggcagcggtgctgcagagcgacaccatggaccattaccgcaccttccacatgctcgagcggctgctgcatgcgccgcccaagctactgcaccagctcatcttccagattccgccctcccggcaggcactactcatcgagaggtactatgcctttgatgaggcctttgttcgggaggtgctgggcaagaagctgtccaaaggcaccaagaaagacctggatgacatcagcaccaaaacaggcatcaccctcaagagctgccggagacagttttgtcatctttatatcgttcttcaatgttggtagattgttatactggggttctcttgt

SEQ ID NO: 374456 - DNA, 885 bp, Homo sapiens
  misc_feature (33)..(33): n is a, c, g, or t
aggggcaacaacatagatacgacgagctggtgnattcggccgaggtacaatggaccaacttgtcttcctattaatgctgcctctagtcaagaatttgattcagttttgtttcagcaggatgcaactctttctggtttagtgaatcttggctgtcaaccactgtcatccataccatttcattcttcaaattcaggctcaacaggacatctcttagcccatacacctcattctgtgcataccctgcctcatctgcaatcaatgggatatcattgttcaaatacaggacaaagatctctttcttctccagtggctgaccagattacaggtcagccttcgtctcagttacaacctattacatatggtccttcacattcagggtctgctacaacagcttccccagcagcttctcatcccttggctagttcaccgctttctgggccaccatctcctcagcttcagcctatgccttaccaatctcctagctcaggaactgcctcatcaccgtctccagccaccagaatgcattctggacagcactcaactcaagcacaaagtacgggccaggggggtctttctgcaccttcatccttaatatgtcacagtttgtgtgatccagcgtcatttccacctgatggggcaactgtgagcattaaacctgaaccagaagatcgagagcctaactttgcaaccattggtctgcaggacatcactttagatgatgttgagacctacgttttggccagtcccagcaggaagatatctgaggaatctagaggtgaagagcctgaacccagagcccccagcccgagggagaagtgagggagaaggaaagccagaggacttgctgattaacactcggtcaagttattgctaaaggtctgtgaa

SEQ ID NO: 374457 - DNA, 1010 bp, Homo sapiens
agggcgcgagagcgcacccgcggcggcggtggcggcgactgtgggggggcggcggggaacattggctaagccgacagtggaggcttaggcaccggtggcgggcggctgcggttcctggtgctgctcggcgcgcggccagctttcggaacggaacgctcggcgtcgcgggccccgcccggaaagtttgccgtggagtcgcgacctcttggcccgcgcggcccggcatgaagcggcgttgaggagctgctgccgccgcttgccgctgccgccgccgccgcctgaggaggagctgcagcaccctgggccacgccgatgactactgcaaactgtggcgcccacgacgagctcgacttcaaactcgtctttggcgaggacggggcgccggcgccgccgcccccgggctcgcggcctgcagcacatcttcattacctccactagactggcctttaccagctcattttggacaatgtgaactgaaaatagaagtgcaacctaaaactcatcatcgagcccattatgaaactgaaggtagccgaggggcagtaaaagcatctactgggggacatcctgttgtgaagctcctgggctataacgaaaagccaataaatctacaaatgtttattgggacagcagatgatcgatatttacgacctcatgcattttaccaggtgcatcgaatcactgggaagacagtcgctactgcaagccaagagataataattgccagtacaaaagttctggaaattccacttcttcctgaaaataatatgtcagccagtattgatgtgcaggtatttttgagactcggatcagatatagaacttcgaaaggggaactgtctgggggcaggatttataagtagtgggttgggtacattccacaggcagggaaaagctcttcggagataggacataccgggatggcacaggagagaaagcccaattgaagacgtaatggggtgagggtgaagggaggatgatatagaaagattgaagaagagcgggagggaa

SEQ ID NO: 374458 - DNA, 662 bp, Homo sapiens
gcgtatggtgtgtttttatgtgtgttctgtcttttttattgtggtggtgtggttgcttgtgtgtttgtgttgtgtggtggtgtgtgcttggtgtggggtggtgcggggcgccgtcttttgtttggtgtttttctgtgttttttgttgttttttgtttttttgtttttcttttttttttttgttgttttgtttgtttttttcatgttttttttttttttttgttttttttttttttttttttttttttttttttttttttttttttttttttttttttttttcttgtacattttgtattttaaaaccttttatgggagtgcagtgctccttacacaaatacaaagggaagaagagccagcagttgaggctcctcagttttagtgctgaaataataaacagtgacaggtcaacagtatccttaatctgtctgagtgttcctccgcctggggttggtgtggagcccctcactttggggcaaagttaagggtcctgtgtcttttaaaaagtccatttggtcaataacttttcatttaaggaagagaagatcgagttccaaattgcttccgaggcttcagttctgtaccatttaatgcgtgcaaaggacattccatggtgtctgctgggttcagggcaactggctttcccaaggcatacaagaaaag

SEQ ID NO: 374459 - DNA, 246 bp, Homo sapiens
ctctggaaaaggggcaccgcaccaagcctggggttggtgtggagcccctcactttggggcaaagttaagggtcctgtgtcttttaaaaagtccatttggtcaataacttttcatttaaggaagagaagatcgagttccaaattgcttccgaggcttcagttctgtaccatttaatgcgtgcaaaggacattccatggtgtctgctgggttcagggcaactggctttcccaaggcatacaagaaaag

SEQ ID NO: 374460 - DNA, 6670 bp, Homo sapiens
agggcgcgagagcgcacccgcggcggcggtggcggcgactgtgggggggcggcggggaacattggctaagccgacagtggaggcttaggcaccggtggcgggcggctgcggttcctggtgctgctcggcgcgcggccagctttcggaacggaacgctcggcgtcgcgggccccgcccggaaagtttgccgtggagtcgcgacctcttggcccgcgcggcccggcatgaagcggcgttgaggagctgctgccgccgcttgccgctgccgccgccgccgcctgaggaggagctgcagcaccctgggccacgccgatgactactgcaaactgtggcgcccacgacgagctcgacttcaaactcgtctttggcgaggacggggcgccggcgccgccgcccccgggctcgcggcctgcagatcttgagccagatgattgtgcatccatttacatctttaatgtagatccacctccatctactttaaccacaccactttgcttaccacatcatggattaccgtctcactcttctgttttgtcaccatcgtttcagctccaaagtcacaaaaactatgaaggaacttgtgagattcctgaatctaaatatagcccattaggtggtcccaaaccctttgagtgcccaagtattcaaattacatctatctctcctaactgtcatcaagaattagatgcacatgaagatgacctacagataaatgacccagaacgggaatttttggaaaggccttctagagatcatctctatcttcctcttgagccatcctaccgggagtcttctcttagtcctagtcctgccagcagcatctcttctaggagttggttctctgatgcatcttcttgtgaatcgctttcacatatttatgatgatgtggactcagagttgaatgaagctgcagcccgatttacccttggatcccctctgacttctcctggtggctctccagggggctgccctggagaagaaacttggcatcaacagtatggacttggacactcattatcacccaggcaatctccttgccactctcctagatccagtgtcactgatgagaattggctgagccccaggccagcctcaggaccctcatcaaggcccacatccccctgtgggaaacggaggcactccagtgctgaagtttgttatgctgggtccctttcaccccatcactcacctgttccttcacctggtcactcccccaggggaagtgtgacagaagatacgtggctcaatgcttctgtccatggtgggtcaggccttggccctgcagtttttccatttcagtactgtgtagagactgacatccctctcaaaacaaggaaaacttctgaagatcaagctgccatactaccaggaaaattagagctgtgttcagatgaccaagggagtttatcaccagcccgggagacttcaatagatgatggccttggatctcagtatcctttaaagaaagattcatgtggtgatcagtttctttcagttccttcaccctttacctggagcaaaccaaagcctggccacacccctatatttcgcacatcttcattacctccactagactggcctttaccagctcattttggacaatgtgaactgaaaatagaagtgcaacctaaaactcatcatcgagcccattatgaaactgaaggtagccgaggggcagtaaaagcatctactgggggacatcctgttgtgaagctcctgggctataacgaaaagccaataaatctacaaatgtttattgggacagcagatgatcgatatttacgacctcatgcattttaccaggtgcatcgaatcactgggaagacagtcgctactgcaagccaagagataataattgccagtacaaaagttctggaaattccacttcttcctgaaaataatatgtcagccagtattgattgtgcaggtattttgaaactccgcaattcagatatagaacttcgaaaaggagaaactgatattggcagaaagaatactagagtacgacttgtgtttcgtgtacacatcccacagcccagtggaaaagtcctttctctgcagatagcctctatacccgttgagtgctcccagcggtctgctcaagaacttcctcatattgagaagtacagtatcaacagttgttctgtaaatggaggtcatgaaatggttgtgactggatctaattttcttccagaatccaaaatcatttttcttgaaaaaggacaagatggacgacctcagtgggaggtagaagggaagataatcagggaaaaatgtcaaggggctcacattgtccttgaagttcctccatatcataacccagcagttacagctgcagtgcaggtgcacttttatctttgcaatggcaagaggaaaaaaagccagtctcaacgttttacttatacaccagttttgatgaagcaagaacacagagaagagattgatttgtcttcagttccatctttgcctgtgcctcatcctgctcagacccagaggccttcctctgattcagggtgttcacatgacagtgtactgtcaggacagagaagtttgatttgctccatcccacaaacatatgcatccatggtgacctcatcccatctgccacagttgcagtgtagagatgagagtgttagtaaagaacagcatatgattccttctccaattgtacaccagccttttcaagtcacaccaacacctcctgtggggtcttcctatcagcctatgcaaactaatgttgtgtacaatggaccaacttgtcttcctattaatgctgcctctagtcaagaatttgattcagttttgtttcagcaggatgcaactctttctggtttagtgaatcttggctgtcaaccactgtcatccataccatttcattcttcaaattcaggctcaacaggacatctcttagcccatacacctcattctgtgcataccctgcctcatctgcaatcaatgggatatcattgttcaaatacaggacaaagatctctttcttctccagtggctgaccagattacaggtcagccttcgtctcagttacaacctattacatatggtccttcacattcagggtctgctacaacagcttccccagcagcttctcatcccttggctagttcaccgctttctgggccaccatctcctcagcttcagcctatgccttaccaatctcctagctcaggaactgcctcatcaccgtctccagccaccagaatgcattctggacagcactcaactcaagcacaaagtacgggccaggggggtctttctgcaccttcatccttaatatgtcacagtttgtgtgatccagcgtcatttccacctgatggggcaactgtgagcattaaacctgaaccagaagatcgagagcctaactttgcaaccattggtctgcaggacatcactttagatgatgaccaatttatatctgacttggaacaccagccatcaggttcagcagagaaatggcctaaccacagtgtgctctcatgtccagctcctttctggagaatctagaggtgaacgagataattgggagagacatgtcccagatttctgtttcccaaggagcaggggtgagcaggcaggctcccctcccgagtcctgagtccctggatttaggaagatctgatgggctctaacagtgcttactgcagccttgtgtccaccaccaacttctcagcatgtttctctccttggaccttgggtttccaactctgcagccttcaggtctggggccaggagtgggacccaccatttgtggggaaagtagcattcctccacctcaggccttgggtagatttggcaaaagaacaggagcagcataggctgtttgagctttggggaaatgaactttgctttttatatttaactaggatacttttatatgatgggtgctttgagtgtgaatgcagcaggctctcttgtttccgaggtgctgcttttgcaggtgacctggttacttagctaggattggtgatttgtactgctttatggtcatttgaagggccctttagtttttatgataatttttaaaataggaacttttgataagaccttctagaagcaaaaaaaaaaaaaaaaagaaaaaaaaagaaaagaaaaaaagaaaaagaaaaaaatatcccaagcccacacctatgcctcagaaagtcagcatgtgtcctgaagacgttcatagatttataggaaataaagccaaatgtagctcatacctctttataaaactaaactgttgttagataaaatgagaagagaccattccatcattgaagtgttggaatataaaaagacattccagagcatagccttttggtaactttctaggtaatcttgcaatctctccatactggctccatgttgaaattgctttttccctcaggaccctgggtaagatggctacatttaaggtgactctgaatggtggggttctagcttggtcactttcatttcttgccatcataaaaactagtaggctgtggagtgcgcttcctgtttgtgtcatctggtcgtagaaccttttccaaacagaagcatctgcctttggctgttctgtgacctttgaagccagtctcagtggtttaggcagctttgcagttctaactctagctagaggccaggctgtgtgcagagctaaagcacaaatgagcagtacatcagcatgggcagagaaaatacaggactccagatgggaaggttttaagagtcacactggcatggaaggcttatctgccattctatttatagcctgaaatgattctggcctaccctgtcctgtctgtatgatctaaaaaccagccttttccccagaaggctctgagcacatccagaagtgataacctgaccctccacaccaaagacaccctggtgctgctgctggtgagactggtgtccaaggcagggcccagcagaaactgcagcctgctgtctaccaaaggaggtacccgagttgggtactttaaaaaaaaaaaaaacctgcccttacccctctccctaatgggattttttttacctgttcctgggcccattacagagcctctgaagtttgcagtatgctttcaaatgaaataatatacttccattgattcaggaagcagattttttgagtgcctatatgtgagacagtgtgctggttgaaggcctgatgctgttattccaggagactgcaggcccttgatgccaggactctctctactaaggccagttcaggtctgggaaagggagctggcctattgcccaccacctgttgtcagtaggttaggagctgttgactcaggatgaggaagtatggtctttaaaaaaaacaaaatatattttagatttctcccctaaagttagttagagaaaaaggtctattcttcagcagatcactgtggcccctcttggagctgggtgttttcaaattttcttgaaaagtgagttgtgtcacagaatgtggatagtgagatttgcttctgggcctgtggttggacgcccacagcttcctttggaggggcaagaagttggcctctcggttgacattccagagaaatggccagacttgcccctacccttttgcccctggtgtagctgcctcacatgaggttattgcaagagttccccttgcaataccctttgtgccctcaagaattaaaagcctctatgatccagagttgctatgcaccaaattttgatgccttctaaataccttgatgcctgtagcactagaaatgctttcctatttaaaataaacattaaattttaaaatagagctttgtatactatgtaagcagttttatatcagctttgtaaaagctttggtgttaagagtcaatattttttggctttgtagataaagacttaaatttttgtgcaacatagtggtgttaaagcacacatccattggactatgcaaatcaatttctactagcagcactgagcaactgggcacgtgctagtacgcaccccctcctactctaactgtgctagctcttgggttgaggaatggaatgggtagccttctgcttactggagatgcacagagaaacatggctgaaaacagctttaaaaagaacatgtctttgggttcatgtgtggtgctgctgcccgggtgtaaactatccccacccagggccagccattatcaccagacctcttctgggcctggctgtgaagccctgtttttggtattcagaatggatctttaaggctcagatgggctcaaattgaaaccttgtgttttataaaatggatgtttagtaaaggaactggttctcagttatgtttacagcacttggaattgtgtgttcttgtacattttgtattttaaaaccttttatgggagtgcagtgctccttacacaaatacaaagggaagaagagccagcagttgaggctcctcagttttagtgctgaaataataaacagtgacaggtcaacagtatccttaatctgtctgagtgttcctccgcctggggttggtgtggagcccctcactttggggcaaagttaagggtcctgtgtcttttaaaaagtccatttggtcaataacttttcatttaaggaagagaagatcgagttccaaattgcttccgaggcttcagttctgtaccatttaatgcgtgcaaaggacattccatggtgtctgctgggttcagggcaactggctttcccaaggcatacaagaaaag

SEQ ID NO: 374461 - DNA, 5745 bp, Homo sapiens
agggcgcgagagcgcacccgcggcggcggtggcggcgactgtgggggggcggcggggaacattggctaagccgacagtggaggcttaggcaccggtggcgggcggctgcggttcctggtgctgctcggcgcgcggccagctttcggaacggaacgctcggcgtcgcgggccccgcccggaaagtttgccgtggagtcgcgacctcttggcccgcgcggcccggcatgaagcggcgttgaggagctgctgccgccgcttgccgctgccgccgccgccgcctgaggaggagctgcagcaccctgggccacgccgatgactactgcaaactgtggcgcccacgacgagctcgacttcaaactcgtctttggcgaggacggggcgccggcgccgccgcccccgggctcgcggcctgcagatcttgagccagatgattgtgcatccatttacatctttaatgtagatccacctccatctactttaaccacaccactttgcttaccacatcatggattaccgtctcactcttctgttttgtcaccatcgtttcagctccaaagtcacaaaaactatgaaggaacttgtgagattcctgaatctaaatatagcccattaggtggtcccaaaccctttgagtgcccaagtattcaaattacatctatctctcctaactgtcatcaagaattagatgcacatgaagatgacctacagataaatgacccagaacgggaatttttggaaaggccttctagagatcatctctatcttcctcttgagccatcctaccgggagtcttctcttagtcctagtcctgccagcagcatctcttctaggagttggttctctgatgcatcttcttgtgaatcgctttcacatatttatgatgatgtggactcagagttgaatgaagctgcagcccgatttacccttggatcccctctgacttctcctggtggctctccagggggctgccctggagaagaaacttggcatcaacagtatggacttggacactcattatcacccaggcaatctccttgccactctcctagatccagtgtcactgatgagaattggctgagccccaggccagcctcaggaccctcatcaaggcccacatccccctgtgggaaacggaggcactccagtgctgaagtttgttatgctgggtccctttcaccccatcactcacctgttccttcacctggtcactcccccaggggaagtgtgacagaagatacgtggctcaatgcttctgtccatggtgggtcaggccttggccctgcagtttttccatttcagtactgtgtagagactgacatccctctcaaaacaaggaaaacttctgaagatcaagctgccatactaccaggaaaattagagctgtgttcagatgaccaagggagtttatcaccagcccgggagacttcaatagatgatggccttggatctcagtatcctttaaagaaagattcatgtggtgatcagtttctttcagttccttcaccctttacctggagcaaaccaaagcctggccacacccctatatttcgcacatcttcattacctccactagactggcctttaccagctcattttggacaatgtgaactgaaaatagaagtgcaacctaaaactcatcatcgagcccattatgaaactgaaggtagccgaggggcagtaaaagcatctactgggggacatcctgttgtgaagctcctgggctataacgaaaagccaataaatctacaaatgtttattgggacagcagatgatcgatatttacgacctcatgcattttaccaggtgcatcgaatcactgggaagacagtcgctactgcaagccaagagataataattgccagtacaaaagttctggaaattccacttcttcctgaaaataatatgtcagccagtattgattgtgcaggtattttgaaactccgcaattcagatatagaacttcgaaaaggagaaactgatattggcagaaagaatactagagtacgacttgtgtttcgtgtacacatcccacagcccagtggaaaagtcctttctctgcagatagcctctatacccgttgagtgctcccagcggtctgctcaagaacttcctcatattgagaagtacagtatcaacagttgttctgtaaatggaggtcatgaaatggttgtgactggatctaattttcttccagaatccaaaatcatttttcttgaaaaaggacaagatggacgacctcagtgggaggtagaagggaagataatcagggaaaaatgtcaaggggctcacattgtccttgaagttcctccatatcataacccagcagttacagctgcagtgcaggtgcacttttatctttgcaatggcaagaggaaaaaaagccagtctcaacgttttacttatacaccagttttgatgaagcaagaacacagagaagagattgatttgtcttcagttccatctttgcctgtgcctcatcctgctcagacccagaggccttcctctgattcagggtgttcacatgacagtgtactgtcaggacagagaagtttgatttgctccatcccacaaacatatgcatccatggtgacctcatcccatctgccacagttgcagtgtagagatgagagtgttagtaaagaacagcatatgattccttctccaattgtacaccagccttttcaagtcacaccaacacctcctgtggggtcttcctatcagcctatgcaaactaatgttgtgtacaatggaccaacttgtcttcctattaatgctgcctctagtcaagaatttgattcagttttgtttcagcaggatgcaactctttctggtttagtgaatcttggctgtcaaccactgtcatccataccatttcattcttcaaattcaggctcaacaggacatctcttagcccatacacctcattctgtgcataccctgcctcatctgcaatcaatgggatatcattgttcaaatacaggacaaagatctctttcttctccagtggctgaccagattacaggtcagccttcgtctcagttacaacctattacatatggtccttcacattcagggtctgctacaacagcttccccagcagcttctcatcccttggctagttcaccgctttctgggccaccatctcctcagcttcagcctatgccttaccaatctcctagctcaggaactgcctcatcaccgtctccagccaccagaatgcattctggacagcactcaactcaagcacaaagtacgggccaggggggtctttctgcaccttcatccttaatatgtcacagtttgtgtgatccagcgtcatttccacctgatggggcaactgtgagcattaaacctgaaccagaagatcgagagcctaactttgcaaccattggtctgcaggacatcactttagatgatgaccaatttatatctgacttggaacaccagccatcaggttcagcagagaaatggcctaaccacagtgtgctctcatgtccagctcctttctggagaatctagaggtgaacgagataattgggagagacatgtcccagatttctgtttcccaaggagcaggggtgagcaggcaggctcccctcccgagtcctgagtccctggatttaggaagatctgatgggctctaacagtgcttactgcagccttgtgtccaccaccaacttctcagcatgtttctctccttggaccttgggtttccaactctgcagccttcaggtctggggccaggagtgggacccaccatttgtggggaaagtagcattcctccacctcaggccttgggtagatttggcaaaagaacaggagcagcataggctgtttgagctttggggaaatgaactttgctttttatatttaactaggatacttttatatgatgggtgctttgagtgtgaatgcagcaggctctcttgtttccgaggtgctgcttttgcaggtgacctggttacttagctaggattggtgatttgtactgctttatggtcatttgaagggccctttagtttttatgataatttttaaaataggaacttttgataagaccttctagaagcaaaaaaaaaaaaaaaaagaaaaaaaaagaaaagaaaaaaagaaaaagaaaaaaatatcccaagcccacacctatgcctcagaaagtcagcatgtgtcctgaagacgttcatagatttataggaaataaagccaaatgtagctcatacctctttataaaactaaactgttgttagataaaatgagaagagaccattccatcattgaagtgttggaatataaaaagacattccagagcatagccttttggtaactttctaggtaatcttgcaatctctccatactggctccatgttgaaattgctttttccctcaggaccctgggtaagatggctacatttaaggtgactctgaatggtggggttctagcttggtcactttcatttcttgccatcataaaaactagtaggctgtggagtgcgcttcctgtttgtgtcatctggtcgtagaaccttttccaaacagaagcatctgcctttggctgttctgtgacctttgaagccagtctcagtggtttaggcagctttgcagttctaactctagctagaggccaggctgtgtgcagagctaaagcacaaatgagcagtacatcagcatgggcagagaaaatacaggactccagatgggaaggttttaagagtcacactggcatggaaggcttatctgccattctatttatagcctgaaatgattctggcctaccctgtcctgtctgtatgatctaaaaaccagccttttccccagaaggctctgagcacatccagaagtgataacctgaccctccacaccaaagacaccctggtgctgctgctggtgagactggtgtccaaggcagggcccagcagaaactgcagcctgctgtctaccaaaggaggtacccgagttgggtactttaaaaaaaaaaaaaacctgcccttacccctctccctaatgggattttttttacctgttcctgggcccattacagagcctctgaagtttgcagtatgctttcaaatgaaataatatacttccattgattcaggaagcagattttttgagtgcctatatgtgagacagtgtgctggttgaaggcctgatgctgttattccaggagactgcaggcccttgatgccaggactctctctactaaggccagttcaggtctgggaaagggagctggcctattgcccaccacctgttgtcagtaggttaggagctgttgactcaggatgaggaagtatggtctttaaaaaaaacaaaatatattttagatttctcccctaaagttagttagagaaaaaggtctattcttcagcagatcactgtggcccctcttggagctgggtgttttcaaattttcttgaaaagtgagttgtgtcacagaatgtggatagtgagatttgcttctgggcctgtggttggacgcccacagcttcctttggaggggcaagaagttggcctctcggttgacattccagagaaatggccagacttgcccctacccttttgcccctggtgtagctgcctcacatgaggttattgcaagagttccccttgcaataccctttgtgccctcaagaattaaaagcctctatgatccagagttgctatgcaccaaattttgatgccttctaaataccttgatgcctgtagcactagaaatgctttcctatttaaaataaacattaaatttta

SEQ ID NO: 374462 - DNA, 6566 bp, Homo sapiens
agggcgcgagagcgcacccgcggcggcggtggcggcgactgtgggggggcggcggggaacattggctaagccgacagtggaggcttaggcaccggtggcgggcggctgcggttcctggtgctgctcggcgcgcggccagctttcggaacggaacgctcggcgtcgcgggccccgcccggaaagtttgccgtggagtcgcgacctcttggcccgcgcggcccggcatgaagcggcgttgaggagctgctgccgccgcttgccgctgccgccgccgccgcctgaggaggagctgcagcaccctgggccacgccgatgactactgcaaactgtggcgcccacgacgagctcgacttcaaactcgtctttggcgaggacggggcgccggcgccgccgcccccgggctcgcggcctgcagatcttgagccagatgattgtgcatccatttacatctttaatgtagatccacctccatctactttaaccacaccactttgcttaccacatcatggattaccgtctcactcttctgttttgtcaccatcgtttcagctccaaagtcacaaaaactatgaaggaacttgtgagattcctgaatctaaatatagcccattaggtggtcccaaaccctttgagtgcccaagtattcaaattacatctatctctcctaactgtcatcaagaattagatgcacatgaagatgacctacagataaatgacccagaacgggaatttttggaaaggccttctagagatcatctctatcttcctcttgagccatcctaccgggagtcttctcttagtcctagtcctgccagcagcatctcttctaggagttggttctctgatgcatcttcttgtgaatcgctttcacatatttatgatgatgtggactcagagttgaatgaagctgcagcccgatttacccttggatcccctctgacttctcctggtggctctccagggggctgccctggagaagaaacttggcatcaacagtatggacttggacactcattatcacccaggcaatctccttgccactctcctagatccagtgtcactgatgagaattggctgagccccaggccagcctcaggaccctcatcaaggcccacatccccctgtgggaaacggaggcactccagtgctgaagtttgttatgctgggtccctttcaccccatcactcacctgttccttcacctggtcactcccccaggggaagtgtgacagaagatacgtggctcaatgcttctgtccatggtgggtcaggccttggccctgcagtttttccatttcagtactgtgtagagactgacatccctctcaaaacaaggaaaacttctgaagatcaagctgccatactaccaggaaaattagagctgtgttcagatgaccaagggagtttatcaccagcccgggagacttcaatagatgatggccttggatctcagtatcctttaaagaaagattcatgtggtgatcagtttctttcagttccttcaccctttacctggagcaaaccaaagcctggccacacccctatatttcgcacatcttcattacctccactagactggcctttaccagctcattttggacaatgtgaactgaaaatagaagtgcaacctaaaactcatcatcgagcccattatgaaactgaaggtagccgaggggcagtaaaagcatctactgggggacatcctgttgtgaagctcctgggctataacgaaaagccaataaatctacaaatgtttattgggacagcagatgatcgatatttacgacctcatgcattttaccaggtgcatcgaatcactgggaagacagtcgctactgcaagccaagagataataattgccagtacaaaagttctggaaattccacttcttcctgaaaataatatgtcagccagtattgattgtgcaggtattttgaaactccgcaattcagatatagaacttcgaaaaggagaaactgatattggcagaaagaatactagagtacgacttgtgtttcgtgtacacatcccacagcccagtggaaaagtcctttctctgcagatagcctctatacccgttgagtgctcccagcggtctgctcaagaacttcctcatattgagaagtacagtatcaacagttgttctgtaaatggaggtcatgaaatggttgtgactggatctaattttcttccagaatccaaaatcatttttcttgaaaaaggacaagatggacgacctcagtgggaggtagaagggaagataatcagggaaaaatgtcaaggggctcacattgtccttgaagttcctccatatcataacccagcagttacagctgcagtgcaggtgcacttttatctttgcaatggcaagaggaaaaaaagccagtctcaacgttttacttatacaccagttttgatgaagcaagaacacagagaagagattgatttgtcttcagttccatctttgcctgtgcctcatcctgctcagacccagaggccttcctctgattcagggtgttcacatgacagtgtactgtcaggacagagaagtttgatttgctccatcccacaaacatatgcatccatggtgacctcatcccatctgccacagttgcagtgtagagatgagagtgttagtaaagaacagcatatgattccttctccaattgtacaccagccttttcaagtcacaccaacacctcctgtggggtcttcctatcagcctatgcaaactaatgttgtgtacaatggaccaacttgtcttcctattaatgctgcctctagtcaagaatttgattcagttttgtttcagcaggatgcaactctttctggtttagtgaatcttggctgtcaaccactgtcatccataccatttcattcttcaaattcaggctcaacaggacatctcttagcccatacacctcattctgtgcataccctgcctcatctgcaatcaatgggatatcattgttcaaatacaggacaaagatctctttcttctccagtggctgaccagattacaggtcagccttcgtctcagttacaacctattacatatggtccttcacattcagggtctgctacaacagcttccccagcagcttctcatcccttggctagttcaccgctttctgggccaccatctcctcagcttcagcctatgccttaccaatctcctagctcaggaactgcctcatcaccgtctccagccaccagaatgcattctggacagcactcaactcaagcacaaagtacgggccaggggggtctttctgcaccttcatccttaatatgtcacagtttgtgtgatccagcgtcatttccacctgatggggcaactgtgagcattaaacctgaaccagaagatcgagagcctaactttgcaaccattggtctgcaggacatcactttagatgatgtgaacgagataattgggagagacatgtcccagatttctgtttcccaaggagcaggggtgagcaggcaggctcccctcccgagtcctgagtccctggatttaggaagatctgatgggctctaacagtgcttactgcagccttgtgtccaccaccaacttctcagcatgtttctctccttggaccttgggtttccaactctgcagccttcaggtctggggccaggagtgggacccaccatttgtggggaaagtagcattcctccacctcaggccttgggtagatttggcaaaagaacaggagcagcataggctgtttgagctttggggaaatgaactttgctttttatatttaactaggatacttttatatgatgggtgctttgagtgtgaatgcagcaggctctcttgtttccgaggtgctgcttttgcaggtgacctggttacttagctaggattggtgatttgtactgctttatggtcatttgaagggccctttagtttttatgataatttttaaaataggaacttttgataagaccttctagaagcaaaaaaaaaaaaaaaaagaaaaaaaaagaaaagaaaaaaagaaaaagaaaaaaatatcccaagcccacacctatgcctcagaaagtcagcatgtgtcctgaagacgttcatagatttataggaaataaagccaaatgtagctcatacctctttataaaactaaactgttgttagataaaatgagaagagaccattccatcattgaagtgttggaatataaaaagacattccagagcatagccttttggtaactttctaggtaatcttgcaatctctccatactggctccatgttgaaattgctttttccctcaggaccctgggtaagatggctacatttaaggtgactctgaatggtggggttctagcttggtcactttcatttcttgccatcataaaaactagtaggctgtggagtgcgcttcctgtttgtgtcatctggtcgtagaaccttttccaaacagaagcatctgcctttggctgttctgtgacctttgaagccagtctcagtggtttaggcagctttgcagttctaactctagctagaggccaggctgtgtgcagagctaaagcacaaatgagcagtacatcagcatgggcagagaaaatacaggactccagatgggaaggttttaagagtcacactggcatggaaggcttatctgccattctatttatagcctgaaatgattctggcctaccctgtcctgtctgtatgatctaaaaaccagccttttccccagaaggctctgagcacatccagaagtgataacctgaccctccacaccaaagacaccctggtgctgctgctggtgagactggtgtccaaggcagggcccagcagaaactgcagcctgctgtctaccaaaggaggtacccgagttgggtactttaaaaaaaaaaaaaacctgcccttacccctctccctaatgggattttttttacctgttcctgggcccattacagagcctctgaagtttgcagtatgctttcaaatgaaataatatacttccattgattcaggaagcagattttttgagtgcctatatgtgagacagtgtgctggttgaaggcctgatgctgttattccaggagactgcaggcccttgatgccaggactctctctactaaggccagttcaggtctgggaaagggagctggcctattgcccaccacctgttgtcagtaggttaggagctgttgactcaggatgaggaagtatggtctttaaaaaaaacaaaatatattttagatttctcccctaaagttagttagagaaaaaggtctattcttcagcagatcactgtggcccctcttggagctgggtgttttcaaattttcttgaaaagtgagttgtgtcacagaatgtggatagtgagatttgcttctgggcctgtggttggacgcccacagcttcctttggaggggcaagaagttggcctctcggttgacattccagagaaatggccagacttgcccctacccttttgcccctggtgtagctgcctcacatgaggttattgcaagagttccccttgcaataccctttgtgccctcaagaattaaaagcctctatgatccagagttgctatgcaccaaattttgatgccttctaaataccttgatgcctgtagcactagaaatgctttcctatttaaaataaacattaaattttaaaatagagctttgtatactatgtaagcagttttatatcagctttgtaaaagctttggtgttaagagtcaatattttttggctttgtagataaagacttaaatttttgtgcaacatagtggtgttaaagcacacatccattggactatgcaaatcaatttctactagcagcactgagcaactgggcacgtgctagtacgcaccccctcctactctaactgtgctagctcttgggttgaggaatggaatgggtagccttctgcttactggagatgcacagagaaacatggctgaaaacagctttaaaaagaacatgtctttgggttcatgtgtggtgctgctgcccgggtgtaaactatccccacccagggccagccattatcaccagacctcttctgggcctggctgtgaagccctgtttttggtattcagaatggatctttaaggctcagatgggctcaaattgaaaccttgtgttttataaaatggatgtttagtaaaggaactggttctcagttatgtttacagcacttggaattgtgtgttcttgtacattttgtattttaaaaccttttatgggagtgcagtgctccttacacaaatacaaagggaagaagagccagcagttgaggctcctcagttttagtgctgaaataataaacagtgacaggtcaacagtatccttaatctgtctgagtgttcctccgcctggggttggtgtggagcccctcactttggggcaaagttaagggtcctgtgtcttttaaaaagtccatttggtcaataacttttcatttaaggaagagaagatcgagttccaaattgcttccgaggcttcagttctgtaccatttaatgcgtgcaaaggacattccatggtgtctgctgggttcagggcaactggctttcccaaggcatacaagaaaag

SEQ ID NO: 374463 - DNA, 6655 bp, Homo sapiens
agggcgcgagagcgcacccgcggcggcggtggcggcgactgtgggggggcggcggggaacattggctaagccgacagtggaggcttaggcaccggtggcgggcggctgcggttcctggtgctgctcggcgcgcggccagctttcggaacggaacgctcggcgtcgcgggccccgcccggaaagtttgccgtggagtcgcgacctcttggcccgcgcggcccggcatgaagcggcgttgaggagctgctgccgccgcttgccgctgccgccgccgccgcctgaggaggagctgcagcaccctgggccacgccgatgactactgcaaactgtggcgcccacgacgagctcgacttcaaactcgtctttggcgaggacggggcgccggcgccgccgcccccgggctcgcggcctgcagatcttgagccagatgattgtgcatccatttacatctttaatgtagatccacctccatctactttaaccacaccactttgcttaccacatcatggattaccgtctcactcttctgttttgtcaccatcgtttcagctccaaagtcacaaaaactatgaaggaacttgtgagattcctgaatctaaatatagcccattaggtggtcccaaaccctttgagtgcccaagtattcaaattacatctatctctcctaactgtcatcaagaattagatgcacatgaagatgacctacagataaatgacccagaacgggaatttttggaaaggccttctagagatcatctctatcttcctcttgagccatcctaccgggagtcttctcttagtcctagtcctgccagcagcatctcttctaggagttggttctctgatgcatcttcttgtgaatcgctttcacatatttatgatgatgtggactcagagttgaatgaagctgcagcccgatttacccttggatcccctctgacttctcctggtggctctccagggggctgccctggagaagaaacttggcatcaacagtatggacttggacactcattatcacccaggcaatctccttgccactctcctagatccagtgtcactgatgagaattggctgagccccaggccagcctcaggaccctcatcaaggcccacatccccctgtgggaaacggaggcactccagtgctgaagtttgttatgctgggtccctttcaccccatcactcacctgttccttcacctggtcactcccccaggggaagtgtgacagaagatacgtggctcaatgcttctgtccatggtgggtcaggccttggccctgcagtttttccatttcagtactgtgtagagactgacatccctctcaaaacaaggaaaacttctgaagatcaagctgccatactaccaggaaaattagagctgtgttcagatgaccaagggagtttatcaccagcccgggagacttcaatagatgatggccttggatctcagtatcctttaaagaaagattcatgtggtgatcagtttctttcagttccttcaccctttacctggagcaaaccaaagcctggccacacccctatatttcgcacatcttcattacctccactagactggcctttaccagctcattttggacaatgtgaactgaaaatagaagtgcaacctaaaactcatcatcgagcccattatgaaactgaaggtagccgaggggcagtaaaagcatctactgggggacatcctgttgtgaagctcctgggctataacgaaaagccaataaatctacaaatgtttattgggacagcagatgatcgatatttacgacctcatgcattttaccaggtgcatcgaatcactgggaagacagtcgctactgcaagccaagagataataattgccagtacaaaagttctggaaattccacttcttcctgaaaataatatgtcagccagtattgattgtgcaggtattttgaaactccgcaattcagatatagaacttcgaaaaggagaaactgatattggcagaaagaatactagagtacgacttgtgtttcgtgtacacatcccacagcccagtggaaaagtcctttctctgcagatagcctctatacccgttgagtgctcccagcggtctgctcaagaacttcctcatattgagaagtacagtatcaacagttgttctgtaaatggaggtcatgaaatggttgtgactggatctaattttcttccagaatccaaaatcatttttcttgaaaaaggacaagatggacgacctcagtgggaggtagaagggaagataatcagggaaaaatgtcaaggggctcacattgtccttgaagttcctccatatcataacccagcagttacagctgcagtgcaggtgcacttttatctttgcaatggcaagaggaaaaaaagccagtctcaacgttttacttatacaccagttttgatgaagcaagaacacagagaagagattgatttgtcttcagttccatctttgcctgtgcctcatcctgctcagacccagaggccttcctctgattcagggtgttcacatgacagtgtactgtcaggacagagaagtttgatttgctccatcccacaaacatatgcatccatggtgacctcatcccatctgccacagttgcagtgtagagatgagagtgttagtaaagaacagcatatgattccttctccaattgtacaccagccttttcaagtcacaccaacacctcctgtggggtcttcctatcagcctatgcaaactaatgttgtgtacaatggaccaacttgtcttcctattaatgctgcctctagtcaagaatttgattcagttttgtttcagcaggatgcaactctttctggtttagtgaatcttggctgtcaaccactgtcatccataccatttcattcttcaaattcaggctcaacaggacatctcttagcccatacacctcattctgtgcataccctgcctcatctgcaatcaatgggatatcattgttcaaatacaggacaaagatctctttcttctccagtggctgaccagattacaggtcagccttcgtctcagttacaacctattacatatggtccttcacattcagggtctgctacaacagcttccccagcagcttctcatcccttggctagttcaccgctttctgggccaccatctcctcagcttcagcctatgccttaccaatctcctagctcaggaactgcctcatcaccgtctccagccaccagaatgcattctggacagcactcaactcaagcacaaagtacgggccaggggggtctttctgcaccttcatccttaatatgtcacagtttgtgtgatccagcgtcatttccacctgatggggcaactgtgagcattaaacctgaaccagaagatcgagagcctaactttgcaaccattggtctgcaggacatcactttagatgatgatttgtttaccagtaataattttgacttgcttcagttgagacctacgttttggccagtcccagcaggaagatatctgaggaatctagagtgaacgagataattgggagagacatgtcccagatttctgtttcccaaggagcaggggtgagcaggcaggctcccctcccgagtcctgagtccctggatttaggaagatctgatgggctctaacagtgcttactgcagccttgtgtccaccaccaacttctcagcatgtttctctccttggaccttgggtttccaactctgcagccttcaggtctggggccaggagtgggacccaccatttgtggggaaagtagcattcctccacctcaggccttgggtagatttggcaaaagaacaggagcagcataggctgtttgagctttggggaaatgaactttgctttttatatttaactaggatacttttatatgatgggtgctttgagtgtgaatgcagcaggctctcttgtttccgaggtgctgcttttgcaggtgacctggttacttagctaggattggtgatttgtactgctttatggtcatttgaagggccctttagtttttatgataatttttaaaataggaacttttgataagaccttctagaagcaaaaaaaaaaaaaaaaagaaaaaaaaagaaaagaaaaaaagaaaaagaaaaaaatatcccaagcccacacctatgcctcagaaagtcagcatgtgtcctgaagacgttcatagatttataggaaataaagccaaatgtagctcatacctctttataaaactaaactgttgttagataaaatgagaagagaccattccatcattgaagtgttggaatataaaaagacattccagagcatagccttttggtaactttctaggtaatcttgcaatctctccatactggctccatgttgaaattgctttttccctcaggaccctgggtaagatggctacatttaaggtgactctgaatggtggggttctagcttggtcactttcatttcttgccatcataaaaactagtaggctgtggagtgcgcttcctgtttgtgtcatctggtcgtagaaccttttccaaacagaagcatctgcctttggctgttctgtgacctttgaagccagtctcagtggtttaggcagctttgcagttctaactctagctagaggccaggctgtgtgcagagctaaagcacaaatgagcagtacatcagcatgggcagagaaaatacaggactccagatgggaaggttttaagagtcacactggcatggaaggcttatctgccattctatttatagcctgaaatgattctggcctaccctgtcctgtctgtatgatctaaaaaccagccttttccccagaaggctctgagcacatccagaagtgataacctgaccctccacaccaaagacaccctggtgctgctgctggtgagactggtgtccaaggcagggcccagcagaaactgcagcctgctgtctaccaaaggaggtacccgagttgggtactttaaaaaaaaaaaaaacctgcccttacccctctccctaatgggattttttttacctgttcctgggcccattacagagcctctgaagtttgcagtatgctttcaaatgaaataatatacttccattgattcaggaagcagattttttgagtgcctatatgtgagacagtgtgctggttgaaggcctgatgctgttattccaggagactgcaggcccttgatgccaggactctctctactaaggccagttcaggtctgggaaagggagctggcctattgcccaccacctgttgtcagtaggttaggagctgttgactcaggatgaggaagtatggtctttaaaaaaaacaaaatatattttagatttctcccctaaagttagttagagaaaaaggtctattcttcagcagatcactgtggcccctcttggagctgggtgttttcaaattttcttgaaaagtgagttgtgtcacagaatgtggatagtgagatttgcttctgggcctgtggttggacgcccacagcttcctttggaggggcaagaagttggcctctcggttgacattccagagaaatggccagacttgcccctacccttttgcccctggtgtagctgcctcacatgaggttattgcaagagttccccttgcaataccctttgtgccctcaagaattaaaagcctctatgatccagagttgctatgcaccaaattttgatgccttctaaataccttgatgcctgtagcactagaaatgctttcctatttaaaataaacattaaattttaaaatagagctttgtatactatgtaagcagttttatatcagctttgtaaaagctttggtgttaagagtcaatattttttggctttgtagataaagacttaaatttttgtgcaacatagtggtgttaaagcacacatccattggactatgcaaatcaatttctactagcagcactgagcaactgggcacgtgctagtacgcaccccctcctactctaactgtgctagctcttgggttgaggaatggaatgggtagccttctgcttactggagatgcacagagaaacatggctgaaaacagctttaaaaagaacatgtctttgggttcatgtgtggtgctgctgcccgggtgtaaactatccccacccagggccagccattatcaccagacctcttctgggcctggctgtgaagccctgtttttggtattcagaatggatctttaaggctcagatgggctcaaattgaaaccttgtgttttataaaatggatgtttagtaaaggaactggttctcagttatgtttacagcacttggaattgtgtgttcttgtacattttgtattttaaaaccttttatgggagtgcagtgctccttacacaaatacaaagggaagaagagccagcagttgaggctcctcagttttagtgctgaaataataaacagtgacaggtcaacagtatccttaatctgtctgagtgttcctccgcctggggttggtgtggagcccctcactttggggcaaagttaagggtcctgtgtcttttaaaaagtccatttggtcaataacttttcatttaaggaagagaagatcgagttccaaattgcttccgaggcttcagttctgtaccatttaatgcgtgcaaaggacattccatggtgtctgctgggttcagggcaactggctttcccaaggcatacaagaaaag

SEQ ID NO: 374464 - DNA, 5431 bp, Homo sapiens
agggcgcgagagcgcacccgcggcggcggtggcggcgactgtgggggggcggcggggaacattggctaagccgacagtggaggcttaggcaccggtggcgggcggctgcggttcctggtgctgctcggcgcgcggccagctttcggaacggaacgctcggcgtcgcgggccccgcccggaaagtttgccgtggagtcgcgacctcttggcccgcgcggcccggcatgaagcggcgttgaggagctgctgccgccgcttgccgctgccgccgccgccgcctgaggaggagctgcagcaccctgggccacgccgatgactactgcaaactgtggcgcccacgacgagctcgacttcaaactcgtctttggcgaggacggggcgccggcgccgccgcccccgggctcgcggcctgcagcacatcttcattacctccactagactggcctttaccagctcattttggacaatgtgaactgaaaatagaagtgcaacctaaaactcatcatcgagcccattatgaaactgaaggtagccgaggggcagtaaaagcatctactgggggacatcctgttgtgaagctcctgggctataacgaaaagccaataaatctacaaatgtttattgggacagcagatgatcgatatttacgacctcatgcattttaccaggtgcatcgaatcactgggaagacagtcgctactgcaagccaagagataataattgccagtacaaaagttctggaaattccacttcttcctgaaaataatatgtcagccagtattgattgtgcaggtattttgaaactccgcaattcagatatagaacttcgaaaaggagaaactgatattggcagaaagaatactagagtacgacttgtgtttcgtgtacacatcccacagcccagtggaaaagtcctttctctgcagatagcctctatacccgttgagtgctcccagcggtctgctcaagaacttcctcatattgagaagtacagtatcaacagttgttctgtaaatggaggtcatgaaatggttgtgactggatctaattttcttccagaatccaaaatcatttttcttgaaaaaggacaagatggacgacctcagtgggaggtagaagggaagataatcagggaaaaatgtcaaggggctcacattgtccttgaagttcctccatatcataacccagcagttacagctgcagtgcaggtgcacttttatctttgcaatggcaagaggaaaaaaagccagtctcaacgttttacttatacaccagttttgatgaagcaagaacacagagaagagattgatttgtcttcagttccatctttgcctgtgcctcatcctgctcagacccagaggccttcctctgattcagggtgttcacatgacagtgtactgtcaggacagagaagtttgatttgctccatcccacaaacatatgcatccatggtgacctcatcccatctgccacagttgcagtgtagagatgagagtgttagtaaagaacagcatatgattccttctccaattgtacaccagccttttcaagtcacaccaacacctcctgtggggtcttcctatcagcctatgcaaactaatgttgtgtacaatggaccaacttgtcttcctattaatgctgcctctagtcaagaatttgattcagttttgtttcagcaggatgcaactctttctggtttagtgaatcttggctgtcaaccactgtcatccataccatttcattcttcaaattcaggctcaacaggacatctcttagcccatacacctcattctgtgcataccctgcctcatctgcaatcaatgggatatcattgttcaaatacaggacaaagatctctttcttctccagtggctgaccagattacaggtcagccttcgtctcagttacaacctattacatatggtccttcacattcagggtctgctacaacagcttccccagcagcttctcatcccttggctagttcaccgctttctgggccaccatctcctcagcttcagcctatgccttaccaatctcctagctcaggaactgcctcatcaccgtctccagccaccagaatgcattctggacagcactcaactcaagcacaaagtacgggccaggggggtctttctgcaccttcatccttaatatgtcacagtttgtgtgatccagcgtcatttccacctgatggggcaactgtgagcattaaacctgaaccagaagatcgagagcctaactttgcaaccattggtctgcaggacatcactttagatgatgtgaacgagataattgggagagacatgtcccagatttctgtttcccaaggagcaggggtgagcaggcaggctcccctcccgagtcctgagtccctggatttaggaagatctgatgggctctaacagtgcttactgcagccttgtgtccaccaccaacttctcagcatgtttctctccttggaccttgggtttccaactctgcagccttcaggtctggggccaggagtgggacccaccatttgtggggaaagtagcattcctccacctcaggccttgggtagatttggcaaaagaacaggagcagcataggctgtttgagctttggggaaatgaactttgctttttatatttaactaggatacttttatatgatgggtgctttgagtgtgaatgcagcaggctctcttgtttccgaggtgctgcttttgcaggtgacctggttacttagctaggattggtgatttgtactgctttatggtcatttgaagggccctttagtttttatgataatttttaaaataggaacttttgataagaccttctagaagcaaaaaaaaaaaaaaaaagaaaaaaaaagaaaagaaaaaaagaaaaagaaaaaaatatcccaagcccacacctatgcctcagaaagtcagcatgtgtcctgaagacgttcatagatttataggaaataaagccaaatgtagctcatacctctttataaaactaaactgttgttagataaaatgagaagagaccattccatcattgaagtgttggaatataaaaagacattccagagcatagccttttggtaactttctaggtaatcttgcaatctctccatactggctccatgttgaaattgctttttccctcaggaccctgggtaagatggctacatttaaggtgactctgaatggtggggttctagcttggtcactttcatttcttgccatcataaaaactagtaggctgtggagtgcgcttcctgtttgtgtcatctggtcgtagaaccttttccaaacagaagcatctgcctttggctgttctgtgacctttgaagccagtctcagtggtttaggcagctttgcagttctaactctagctagaggccaggctgtgtgcagagctaaagcacaaatgagcagtacatcagcatgggcagagaaaatacaggactccagatgggaaggttttaagagtcacactggcatggaaggcttatctgccattctatttatagcctgaaatgattctggcctaccctgtcctgtctgtatgatctaaaaaccagccttttccccagaaggctctgagcacatccagaagtgataacctgaccctccacaccaaagacaccctggtgctgctgctggtgagactggtgtccaaggcagggcccagcagaaactgcagcctgctgtctaccaaaggaggtacccgagttgggtactttaaaaaaaaaaaaaacctgcccttacccctctccctaatgggattttttttacctgttcctgggcccattacagagcctctgaagtttgcagtatgctttcaaatgaaataatatacttccattgattcaggaagcagattttttgagtgcctatatgtgagacagtgtgctggttgaaggcctgatgctgttattccaggagactgcaggcccttgatgccaggactctctctactaaggccagttcaggtctgggaaagggagctggcctattgcccaccacctgttgtcagtaggttaggagctgttgactcaggatgaggaagtatggtctttaaaaaaaacaaaatatattttagatttctcccctaaagttagttagagaaaaaggtctattcttcagcagatcactgtggcccctcttggagctgggtgttttcaaattttcttgaaaagtgagttgtgtcacagaatgtggatagtgagatttgcttctgggcctgtggttggacgcccacagcttcctttggaggggcaagaagttggcctctcggttgacattccagagaaatggccagacttgcccctacccttttgcccctggtgtagctgcctcacatgaggttattgcaagagttccccttgcaataccctttgtgccctcaagaattaaaagcctctatgatccagagttgctatgcaccaaattttgatgccttctaaataccttgatgcctgtagcactagaaatgctttcctatttaaaataaacattaaattttaaaatagagctttgtatactatgtaagcagttttatatcagctttgtaaaagctttggtgttaagagtcaatattttttggctttgtagataaagacttaaatttttgtgcaacatagtggtgttaaagcacacatccattggactatgcaaatcaatttctactagcagcactgagcaactgggcacgtgctagtacgcaccccctcctactctaactgtgctagctcttgggttgaggaatggaatgggtagccttctgcttactggagatgcacagagaaacatggctgaaaacagctttaaaaagaacatgtctttgggttcatgtgtggtgctgctgcccgggtgtaaactatccccacccagggccagccattatcaccagacctcttctgggcctggctgtgaagccctgtttttggtattcagaatggatctttaaggctcagatgggctcaaattgaaaccttgtgttttataaaatggatgtttagtaaaggaactggttctcagttatgtttacagcacttggaattgtgtgttcttgtacattttgtattttaaaaccttttatgggagtgcagtgctccttacacaaatacaaagggaagaagagccagcagttgaggctcctcagttttagtgctgaaataataaacagtgacaggtcaacagtatccttaatctgtctgagtgttcctccgcctggggttggtgtggagcccctcactttggggcaaagttaagggtcctgtgtcttttaaaaagtccatttggtcaataacttttcatttaaggaagagaagatcgagttccaaattgcttccgaggcttcagttctgtaccatttaatgcgtgcaaaggacattccatggtgtctgctgggttcagggcaactggctttcccaaggcatacaagaaaag

SEQ ID NO: 374465 - DNA, 5077 bp, Homo sapiens
tggtatacctccagccaccagaatgcattctggacagcactcaactcaagcacaaagtacgggccaggggggtctttctgcaccttcatccttaatatgtcacagtttgtgtgatccagcgtcatttccacctgatggggcaactgtgagcattaaacctgaaccagaagatcgagagcctaactttgcaaccattggtctgcaggacatcactttagatgatgctcctgggctataacgaaaagccaataaatctacaaatgtttattgggacagcagatgatcgatatttacgacctcatgcattttaccaggtgcatcgaatcactgggaagacagtcgctactgcaagccaagagataataattgccagtacaaaagttctggaaattccacttcttcctgaaaataatatgtcagccagtattgattgtgcaggtattttgaaactccgcaattcagatatagaacttcgaaaaggagaaactgatattggcagaaagaatactagagtacgacttgtgtttcgtgtacacatcccacagcccagtggaaaagtcctttctctgcagatagcctctatacccgttgagtgctcccagcggtctgctcaagaacttcctcatattgagaagtacagtatcaacagttgttctgtaaatggaggtcatgaaatggttgtgactggatctaattttcttccagaatccaaaatcatttttcttgaaaaaggacaagatggacgacctcagtgggaggtagaagggaagataatcagggaaaaatgtcaaggggctcacattgtccttgaagttcctccatatcataacccagcagttacagctgcagtgcaggtgcacttttatctttgcaatggcaagaggaaaaaaagccagtctcaacgttttacttatacaccagttttgatgaagcaagaacacagagaagagattgatttgtcttcagttccatctttgcctgtgcctcatcctgctcagacccagaggccttcctctgattcagggtgttcacatgacagtgtactgtcaggacagagaagtttgatttgctccatcccacaaacatatgcatccatggtgacctcatcccatctgccacagttgcagtgtagagatgagagtgttagtaaagaacagcatatgattccttctccaattgtacaccagccttttcaagtcacaccaacacctcctgtggggtcttcctatcagcctatgcaaactaatgttgtgtacaatggaccaacttgtcttcctattaatgctgcctctagtcaagaatttgattcagttttgtttcagcaggatgcaactctttctggtttagtgaatcttggctgtcaaccactgtcatccataccatttcattcttcaaattcaggctcaacaggacatctcttagcccatacacctcattctgtgcataccctgcctcatctgcaatcaatgggatatcattgttcaaatacaggacaaagatctctttcttctccagtggctgaccagattacaggtcagccttcgtctcagttacaacctattacatatggtccttcacattcagggtctgctacaacagcttccccagcagcttctcatcccttggctagttcaccgctttctgggccaccatctcctcagcttcagcctatgccttaccaatctcctagctcaggaactgcctcatcaccgtctccagccaccagaatgcattctggacagcactcaactcaagcacaaagtacgggccaggggggtctttctgcaccttcatccttaatatgtcacagtttgtgtgatccagcgtcatttccacctgatggggcaactgtgagcattaaacctgaaccagaagatcgagagcctaactttgcaaccattggtctgcaggacatcactttagatgatgtgaacgagataattgggagagacatgtcccagatttctgtttcccaaggagcaggggtgagcaggcaggctcccctcccgagtcctgagtccctggatttaggaagatctgatgggctctaacagtgcttactgcagccttgtgtccaccaccaacttctcagcatgtttctctccttggaccttgggtttccaactctgcagccttcaggtctggggccaggagtgggacccaccatttgtggggaaagtagcattcctccacctcaggccttgggtagatttggcaaaagaacaggagcagcataggctgtttgagctttggggaaatgaactttgctttttatatttaactaggatacttttatatgatgggtgctttgagtgtgaatgcagcaggctctcttgtttccgaggtgctgcttttgcaggtgacctggttacttagctaggattggtgatttgtactgctttatggtcatttgaagggccctttagtttttatgataatttttaaaataggaacttttgataagaccttctagaagcaaaaaaaaaaaaaaaaagaaaaaaaaagaaaagaaaaaaagaaaaagaaaaaaatatcccaagcccacacctatgcctcagaaagtcagcatgtgtcctgaagacgttcatagatttataggaaataaagccaaatgtagctcatacctctttataaaactaaactgttgttagataaaatgagaagagaccattccatcattgaagtgttggaatataaaaagacattccagagcatagccttttggtaactttctaggtaatcttgcaatctctccatactggctccatgttgaaattgctttttccctcaggaccctgggtaagatggctacatttaaggtgactctgaatggtggggttctagcttggtcactttcatttcttgccatcataaaaactagtaggctgtggagtgcgcttcctgtttgtgtcatctggtcgtagaaccttttccaaacagaagcatctgcctttggctgttctgtgacctttgaagccagtctcagtggtttaggcagctttgcagttctaactctagctagaggccaggctgtgtgcagagctaaagcacaaatgagcagtacatcagcatgggcagagaaaatacaggactccagatgggaaggttttaagagtcacactggcatggaaggcttatctgccattctatttatagcctgaaatgattctggcctaccctgtcctgtctgtatgatctaaaaaccagccttttccccagaaggctctgagcacatccagaagtgataacctgaccctccacaccaaagacaccctggtgctgctgctggtgagactggtgtccaaggcagggcccagcagaaactgcagcctgctgtctaccaaaggaggtacccgagttgggtactttaaaaaaaaaaaaaacctgcccttacccctctccctaatgggattttttttacctgttcctgggcccattacagagcctctgaagtttgcagtatgctttcaaatgaaataatatacttccattgattcaggaagcagattttttgagtgcctatatgtgagacagtgtgctggttgaaggcctgatgctgttattccaggagactgcaggcccttgatgccaggactctctctactaaggccagttcaggtctgggaaagggagctggcctattgcccaccacctgttgtcagtaggttaggagctgttgactcaggatgaggaagtatggtctttaaaaaaaacaaaatatattttagatttctcccctaaagttagttagagaaaaaggtctattcttcagcagatcactgtggcccctcttggagctgggtgttttcaaattttcttgaaaagtgagttgtgtcacagaatgtggatagtgagatttgcttctgggcctgtggttggacgcccacagcttcctttggaggggcaagaagttggcctctcggttgacattccagagaaatggccagacttgcccctacccttttgcccctggtgtagctgcctcacatgaggttattgcaagagttccccttgcaataccctttgtgccctcaagaattaaaagcctctatgatccagagttgctatgcaccaaattttgatgccttctaaataccttgatgcctgtagcactagaaatgctttcctatttaaaataaacattaaattttaaaatagagctttgtatactatgtaagcagttttatatcagctttgtaaaagctttggtgttaagagtcaatattttttggctttgtagataaagacttaaatttttgtgcaacatagtggtgttaaagcacacatccattggactatgcaaatcaatttctactagcagcactgagcaactgggcacgtgctagtacgcaccccctcctactctaactgtgctagctcttgggttgaggaatggaatgggtagccttctgcttactggagatgcacagagaaacatggctgaaaacagctttaaaaagaacatgtctttgggttcatgtgtggtgctgctgcccgggtgtaaactatccccacccagggccagccattatcaccagacctcttctgggcctggctgtgaagccctgtttttggtattcagaatggatctttaaggctcagatgggctcaaattgaaaccttgtgttttataaaatggatgtttagtaaaggaactggttctcagttatgtttacagcacttggaattgtgtgttcttgtacattttgtattttaaaaccttttatgggagtgcagtgctccttacacaaatacaaagggaagaagagccagcagttgaggctcctcagttttagtgctgaaataataaacagtgacaggtcaacagtatccttaatctgtctgagtgttcctccgcctggggttggtgtggagcccctcactttggggcaaagttaagggtcctgtgtcttttaaaaagtccatttggtcaataacttttcatttaaggaagagaagatcgagttccaaattgcttccgaggcttcagttctgtaccatttaatgcgtgcaaaggacattccatggtgtctgctgggttcagggcaactggctttcccaaggcatacaagaaaag

SEQ ID NO: 374466 - DNA, 6402 bp, Homo sapiens
agggcgcgagagcgcacccgcggcggcggtggcggcgactgtgggggggcggcggggaacattggctaagccgacagtggaggcttaggcaccggtggcgggcggctgcggttcctggtgctgctcggcgcgcggccagctttcggaacggaacgctcggcgtcgcgggccccgcccggaaagtttgccgtggagtcgcgacctcttggcccgcgcggcccggcatgaagcggcgttgaggagctgctgccgccgcttgccgctgccgccgccgccgcctgaggaggagctgcagcaccctgggccacgccgatgactactgcaaactgtggcgcccacgacgagctcgacttcaaactcgtctttggcgaggacggggcgccggcgccgccgcccccgggctcgcggcctgcagatcttgagccagatgattgtgcatccatttacatctttaatgtagatccacctccatctactttaaccacaccactttgcttaccacatcatggattaccgtctcactcttctgttttgtcaccatcgtttcagctccaaagtcacaaaaactatgaaggaacttgtgagattcctgaatctaaatatagcccattaggtggtcccaaaccctttgagtgcccaagtattcaaattacatctatctctcctaactgtcatcaagaattagatgcacatgaagatgacctacagataaatgacccagaacgggaatttttggaaaggccttctagagatcatctctatcttcctcttgagccatcctaccgggagtcttctcttagtcctagtcctgccagcagcatctcttctaggagttggttctctgatgcatcttcttgtgaatcgctttcacatatttatgatgatgtggactcagagttgaatgaagctgcagcccgatttacccttggatcccctctgacttctcctggtggctctccagggggctgccctggagaagaaacttggcatcaacagtatggacttggacactcattatcacccaggcaatctccttgccactctcctagatccagtgtcactgatgagaattggctgagccccaggccagcctcaggaccctcatcaaggcccacatccccctgtgggaaacggaggcactccagtgctgaagtttgttatgctgggtccctttcaccccatcactcacctgttccttcacctggtcactcccccaggggaagtgtgacagaagatacgtggctcaatgcttctgtccatggtgggtcaggccttggccctgcagtttttccatttcagtactgtgtagagactgacatccctctcaaaacaaggaaaacttctgaagatcaagctgccatactaccaggaaaattagagctgtgttcagatgaccaagggagtttatcaccagcccgggagacttcaatagatgatggccttggatctcagtatcctttaaagaaagattcatgtggtgatcagtttctttcagttccttcaccctttacctggagcaaaccaaagcctggccacacccctatatttcgcacatcttcattacctccactagactggcctttaccagctcattttggacaatgtgaactgaaaatagaagtgcaacctaaaactcatcatcgagcccattatgaaactgaaggtagccgaggggcagtaaaagcatctactgggggacatcctgttgtgaagctcctgggctataacgaaaagccaataaatctacaaatgtttattgggacagcagatgatcgatatttacgacctcatgcattttaccaggtgcatcgaatcactgggaagacagtcgctactgcaagccaagagataataattgccagtacaaaagttctggaaattccacttcttcctgaaaataatatgtcagccagtattgattgtgcaggtattttgaaactccgcaattcagatatagaacttcgaaaaggagaaactgatattggcagaaagaatactagagtacgacttgtgtttcgtgtacacatcccacagcccagtggaaaagtcctttctctgcagatagcctctatacccgttgagtgctcccagcggtctgctcaagaacttcctcatattgagaagtacagtatcaacagttgttctgtaaatggaggtcatgaaatggttgtgactggatctaattttcttccagaatccaaaatcatttttcttgaaaaaggacaagatggacgacctcagtgggaggtagaagggaagataatcagggaaaaatgtcaaggggctcacattgtccttgaagttcctccatatcataacccagcaccagaggccttcctctgattcagggtgttcacatgacagtgtactgtcaggacagagaagtttgatttgctccatcccacaaacatatgcatccatggtgacctcatcccatctgccacagttgcagtgtagagatgagagtgttagtaaagaacagcatatgattccttctccaattgtacaccagccttttcaagtcacaccaacacctcctgtggggtcttcctatcagcctatgcaaactaatgttgtgtacaatggaccaacttgtcttcctattaatgctgcctctagtcaagaatttgattcagttttgtttcagcaggatgcaactctttctggtttagtgaatcttggctgtcaaccactgtcatccataccatttcattcttcaaattcaggctcaacaggacatctcttagcccatacacctcattctgtgcataccctgcctcatctgcaatcaatgggatatcattgttcaaatacaggacaaagatctctttcttctccagtggctgaccagattacaggtcagccttcgtctcagttacaacctattacatatggtccttcacattcagggtctgctacaacagcttccccagcagcttctcatcccttggctagttcaccgctttctgggccaccatctcctcagcttcagcctatgccttaccaatctcctagctcaggaactgcctcatcaccgtctccagccaccagaatgcattctggacagcactcaactcaagcacaaagtacgggccaggggggtctttctgcaccttcatccttaatatgtcacagtttgtgtgatccagcgtcatttccacctgatggggcaactgtgagcattaaacctgaaccagaagatcgagagcctaactttgcaaccattggtctgcaggacatcactttagatgatgtgaacgagataattgggagagacatgtcccagatttctgtttcccaaggagcaggggtgagcaggcaggctcccctcccgagtcctgagtccctggatttaggaagatctgatgggctctaacagtgcttactgcagccttgtgtccaccaccaacttctcagcatgtttctctccttggaccttgggtttccaactctgcagccttcaggtctggggccaggagtgggacccaccatttgtggggaaagtagcattcctccacctcaggccttgggtagatttggcaaaagaacaggagcagcataggctgtttgagctttggggaaatgaactttgctttttatatttaactaggatacttttatatgatgggtgctttgagtgtgaatgcagcaggctctcttgtttccgaggtgctgcttttgcaggtgacctggttacttagctaggattggtgatttgtactgctttatggtcatttgaagggccctttagtttttatgataatttttaaaataggaacttttgataagaccttctagaagcaaaaaaaaaaaaaaaaagaaaaaaaaagaaaagaaaaaaagaaaaagaaaaaaatatcccaagcccacacctatgcctcagaaagtcagcatgtgtcctgaagacgttcatagatttataggaaataaagccaaatgtagctcatacctctttataaaactaaactgttgttagataaaatgagaagagaccattccatcattgaagtgttggaatataaaaagacattccagagcatagccttttggtaactttctaggtaatcttgcaatctctccatactggctccatgttgaaattgctttttccctcaggaccctgggtaagatggctacatttaaggtgactctgaatggtggggttctagcttggtcactttcatttcttgccatcataaaaactagtaggctgtggagtgcgcttcctgtttgtgtcatctggtcgtagaaccttttccaaacagaagcatctgcctttggctgttctgtgacctttgaagccagtctcagtggtttaggcagctttgcagttctaactctagctagaggccaggctgtgtgcagagctaaagcacaaatgagcagtacatcagcatgggcagagaaaatacaggactccagatgggaaggttttaagagtcacactggcatggaaggcttatctgccattctatttatagcctgaaatgattctggcctaccctgtcctgtctgtatgatctaaaaaccagccttttccccagaaggctctgagcacatccagaagtgataacctgaccctccacaccaaagacaccctggtgctgctgctggtgagactggtgtccaaggcagggcccagcagaaactgcagcctgctgtctaccaaaggaggtacccgagttgggtactttaaaaaaaaaaaaaacctgcccttacccctctccctaatgggattttttttacctgttcctgggcccattacagagcctctgaagtttgcagtatgctttcaaatgaaataatatacttccattgattcaggaagcagattttttgagtgcctatatgtgagacagtgtgctggttgaaggcctgatgctgttattccaggagactgcaggcccttgatgccaggactctctctactaaggccagttcaggtctgggaaagggagctggcctattgcccaccacctgttgtcagtaggttaggagctgttgactcaggatgaggaagtatggtctttaaaaaaaacaaaatatattttagatttctcccctaaagttagttagagaaaaaggtctattcttcagcagatcactgtggcccctcttggagctgggtgttttcaaattttcttgaaaagtgagttgtgtcacagaatgtggatagtgagatttgcttctgggcctgtggttggacgcccacagcttcctttggaggggcaagaagttggcctctcggttgacattccagagaaatggccagacttgcccctacccttttgcccctggtgtagctgcctcacatgaggttattgcaagagttccccttgcaataccctttgtgccctcaagaattaaaagcctctatgatccagagttgctatgcaccaaattttgatgccttctaaataccttgatgcctgtagcactagaaatgctttcctatttaaaataaacattaaattttaaaatagagctttgtatactatgtaagcagttttatatcagctttgtaaaagctttggtgttaagagtcaatattttttggctttgtagataaagacttaaatttttgtgcaacatagtggtgttaaagcacacatccattggactatgcaaatcaatttctactagcagcactgagcaactgggcacgtgctagtacgcaccccctcctactctaactgtgctagctcttgggttgaggaatggaatgggtagccttctgcttactggagatgcacagagaaacatggctgaaaacagctttaaaaagaacatgtctttgggttcatgtgtggtgctgctgcccgggtgtaaactatccccacccagggccagccattatcaccagacctcttctgggcctggctgtgaagccctgtttttggtattcagaatggatctttaaggctcagatgggctcaaattgaaaccttgtgttttataaaatggatgtttagtaaaggaactggttctcagttatgtttacagcacttggaattgtgtgttcttgtacattttgtattttaaaaccttttatgggagtgcagtgctccttacacaaatacaaagggaagaagagccagcagttgaggctcctcagttttagtgctgaaataataaacagtgacaggtcaacagtatccttaatctgtctgagtgttcctccgcctggggttggtgtggagcccctcactttggggcaaagttaagggtcctgtgtcttttaaaaagtccatttggtcaataacttttcatttaaggaagagaagatcgagttccaaattgcttccgaggcttcagttctgtaccatttaatgcgtgcaaaggacattccatggtgtctgctgggttcagggcaactggctttcccaaggcatacaagaaaag

SEQ ID NO: 374467 - DNA, 3869 bp, Homo sapiens
  misc_feature (33)..(33): n is a, c, g, or t
aggggcaacaacatagatacgacgagctggtgnattcggccgaggtacaatggaccaacttgtcttcctattaatgctgcctctagtcaagaatttgattcagttttgtttcagcaggatgcaactctttctggtttagtgaatcttggctgtcaaccactgtcatccataccatttcattcttcaaattcaggctcaacaggacatctcttagcccatacacctcattctgtgcataccctgcctcatctgcaatcaatgggatatcattgttcaaatacaggacaaagatctctttcttctccagtggctgaccagattacaggtcagccttcgtctcagttacaacctattacatatggtccttcacattcagggtctgctacaacagcttccccagcagcttctcatcccttggctagttcaccgctttctgggccaccatctcctcagcttcagcctatgccttaccaatctcctagctcaggaactgcctcatcaccgtctccagccaccagaatgcattctggacagcactcaactcaagcacaaagtacgggccaggggggtctttctgcaccttcatccttaatatgtcacagtttgtgtgatccagcgtcatttccacctgatggggcaactgtgagcattaaacctgaaccagaagatcgagagcctaactttgcaaccattggtctgcaggacatcactttagatgatgtgaacgagataattgggagagacatgtcccagatttctgtttcccaaggagcaggggtgagcaggcaggctcccctcccgagtcctgagtccctggatttaggaagatctgatgggctctaacagtgcttactgcagccttgtgtccaccaccaacttctcagcatgtttctctccttggaccttgggtttccaactctgcagccttcaggtctggggccaggagtgggacccaccatttgtggggaaagtagcattcctccacctcaggccttgggtagatttggcaaaagaacaggagcagcataggctgtttgagctttggggaaatgaactttgctttttatatttaactaggatacttttatatgatgggtgctttgagtgtgaatgcagcaggctctcttgtttccgaggtgctgcttttgcaggtgacctggttacttagctaggattggtgatttgtactgctttatggtcatttgaagggccctttagtttttatgataatttttaaaataggaacttttgataagaccttctagaagcaaaaaaaaaaaaaaaaagaaaaaaaaagaaaagaaaaaaagaaaaagaaaaaaatatcccaagcccacacctatgcctcagaaagtcagcatgtgtcctgaagacgttcatagatttataggaaataaagccaaatgtagctcatacctctttataaaactaaactgttgttagataaaatgagaagagaccattccatcattgaagtgttggaatataaaaagacattccagagcatagccttttggtaactttctaggtaatcttgcaatctctccatactggctccatgttgaaattgctttttccctcaggaccctgggtaagatggctacatttaaggtgactctgaatggtggggttctagcttggtcactttcatttcttgccatcataaaaactagtaggctgtggagtgcgcttcctgtttgtgtcatctggtcgtagaaccttttccaaacagaagcatctgcctttggctgttctgtgacctttgaagccagtctcagtggtttaggcagctttgcagttctaactctagctagaggccaggctgtgtgcagagctaaagcacaaatgagcagtacatcagcatgggcagagaaaatacaggactccagatgggaaggttttaagagtcacactggcatggaaggcttatctgccattctatttatagcctgaaatgattctggcctaccctgtcctgtctgtatgatctaaaaaccagccttttccccagaaggctctgagcacatccagaagtgataacctgaccctccacaccaaagacaccctggtgctgctgctggtgagactggtgtccaaggcagggcccagcagaaactgcagcctgctgtctaccaaaggaggtacccgagttgggtactttaaaaaaaaaaaaaacctgcccttacccctctccctaatgggattttttttacctgttcctgggcccattacagagcctctgaagtttgcagtatgctttcaaatgaaataatatacttccattgattcaggaagcagattttttgagtgcctatatgtgagacagtgtgctggttgaaggcctgatgctgttattccaggagactgcaggcccttgatgccaggactctctctactaaggccagttcaggtctgggaaagggagctggcctattgcccaccacctgttgtcagtaggttaggagctgttgactcaggatgaggaagtatggtctttaaaaaaaacaaaatatattttagatttctcccctaaagttagttagagaaaaaggtctattcttcagcagatcactgtggcccctcttggagctgggtgttttcaaattttcttgaaaagtgagttgtgtcacagaatgtggatagtgagatttgcttctgggcctgtggttggacgcccacagcttcctttggaggggcaagaagttggcctctcggttgacattccagagaaatggccagacttgcccctacccttttgcccctggtgtagctgcctcacatgaggttattgcaagagttccccttgcaataccctttgtgccctcaagaattaaaagcctctatgatccagagttgctatgcaccaaattttgatgccttctaaataccttgatgcctgtagcactagaaatgctttcctatttaaaataaacattaaattttaaaatagagctttgtatactatgtaagcagttttatatcagctttgtaaaagctttggtgttaagagtcaatattttttggctttgtagataaagacttaaatttttgtgcaacatagtggtgttaaagcacacatccattggactatgcaaatcaatttctactagcagcactgagcaactgggcacgtgctagtacgcaccccctcctactctaactgtgctagctcttgggttgaggaatggaatgggtagccttctgcttactggagatgcacagagaaacatggctgaaaacagctttaaaaagaacatgtctttgggttcatgtgtggtgctgctgcccgggtgtaaactatccccacccagggccagccattatcaccagacctcttctgggcctggctgtgaagccctgtttttggtattcagaatggatctttaaggctcagatgggctcaaattgaaaccttgtgttttataaaatggatgtttagtaaaggaactggttctcagttatgtttacagcacttggaattgtgtgttcttgtacattttgtattttaaaaccttttatgggagtgcagtgctccttacacaaatacaaagggaagaagagccagcagttgaggctcctcagttttagtgctgaaataataaacagtgacaggtcaacagtatccttaatctgtctgagtgttcctccgcctggggttggtgtggagcccctcactttggggcaaagttaagggtcctgtgtcttttaaaaagtccatttggtcaataacttttcatttaaggaagagaagatcgagttccaaattgcttccgaggcttcagttctgtaccatttaatgcgtgcaaaggacattccatggtgtctgctgggttcagggcaactggctttcccaaggcatacaagaaaag

SEQ ID NO: 374468 - DNA, 3923 bp, Homo sapiens
  misc_feature (33)..(33): n is a, c, g, or t
aggggcaacaacatagatacgacgagctggtgnattcggccgaggtacaatggaccaacttgtcttcctattaatgctgcctctagtcaagaatttgattcagttttgtttcagcaggatgcaactctttctggtttagtgaatcttggctgtcaaccactgtcatccataccatttcattcttcaaattcaggctcaacaggacatctcttagcccatacacctcattctgtgcataccctgcctcatctgcaatcaatgggatatcattgttcaaatacaggacaaagatctctttcttctccagtggctgaccagattacaggtcagccttcgtctcagttacaacctattacatatggtccttcacattcagggtctgctacaacagcttccccagcagcttctcatcccttggctagttcaccgctttctgggccaccatctcctcagcttcagcctatgccttaccaatctcctagctcaggaactgcctcatcaccgtctccagccaccagaatgcattctggacagcactcaactcaagcacaaagtacgggccaggggggtctttctgcaccttcatccttaatatgtcacagtttgtgtgatccagcgtcatttccacctgatggggcaactgtgagcattaaacctgaaccagaagatcgagagcctaactttgcaaccattggtctgcaggacatcactttagatgatgttgagacctacgttttggccagtcccagcaggaagatatctgaggaatctagagtgaacgagataattgggagagacatgtcccagatttctgtttcccaaggagcaggggtgagcaggcaggctcccctcccgagtcctgagtccctggatttaggaagatctgatgggctctaacagtgcttactgcagccttgtgtccaccaccaacttctcagcatgtttctctccttggaccttgggtttccaactctgcagccttcaggtctggggccaggagtgggacccaccatttgtggggaaagtagcattcctccacctcaggccttgggtagatttggcaaaagaacaggagcagcataggctgtttgagctttggggaaatgaactttgctttttatatttaactaggatacttttatatgatgggtgctttgagtgtgaatgcagcaggctctcttgtttccgaggtgctgcttttgcaggtgacctggttacttagctaggattggtgatttgtactgctttatggtcatttgaagggccctttagtttttatgataatttttaaaataggaacttttgataagaccttctagaagcaaaaaaaaaaaaaaaaagaaaaaaaaagaaaagaaaaaaagaaaaagaaaaaaatatcccaagcccacacctatgcctcagaaagtcagcatgtgtcctgaagacgttcatagatttataggaaataaagccaaatgtagctcatacctctttataaaactaaactgttgttagataaaatgagaagagaccattccatcattgaagtgttggaatataaaaagacattccagagcatagccttttggtaactttctaggtaatcttgcaatctctccatactggctccatgttgaaattgctttttccctcaggaccctgggtaagatggctacatttaaggtgactctgaatggtggggttctagcttggtcactttcatttcttgccatcataaaaactagtaggctgtggagtgcgcttcctgtttgtgtcatctggtcgtagaaccttttccaaacagaagcatctgcctttggctgttctgtgacctttgaagccagtctcagtggtttaggcagctttgcagttctaactctagctagaggccaggctgtgtgcagagctaaagcacaaatgagcagtacatcagcatgggcagagaaaatacaggactccagatgggaaggttttaagagtcacactggcatggaaggcttatctgccattctatttatagcctgaaatgattctggcctaccctgtcctgtctgtatgatctaaaaaccagccttttccccagaaggctctgagcacatccagaagtgataacctgaccctccacaccaaagacaccctggtgctgctgctggtgagactggtgtccaaggcagggcccagcagaaactgcagcctgctgtctaccaaaggaggtacccgagttgggtactttaaaaaaaaaaaaaacctgcccttacccctctccctaatgggattttttttacctgttcctgggcccattacagagcctctgaagtttgcagtatgctttcaaatgaaataatatacttccattgattcaggaagcagattttttgagtgcctatatgtgagacagtgtgctggttgaaggcctgatgctgttattccaggagactgcaggcccttgatgccaggactctctctactaaggccagttcaggtctgggaaagggagctggcctattgcccaccacctgttgtcagtaggttaggagctgttgactcaggatgaggaagtatggtctttaaaaaaaacaaaatatattttagatttctcccctaaagttagttagagaaaaaggtctattcttcagcagatcactgtggcccctcttggagctgggtgttttcaaattttcttgaaaagtgagttgtgtcacagaatgtggatagtgagatttgcttctgggcctgtggttggacgcccacagcttcctttggaggggcaagaagttggcctctcggttgacattccagagaaatggccagacttgcccctacccttttgcccctggtgtagctgcctcacatgaggttattgcaagagttccccttgcaataccctttgtgccctcaagaattaaaagcctctatgatccagagttgctatgcaccaaattttgatgccttctaaataccttgatgcctgtagcactagaaatgctttcctatttaaaataaacattaaattttaaaatagagctttgtatactatgtaagcagttttatatcagctttgtaaaagctttggtgttaagagtcaatattttttggctttgtagataaagacttaaatttttgtgcaacatagtggtgttaaagcacacatccattggactatgcaaatcaatttctactagcagcactgagcaactgggcacgtgctagtacgcaccccctcctactctaactgtgctagctcttgggttgaggaatggaatgggtagccttctgcttactggagatgcacagagaaacatggctgaaaacagctttaaaaagaacatgtctttgggttcatgtgtggtgctgctgcccgggtgtaaactatccccacccagggccagccattatcaccagacctcttctgggcctggctgtgaagccctgtttttggtattcagaatggatctttaaggctcagatgggctcaaattgaaaccttgtgttttataaaatggatgtttagtaaaggaactggttctcagttatgtttacagcacttggaattgtgtgttcttgtacattttgtattttaaaaccttttatgggagtgcagtgctccttacacaaatacaaagggaagaagagccagcagttgaggctcctcagttttagtgctgaaataataaacagtgacaggtcaacagtatccttaatctgtctgagtgttcctccgcctggggttggtgtggagcccctcactttggggcaaagttaagggtcctgtgtcttttaaaaagtccatttggtcaataacttttcatttaaggaagagaagatcgagttccaaattgcttccgaggcttcagttctgtaccatttaatgcgtgcaaaggacattccatggtgtctgctgggttcagggcaactggctttcccaaggcatacaagaaaag

SEQ ID NO: 374469 - DNA, 3589 bp, Homo sapiens
cataataaagagtgcttgtattaggatacagtagcaaaatcacccccacatcacagtggtttattctgaccaaagcatttattttcattccatttacataggaggtggcattgtagaaaataaaaactttctcaaagagatatgaattaaagaaaagttagagtaaggtgaatacttatttaaacatacctttagagtgagggtaagcccccttcccaacccaaaatgaactgaatgagagagaaaaagaggtccagagtagtttgtggagcgatgtttccatctctaatgccactcagctcaggagcaggcttcagacactgcctttatctttacagaaagccatgggaagggaaatgtctgaggtagagctcagcgttgggcatcatatggctaatcactcagaggtcactaatcactctcccttttcttgtttttcagtgaacgagataattgggagagacatgtcccagatttctgtttcccaaggagcaggggtgagcaggcaggctcccctcccgagtcctgagtccctggatttaggaagatctgatgggctctaacagtgcttactgcagccttgtgtccaccaccaacttctcagcatgtttctctccttggaccttgggtttccaactctgcagccttcaggtctggggccaggagtgggacccaccatttgtggggaaagtagcattcctccacctcaggccttgggtagatttggcaaaagaacaggagcagcataggctgtttgagctttggggaaatgaactttgctttttatatttaactaggatacttttatatgatgggtgctttgagtgtgaatgcagcaggctctcttgtttccgaggtgctgcttttgcaggtgacctggttacttagctaggattggtgatttgtactgctttatggtcatttgaagggccctttagtttttatgataatttttaaaataggaacttttgataagaccttctagaagcaaaaaaaaaaaaaaaaagaaaaaaaaagaaaagaaaaaaagaaaaagaaaaaaatatcccaagcccacacctatgcctcagaaagtcagcatgtgtcctgaagacgttcatagatttataggaaataaagccaaatgtagctcatacctctttataaaactaaactgttgttagataaaatgagaagagaccattccatcattgaagtgttggaatataaaaagacattccagagcatagccttttggtaactttctaggtaatcttgcaatctctccatactggctccatgttgaaattgctttttccctcaggaccctgggtaagatggctacatttaaggtgactctgaatggtggggttctagcttggtcactttcatttcttgccatcataaaaactagtaggctgtggagtgcgcttcctgtttgtgtcatctggtcgtagaaccttttccaaacagaagcatctgcctttggctgttctgtgacctttgaagccagtctcagtggtttaggcagctttgcagttctaactctagctagaggccaggctgtgtgcagagctaaagcacaaatgagcagtacatcagcatgggcagagaaaatacaggactccagatgggaaggttttaagagtcacactggcatggaaggcttatctgccattctatttatagcctgaaatgattctggcctaccctgtcctgtctgtatgatctaaaaaccagccttttccccagaaggctctgagcacatccagaagtgataacctgaccctccacaccaaagacaccctggtgctgctgctggtgagactggtgtccaaggcagggcccagcagaaactgcagcctgctgtctaccaaaggaggtacccgagttgggtactttaaaaaaaaaaaaaacctgcccttacccctctccctaatgggattttttttacctgttcctgggcccattacagagcctctgaagtttgcagtatgctttcaaatgaaataatatacttccattgattcaggaagcagattttttgagtgcctatatgtgagacagtgtgctggttgaaggcctgatgctgttattccaggagactgcaggcccttgatgccaggactctctctactaaggccagttcaggtctgggaaagggagctggcctattgcccaccacctgttgtcagtaggttaggagctgttgactcaggatgaggaagtatggtctttaaaaaaaacaaaatatattttagatttctcccctaaagttagttagagaaaaaggtctattcttcagcagatcactgtggcccctcttggagctgggtgttttcaaattttcttgaaaagtgagttgtgtcacagaatgtggatagtgagatttgcttctgggcctgtggttggacgcccacagcttcctttggaggggcaagaagttggcctctcggttgacattccagagaaatggccagacttgcccctacccttttgcccctggtgtagctgcctcacatgaggttattgcaagagttccccttgcaataccctttgtgccctcaagaattaaaagcctctatgatccagagttgctatgcaccaaattttgatgccttctaaataccttgatgcctgtagcactagaaatgctttcctatttaaaataaacattaaattttaaaatagagctttgtatactatgtaagcagttttatatcagctttgtaaaagctttggtgttaagagtcaatattttttggctttgtagataaagacttaaatttttgtgcaacatagtggtgttaaagcacacatccattggactatgcaaatcaatttctactagcagcactgagcaactgggcacgtgctagtacgcaccccctcctactctaactgtgctagctcttgggttgaggaatggaatgggtagccttctgcttactggagatgcacagagaaacatggctgaaaacagctttaaaaagaacatgtctttgggttcatgtgtggtgctgctgcccgggtgtaaactatccccacccagggccagccattatcaccagacctcttctgggcctggctgtgaagccctgtttttggtattcagaatggatctttaaggctcagatgggctcaaattgaaaccttgtgttttataaaatggatgtttagtaaaggaactggttctcagttatgtttacagcacttggaattgtgtgttcttgtacattttgtattttaaaaccttttatgggagtgcagtgctccttacacaaatacaaagggaagaagagccagcagttgaggctcctcagttttagtgctgaaataataaacagtgacaggtcaacagtatccttaatctgtctgagtgttcctccgcctggggttggtgtggagcccctcactttggggcaaagttaagggtcctgtgtcttttaaaaagtccatttggtcaataacttttcatttaaggaagagaagatcgagttccaaattgcttccgaggcttcagttctgtaccatttaatgcgtgcaaaggacattccatggtgtctgctgggttcagggcaactggctttcccaaggcatacaagaaaag

SEQ ID NO: 374470 - DNA, 3482 bp, Homo sapiens
cataataaagagtgcttgtattaggatacagtagcaaaatcacccccacatcacagtggtttattctgaccaaagcatttattttcattccatttacataggaggtggcattgtagaaaataaaaactttctcaaagagatatgaattaaagaaaagttagagtaaggtgaatacttatttaaacatacctttagagtgagggtaagcccccttcccaacccaaaatgaactgaatgagagagaaaaagaggtccagagtagtttgtggagcgatgtttccatctctaatgccatcagaggtcactaatcactctcccttttcttgtttttcagtgaacgagataattgggagagacatgtcccagatttctgtttcccaaggagcaggggtgagcaggcaggctcccctcccgagtcctgagtccctggatttaggaagatctgatgggctctaacagtgcttactgcagccttgtgtccaccaccaacttctcagcatgtttctctccttggaccttgggtttccaactctgcagccttcaggtctggggccaggagtgggacccaccatttgtggggaaagtagcattcctccacctcaggccttgggtagatttggcaaaagaacaggagcagcataggctgtttgagctttggggaaatgaactttgctttttatatttaactaggatacttttatatgatgggtgctttgagtgtgaatgcagcaggctctcttgtttccgaggtgctgcttttgcaggtgacctggttacttagctaggattggtgatttgtactgctttatggtcatttgaagggccctttagtttttatgataatttttaaaataggaacttttgataagaccttctagaagcaaaaaaaaaaaaaaaaagaaaaaaaaagaaaagaaaaaaagaaaaagaaaaaaatatcccaagcccacacctatgcctcagaaagtcagcatgtgtcctgaagacgttcatagatttataggaaataaagccaaatgtagctcatacctctttataaaactaaactgttgttagataaaatgagaagagaccattccatcattgaagtgttggaatataaaaagacattccagagcatagccttttggtaactttctaggtaatcttgcaatctctccatactggctccatgttgaaattgctttttccctcaggaccctgggtaagatggctacatttaaggtgactctgaatggtggggttctagcttggtcactttcatttcttgccatcataaaaactagtaggctgtggagtgcgcttcctgtttgtgtcatctggtcgtagaaccttttccaaacagaagcatctgcctttggctgttctgtgacctttgaagccagtctcagtggtttaggcagctttgcagttctaactctagctagaggccaggctgtgtgcagagctaaagcacaaatgagcagtacatcagcatgggcagagaaaatacaggactccagatgggaaggttttaagagtcacactggcatggaaggcttatctgccattctatttatagcctgaaatgattctggcctaccctgtcctgtctgtatgatctaaaaaccagccttttccccagaaggctctgagcacatccagaagtgataacctgaccctccacaccaaagacaccctggtgctgctgctggtgagactggtgtccaaggcagggcccagcagaaactgcagcctgctgtctaccaaaggaggtacccgagttgggtactttaaaaaaaaaaaaaacctgcccttacccctctccctaatgggattttttttacctgttcctgggcccattacagagcctctgaagtttgcagtatgctttcaaatgaaataatatacttccattgattcaggaagcagattttttgagtgcctatatgtgagacagtgtgctggttgaaggcctgatgctgttattccaggagactgcaggcccttgatgccaggactctctctactaaggccagttcaggtctgggaaagggagctggcctattgcccaccacctgttgtcagtaggttaggagctgttgactcaggatgaggaagtatggtctttaaaaaaaacaaaatatattttagatttctcccctaaagttagttagagaaaaaggtctattcttcagcagatcactgtggcccctcttggagctgggtgttttcaaattttcttgaaaagtgagttgtgtcacagaatgtggatagtgagatttgcttctgggcctgtggttggacgcccacagcttcctttggaggggcaagaagttggcctctcggttgacattccagagaaatggccagacttgcccctacccttttgcccctggtgtagctgcctcacatgaggttattgcaagagttccccttgcaataccctttgtgccctcaagaattaaaagcctctatgatccagagttgctatgcaccaaattttgatgccttctaaataccttgatgcctgtagcactagaaatgctttcctatttaaaataaacattaaattttaaaatagagctttgtatactatgtaagcagttttatatcagctttgtaaaagctttggtgttaagagtcaatattttttggctttgtagataaagacttaaatttttgtgcaacatagtggtgttaaagcacacatccattggactatgcaaatcaatttctactagcagcactgagcaactgggcacgtgctagtacgcaccccctcctactctaactgtgctagctcttgggttgaggaatggaatgggtagccttctgcttactggagatgcacagagaaacatggctgaaaacagctttaaaaagaacatgtctttgggttcatgtgtggtgctgctgcccgggtgtaaactatccccacccagggccagccattatcaccagacctcttctgggcctggctgtgaagccctgtttttggtattcagaatggatctttaaggctcagatgggctcaaattgaaaccttgtgttttataaaatggatgtttagtaaaggaactggttctcagttatgtttacagcacttggaattgtgtgttcttgtacattttgtattttaaaaccttttatgggagtgcagtgctccttacacaaatacaaagggaagaagagccagcagttgaggctcctcagttttagtgctgaaataataaacagtgacaggtcaacagtatccttaatctgtctgagtgttcctccgcctggggttggtgtggagcccctcactttggggcaaagttaagggtcctgtgtcttttaaaaagtccatttggtcaataacttttcatttaaggaagagaagatcgagttccaaattgcttccgaggcttcagttctgtaccatttaatgcgtgcaaaggacattccatggtgtctgctgggttcagggcaactggctttcccaaggcatacaagaaaag

SEQ ID NO: 374471 - DNA, 4096 bp, Homo sapiens
agggcgcgagagcgcacccgcggcggcggtggcggcgactgtgggggggcggcggggaacattggctaagccgacagtggaggcttaggcaccggtggcgggcggctgcggttcctggtgctgctcggcgcgcggccagctttcggaacggaacgctcggcgtcgcgggccccgcccggaaagtttgccgtggagtcgcgacctcttggcccgcgcggcccggcatgaagcggcgttgaggagctgctgccgccgcttgccgctgccgccgccgccgcctgaggaggagctgcagcaccctgggccacgccgatgactactgcaaactgtggcgcccacgacgagctcgacttcaaactcgtctttggcgaggacggggcgccggcgccgccgcccccgggctcgcggcctgcagatcttgagccagatgattgtgcatccatttacatctttaatgtagatccacctccatctactttaaccacaccactttgcttaccacatcatggattaccgtctcactcttctgttttgtcaccatcgtttcagctccaaagtcacaaaaactatgaaggaacttgtgagattcctgaatctaaatatagcccattaggtggtcccaaaccctttgagtgcccaagtattcaaattacatctatctctcctaactgtcatcaagaattagatgcacatgaagatgacctacagataaatgacccagaacgggaatttttggaaaggccttctagagatcatctctatcttcctcttgagccatcctaccgggagtcttctcttagtcctagtcctgccagcagcatctcttctaggagttggttctctgatgcatcttcttgtgaatcgctttcacatatttatgatgatgtggactcagagttgaatgaagctgcagcccgatttacccttggatcccctctgacttctcctggtggctctccagggggctgccctggagaagaaacttggcatcaacagtatggacttggacactcattatcacccaggcaatctccttgccactctcctagatccagtgtcactgatgagaattggctgagccccaggccagcctcaggaccctcatcaaggcccacatccccctgtgggaaacggaggcactccagtgctgaagtttgttatgctgggtccctttcaccccatcactcacctgttccttcacctggtcactcccccaggggaagtgtgacagaagatacgtggctcaatgcttctgtccatggtgggtcaggccttggccctgcagtttttccatttcagtactgtgtagagactgacatccctctcaaaacaaggaaaacttctgaagatcaagctgccatactaccaggaaaattagagctgtgttcagatgaccaagggagtttatcaccagcccgggagacttcaatagatgatggccttggatctcagtatcctttaaagaaagattcatgtggtgatcagtttctttcagttccttcaccctttacctggagcaaaccaaagcctggccacacccctatatttcgcacatcttcattacctccactagactggcctttaccagctcattttggacaatgtgaactgaaaatagaagtgcaacctaaaactcatcatcgagcccattatgaaactgaaggtagccgaggggcagtaaaagcatctactgggggacatcctgttgtgaagctcctgggctataacgaaaagccaataaatctacaaatgtttattgggacagcagatgatcgatatttacgacctcatgcattttaccaggtgcatcgaatcactgggaagacagtcgctactgcaagccaagagataataattgccagtacaaaagttctggaaattccacttcttcctgaaaataatatgtcagccagtattgattgtgcaggtattttgaaactccgcaattcagatatagaacttcgaaaaggagaaactgatattggcagaaagaatactagagtacgacttgtgtttcgtgtacacatcccacagcccagtggaaaagtcctttctctgcagatagcctctatacccgttgagtgctcccagcggtctgctcaagaacttcctcatattgagaagtacagtatcaacagttgttctgtaaatggaggtcatgaaatggttgtgactggatctaattttcttccagaatccaaaatcatttttcttgaaaaaggacaagatggacgacctcagtgggaggtagaagggaagataatcagggaaaaatgtcaaggggctcacattgtccttgaagttcctccatatcataacccagcagttacagctgcagtgcaggtgcacttttatctttgcaatggcaagaggaaaaaaagccagtctcaacgttttacttatacaccagttttgatgaagcaagaacacagagaagagattgatttgtcttcagttccatctttgcctgtgcctcatcctgctcagacccagaggccttcctctgattcagggtgttcacatgacagtgtactgtcaggacagagaagtttgatttgctccatcccacaaacatatgcatccatggtgacctcatcccatctgccacagttgcagtgtagagatgagagtgttagtaaagaacagcatatgattccttctccaattgtacaccagccttttcaagtcacaccaacacctcctgtggggtcttcctatcagcctatgcaaactaatgttgtgtacaatggaccaacttgtcttcctattaatgctgcctctagtcaagaatttgattcagttttgtttcagcaggatgcaactctttctggtttagtgaatcttggctgtcaaccactgtcatccataccatttcattcttcaaattcaggctcaacaggacatctcttagcccatacacctcattctgtgcataccctgcctcatctgcaatcaatgggatatcattgttcaaatacaggacaaagatctctttcttctccagtggctgaccagattacaggtcagccttcgtctcagttacaacctattacatatggtccttcacattcagggtctgctacaacagcttccccagcagcttctcatcccttggctagttcaccgctttctgggccaccatctcctcagcttcagcctatgccttaccaatctcctagctcaggaactgcctcatcaccgtctccagccaccagaatgcattctggacagcactcaactcaagcacaaagtacgggccaggggggtctttctgcaccttcatccttaatatgtcacagtttgtgtgatccagcgtcatttccacctgatggggcaactgtgagcattaaacctgaaccagaagatcgagagcctaactttgcaaccattggtctgcaggacatcactttagatgatgtgaacgagataattgggagagacatgtcccagatttctgtttcccaaggagcaggggtgagcaggcaggctcccctcccgagtcctgagtccctggatttaggaagatctgatgggctctaacagtgcttactgcagccttgtgtccaccaccaacttctcagcatgtttctctccttggaccttgggtttccaactctgcagccttcaggtctggggccaggagtgggacccaccatttgtggggaaagtagcattcctccacctcaggccttgggtagatttggcaaaagaacaggagcagcataggctgtttgagctttggggaaatgaactttgctttttatatttaactaggatacttttatatgatgggtgctttgagtgtgaatgcagcaggctctcttgtttccgaggtgctgcttttgcaggtgacctggttacttagctaggattggtgatttgtactgctttatggtcatttgaagggccctttagtttttatgataatttttaaatctttgttaaaattatctgaaaaatttctgaattgcttttctttgttatcttgaagatcactgggtttccttaaaactgctattttgaaagttggttagagtttacatattgccttctcattagggctagtcactggttcctgagttatctatttgggaaa

SEQ ID NO: 374472 - DNA, 3970 bp, Homo sapiens
agggcgcgagagcgcacccgcggcggcggtggcggcgactgtgggggggcggcggggaacattggctaagccgacagtggaggcttaggcaccggtggcgggcggctgcggttcctggtgctgctcggcgcgcggccagctttcggaacggaacgctcggcgtcgcgggccccgcccggaaagtttgccgtggagtcgcgacctcttggcccgcgcggcccggcatgaagcggcgttgaggagctgctgccgccgcttgccgctgccgccgccgccgcctgaggaggagctgcagcaccctgggccacgccgatgactactgcaaactgtggcgcccacgacgagctcgacttcaaactcgtctttggcgaggacggggcgccggcgccgccgcccccgggctcgcggcctgcagatcttgagccagatgattgtgcatccatttacatctttaatgtagatccacctccatctactttaaccacaccactttgcttaccacatcatggattaccgtctcactcttctgttttgtcaccatcgtttcagctccaaagtcacaaaaactatgaaggaacttgtgagattcctgaatctaaatatagcccattaggtggtcccaaaccctttgagtgcccaagtattcaaattacatctatctctcctaactgtcatcaagaattagatgcacatgaagatgacctacagataaatgacccagaacgggaatttttggaaaggccttctagagatcatctctatcttcctcttgagccatcctaccgggagtcttctcttagtcctagtcctgccagcagcatctcttctaggagttggttctctgatgcatcttcttgtgaatcgctttcacatatttatgatgatgtggactcagagttgaatgaagctgcagcccgatttacccttggatcccctctgacttctcctggtggctctccagggggctgccctggagaagaaacttggcatcaacagtatggacttggacactcattatcacccaggcaatctccttgccactctcctagatccagtgtcactgatgagaattggctgagccccaggccagcctcaggaccctcatcaaggcccacatccccctgtgggaaacggaggcactccagtgctgaagtttgttatgctgggtccctttcaccccatcactcacctgttccttcacctggtcactcccccaggggaagtgtgacagaagatacgtggctcaatgcttctgtccatggtgggtcaggccttggccctgcagtttttccatttcagtactgtgtagagactgacatccctctcaaaacaaggaaaacttctgaagatcaagctgccatactaccaggaaaattagagctgtgttcagatgaccaagggagtttatcaccagcccgggagacttcaatagatgatggccttggatctcagtatcctttaaagaaagattcatgtggtgatcagtttctttcagttccttcaccctttacctggagcaaaccaaagcctggccacacccctatatttcgcacatcttcattacctccactagactggcctttaccagctcattttggacaatgtgaactgaaaatagaagtgcaacctaaaactcatcatcgagcccattatgaaactgaaggtagccgaggggcagtaaaagcatctactgggggacatcctgttgtgaagctcctgggctataacgaaaagccaataaatctacaaatgtttattgggacagcagatgatcgatatttacgacctcatgcattttaccaggtgcatcgaatcactgggaagacagtcgctactgcaagccaagagataataattgccagtacaaaagttctggaaattccacttcttcctgaaaataatatgtcagccagtattgattgtgcaggtattttgaaactccgcaattcagatatagaacttcgaaaaggagaaactgatattggcagaaagaatactagagtacgacttgtgtttcgtgtacacatcccacagcccagtggaaaagtcctttctctgcagatagcctctatacccgttgagtgctcccagcggtctgctcaagaacttcctcatattgagaagtacagtatcaacagttgttctgtaaatggaggtcatgaaatggttgtgactggatctaattttcttccagaatccaaaatcatttttcttgaaaaaggacaagatggacgacctcagtgggaggtagaagggaagataatcagggaaaaatgtcaaggggctcacattgtccttgaagttcctccatatcataacccagcagttacagctgcagtgcaggtgcacttttatctttgcaatggcaagaggaaaaaaagccagtctcaacgttttacttatacaccagttttgatgaagcaagaacacagagaagagattgatttgtcttcagttccatctttgcctgtgcctcatcctgctcagacccagaggccttcctctgattcagggtgttcacatgacagtgtactgtcaggacagagaagtttgatttgctccatcccacaaacatatgcatccatggtgacctcatcccatctgccacagttgcagtgtagagatgagagtgttagtaaagaacagcatatgattccttctccaattgtacaccagccttttcaagtcacaccaacacctcctgtggggtcttcctatcagcctatgcaaactaatgttgtgtacaatggaccaacttgtcttcctattaatgctgcctctagtcaagaatttgattcagttttgtttcagcaggatgcaactctttctggtttagtgaatcttggctgtcaaccactgtcatccataccatttcattcttcaaattcaggctcaacaggacatctcttagcccatacacctcattctgtgcataccctgcctcatctgcaatcaatgggatatcattgttcaaatacaggacaaagatctctttcttctccagtggctgaccagattacaggtcagccttcgtctcagttacaacctattacatatggtccttcacattcagggtctgctacaacagcttccccagcagcttctcatcccttggctagttcaccgctttctgggccaccatctcctcagcttcagcctatgccttaccaatctcctagctcaggaactgcctcatcaccgtctccagccaccagaatgcattctggacagcactcaactcaagcacaaagtacgggccaggggggtctttctgcaccttcatccttaatatgtcacagtttgtgtgatccagcgtcatttccacctgatggggcaactgtgagcattaaacctgaaccagaagatcgagagcctaactttgcaaccattggtctgcaggacatcactttagatgatgtgaacgagataattgggagagacatgtcccagatttctgtttcccaaggagcaggggtgagcaggcaggctcccctcccgagtcctgagtccctggatttaggaagatctgatgggctctaacagtgcttactgcagccttgtgtccaccaccaacttctcagcatgtttctctccttggaccttgggtttccaactctgcagccttcaggtctggggccaggagtgggacccaccatttgtggggaaagtagcattcctccacctcaggccttgggtagatttggcaaaagaacaggagcagcataggctgtttgagctttggggaaatgaactttgctttttatatttaactaggatacttttatatgatgggtgctttggttgttgtgtctttgtctgattttggtgtcagggtaatcttggcctcatagaatgagtttggaagaattccttcctcttccatttcctggaagaggttgagaagaattagtatcggttcttctttacaggtttggtagaattctgctgttaagctcattgggttgcgatg

SEQ ID NO: 374473 - DNA, 3001 bp, Homo sapiens
ccaagaattcggcacgaggagagtcacactgacatgaagggcttatctgccattctatttatagcctgaaatgattctggcctaccctgtcctgtctgtatgatctaaaaaccagccttttcgccttgggtagatttggcaaaagaacaggagcagcataggctgtttgagctttggggaaatgaactttgctttttatatttaactaggatacttttatatgatgggtgctttgagtgtgaatgcagcaggctctcttgtttccgaggtgctgcttttgcaggtgacctggttacttagctaggattggtgatttgtactgctttatggtcatttgaagggccctttagtttttatgataatttttaaaataggaacttttgataagaccttctagaagcaaaaaaaaaaaaaaaaagaaaaaaaaagaaaagaaaaaaagaaaaagaaaaaaatatcccaagcccacacctatgcctcagaaagtcagcatgtgtcctgaagacgttcatagatttataggaaataaagccaaatgtagctcatacctctttataaaactaaactgttgttagataaaatgagaagagaccattccatcattgaagtgttggaatataaaaagacattccagagcatagccttttggtaactttctaggtaatcttgcaatctctccatactggctccatgttgaaattgctttttccctcaggaccctgggtaagatggctacatttaaggtgactctgaatggtggggttctagcttggtcactttcatttcttgccatcataaaaactagtaggctgtggagtgcgcttcctgtttgtgtcatctggtcgtagaaccttttccaaacagaagcatctgcctttggctgttctgtgacctttgaagccagtctcagtggtttaggcagctttgcagttctaactctagctagaggccaggctgtgtgcagagctaaagcacaaatgagcagtacatcagcatgggcagagaaaatacaggactccagatgggaaggttttaagagtcacactggcatggaaggcttatctgccattctatttatagcctgaaatgattctggcctaccctgtcctgtctgtatgatctaaaaaccagccttttccccagaaggctctgagcacatccagaagtgataacctgaccctccacaccaaagacaccctggtgctgctgctggtgagactggtgtccaaggcagggcccagcagaaactgcagcctgctgtctaccaaaggaggtacccgagttgggtactttaaaaaaaaaaaaaacctgcccttacccctctccctaatgggattttttttacctgttcctgggcccattacagagcctctgaagtttgcagtatgctttcaaatgaaataatatacttccattgattcaggaagcagattttttgagtgcctatatgtgagacagtgtgctggttgaaggcctgatgctgttattccaggagactgcaggcccttgatgccaggactctctctactaaggccagttcaggtctgggaaagggagctggcctattgcccaccacctgttgtcagtaggttaggagctgttgactcaggatgaggaagtatggtctttaaaaaaaacaaaatatattttagatttctcccctaaagttagttagagaaaaaggtctattcttcagcagatcactgtggcccctcttggagctgggtgttttcaaattttcttgaaaagtgagttgtgtcacagaatgtggatagtgagatttgcttctgggcctgtggttggacgcccacagcttcctttggaggggcaagaagttggcctctcggttgacattccagagaaatggccagacttgcccctacccttttgcccctggtgtagctgcctcacatgaggttattgcaagagttccccttgcaataccctttgtgccctcaagaattaaaagcctctatgatccagagttgctatgcaccaaattttgatgccttctaaataccttgatgcctgtagcactagaaatgctttcctatttaaaataaacattaaattttaaaatagagctttgtatactatgtaagcagttttatatcagctttgtaaaagctttggtgttaagagtcaatattttttggctttgtagataaagacttaaatttttgtgcaacatagtggtgttaaagcacacatccattggactatgcaaatcaatttctactagcagcactgagcaactgggcacgtgctagtacgcaccccctcctactctaactgtgctagctcttgggttgaggaatggaatgggtagccttctgcttactggagatgcacagagaaacatggctgaaaacagctttaaaaagaacatgtctttgggttcatgtgtggtgctgctgcccgggtgtaaactatccccacccagggccagccattatcaccagacctcttctgggcctggctgtgaagccctgtttttggtattcagaatggatctttaaggctcagatgggctcaaattgaaaccttgtgttttataaaatggatgtttagtaaaggaactggttctcagttatgtttacagcacttggaattgtgtgttcttgtacattttgtattttaaaaccttttatgggagtgcagtgctccttacacaaatacaaagggaagaagagccagcagttgaggctcctcagttttagtgctgaaataataaacagtgacaggtcaacagtatccttaatctgtctgagtgttcctccgcctggggttggtgtggagcccctcactttggggcaaagttaagggtcctgtgtcttttaaaaagtccatttggtcaataacttttcatttaaggaagagaagatcgagttccaaattgcttccgaggcttcagttctgtaccatttaatgcgtgcaaaggacattccatggtgtctgctgggttcagggcaactggctttcccaaggcatacaagaaaag

SEQ ID NO: 374474 - DNA, 4430 bp, Homo sapiens
agggcgcgagagcgcacccgcggcggcggtggcggcgactgtgggggggcggcggggaacattggctaagccgacagtggaggcttaggcaccggtggcgggcggctgcggttcctggtgctgctcggcgcgcggccagctttcggaacggaacgctcggcgtcgcgggccccgcccggaaagtttgccgtggagtcgcgacctcttggcccgcgcggcccggcatgaagcggcgttgaggagctgctgccgccgcttgccgctgccgccgccgccgcctgaggaggagctgcagcaccctgggccacgccgatgactactgcaaactgtggcgcccacgacgagctcgacttcaaactcgtctttggcgaggacggggcgccggcgccgccgcccccgggctcgcggcctgcagatcttgagccagatgattgtgcatccatttacatctttaatgtagatccacctccatctactttaaccacaccactttgcttaccacatcatggattaccgtctcactcttctgttttgtcaccatcgtttcagctccaaagtcacaaaaactatgaaggaacttgtgagattcctgaatctaaatatagcccattaggtggtcccaaaccctttgagtgcccaagtattcaaattacatctatctctcctaactgtcatcaagaattagatgcacatgaagatgacctacagataaatgacccagaacgggaatttttggaaaggccttctagagatcatctctatcttcctcttgagccatcctaccgggagtcttctcttagtcctagtcctgccagcagcatctcttctaggagttggttctctgatgcatcttcttgtgaatcgctttcacatatttatgatgatgtggactcagagttgaatgaagctgcagcccgatttacccttggatcccctctgacttctcctggtggctctccagggggctgccctggagaagaaacttggcatcaacagtatggacttggacactcattatcacccaggcaatctccttgccactctcctagatccagtgtcactgatgagaattggctgagccccaggccagcctcaggaccctcatcaaggcccacatccccctgtgggaaacggaggcactccagtgctgaagtttgttatgctgggtccctttcaccccatcactcacctgttccttcacctggtcactcccccaggggaagtgtgacagaagatacgtggctcaatgcttctgtccatggtgggtcaggccttggccctgcagtttttccatttcagtactgtgtagagactgacatccctctcaaaacaaggaaaacttctgaagatcaagctgccatactaccaggaaaattagagctgtgttcagatgaccaagggagtttatcaccagcccgggagacttcaatagatgatggccttggatctcagtatcctttaaagaaagattcatgtggtgatcagtttctttcagttccttcaccctttacctggagcaaaccaaagcctggccacacccctatatttcgcacatcttcattacctccactagactggcctttaccagctcattttggacaatgtgaactgaaaatagaagtgcaacctaaaactcatcatcgagcccattatgaaactgaaggtagccgaggggcagtaaaagcatctactgggggacatcctgttgtgaagctcctgggctataacgaaaagccaataaatctacaaatgtttattgggacagcagatgatcgatatttacgacctcatgcattttaccaggtgcatcgaatcactgggaagacagtcgctactgcaagccaagagataataattgccagtacaaaagttctggaaattccacttcttcctgaaaataatatgtcagccagtattgattgtgcaggtattttgaaactccgcaattcagatatagaacttcgaaaaggagaaactgatattggcagaaagaatactagagtacgacttgtgtttcgtgtacacatcccacagcccagtggaaaagtcctttctctgcagatagcctctatacccgttgagtgctcccagcggtctgctcaagaacttcctcatattgagaagtacagtatcaacagttgttctgtaaatggaggtcatgaaatggttgtgactggatctaattttcttccagaatccaaaatcatttttcttgaaaaaggacaagatggacgacctcagtgggaggtagaagggaagataatcagggaaaaatgtcaaggggctcacattgtccttgaagttcctccatatcataacccagcagttacagctgcagtgcaggtgcacttttatctttgcaatggcaagaggaaaaaaagccagtctcaacgttttacttatacaccagttttgatgaagcaagaacacagagaagagattgatttgtcttcagttccatctttgcctgtgcctcatcctgctcagacccagaggccttcctctgattcagggtgttcacatgacagtgtactgtcaggacagagaagtttgatttgctccatcccacaaacatatgcatccatggtgacctcatcccatctgccacagttgcagtgtagagatgagagtgttagtaaagaacagcatatgattccttctccaattgtacaccagccttttcaagtcacaccaacacctcctgtggggtcttcctatcagcctatgcaaactaatgttgtgtacaatggaccaacttgtcttcctattaatgctgcctctagtcaagaatttgattcagttttgtttcagcaggatgcaactctttctggtttagtgaatcttggctgtcaaccactgtcatccataccatttcattcttcaaattcaggctcaacaggacatctcttagcccatacacctcattctgtgcataccctgcctcatctgcaatcaatgggatatcattgttcaaatacaggacaaagatctctttcttctccagtggctgaccagattacaggtcagccttcgtctcagatgaggaagtatggtctttaaaaaaaacaaaatatattttagatttctcccctaaagttagttagagaaaaaggtctattcttcagcagatcactgtggcccctcttggagctgggtgttttcaaattttcttgaaaagtgagttgtgtcacagaatgtggatagtgagatttgcttctgggcctgtggttggacgcccacagcttcctttggaggggcaagaagttggcctctcggttgacattccagagaaatggccagacttgcccctacccttttgcccctggtgtagctgcctcacatgaggttattgcaagagttccccttgcaataccctttgtgccctcaagaattaaaagcctctatgatccagagttgctatgcaccaaattttgatgccttctaaataccttgatgcctgtagcactagaaatgctttcctatttaaaataaacattaaattttaaaatagagctttgtatactatgtaagcagttttatatcagctttgtaaaagctttggtgttaagagtcaatattttttggctttgtagataaagacttaaatttttgtgcaacatagtggtgttaaagcacacatccattggactatgcaaatcaatttctactagcagcactgagcaactgggcacgtgctagtacgcaccccctcctactctaactgtgctagctcttgggttgaggaatggaatgggtagccttctgcttactggagatgcacagagaaacatggctgaaaacagctttaaaaagaacatgtctttgggttcatgtgtggtgctgctgcccgggtgtaaactatccccacccagggccagccattatcaccagacctcttctgggcctggctgtgaagccctgtttttggtattcagaatggatctttaaggctcagatgggctcaaattgaaaccttgtgttttataaaatggatgtttagtaaaggaactggttctcagttatgtttacagcacttggaattgtgtgttcttgtacattttgtattttaaaaccttttatgggagtgcagtgctccttacacaaatacaaagggaagaagagccagcagttgaggctcctcagttttagtgctgaaataataaacagtgacaggtcaacagtatccttaatctgtctgagtgttcctccgcctggggttggtgtggagcccctcactttggggcaaagttaagggtcctgtgtcttttaaaaagtccatttggtcaataacttttcatttaaggaagagaagatcgagttccaaattgcttccgaggcttcagttctgtaccatttaatgcgtgcaaaggacattccatggtgtctgctgggttcagggcaactggctttcccaaggcatacaagaaaag

SEQ ID NO: 374475 - DNA, 2716 bp, Homo sapiens
aggataaacaaacacattatataactcccaagaaaatacatacactaatacacaaacccaaaatagtctctcactgtctctctctctttcacacacactaactcatgctcatttatgcatgtacaacctaccatcacaatcataacccacattctcagcctcacacctccaaaggtatatacacacctcacacgaatatatatacacacaagccaccgtaccaggctggctgctgctccactcctcactctctggggtgctagcagtgggttgtccctctggtcctttccttcttcttgcttctcctgtagaaggcaagcctgatcccagcttcttctttatattccagagcatagccttttggtaactttctaggtaatcttgcaatctctccatactggctccatgttgaaattgctttttccctcaggaccctgggtaagatggctacatttaaggtgactctgaatggtggggttctagcttggtcactttcatttcttgccatcataaaaactagtaggctgtggagtgcgcttcctgtttgtgtcatctggtcgtagaaccttttccaaacagaagcatctgcctttggctgttctgtgacctttgaagccagtctcagtggtttaggcagctttgcagttctaactctagctagaggccaggctgtgtgcagagctaaagcacaaatgagcagtacatcagcatgggcagagaaaatacaggactccagatgggaaggttttaagagtcacactggcatggaaggcttatctgccattctatttatagcctgaaatgattctggcctaccctgtcctgtctgtatgatctaaaaaccagccttttccccagaaggctctgagcacatccagaagtgataacctgaccctccacaccaaagacaccctggtgctgctgctggtgagactggtgtccaaggcagggcccagcagaaactgcagcctgctgtctaccaaaggaggtacccgagttgggtactttaaaaaaaaaaaaaacctgcccttacccctctccctaatgggattttttttacctgttcctgggcccattacagagcctctgaagtttgcagtatgctttcaaatgaaataatatacttccattgattcaggaagcagattttttgagtgcctatatgtgagacagtgtgctggttgaaggcctgatgctgttattccaggagactgcaggcccttgatgccaggactctctctactaaggccagttcaggtctgggaaagggagctggcctattgcccaccacctgttgtcagtaggttaggagctgttgactcaggatgaggaagtatggtctttaaaaaaaacaaaatatattttagatttctcccctaaagttagttagagaaaaaggtctattcttcagcagatcactgtggcccctcttggagctgggtgttttcaaattttcttgaaaagtgagttgtgtcacagaatgtggatagtgagatttgcttctgggcctgtggttggacgcccacagcttcctttggaggggcaagaagttggcctctcggttgacattccagagaaatggccagacttgcccctacccttttgcccctggtgtagctgcctcacatgaggttattgcaagagttccccttgcaataccctttgtgccctcaagaattaaaagcctctatgatccagagttgctatgcaccaaattttgatgccttctaaataccttgatgcctgtagcactagaaatgctttcctatttaaaataaacattaaattttaaaatagagctttgtatactatgtaagcagttttatatcagctttgtaaaagctttggtgttaagagtcaatattttttggctttgtagataaagacttaaatttttgtgcaacatagtggtgttaaagcacacatccattggactatgcaaatcaatttctactagcagcactgagcaactgggcacgtgctagtacgcaccccctcctactctaactgtgctagctcttgggttgaggaatggaatgggtagccttctgcttactggagatgcacagagaaacatggctgaaaacagctttaaaaagaacatgtctttgggttcatgtgtggtgctgctgcccgggtgtaaactatccccacccagggccagccattatcaccagacctcttctgggcctggctgtgaagccctgtttttggtattcagaatggatctttaaggctcagatgggctcaaattgaaaccttgtgttttataaaatggatgtttagtaaaggaactggttctcagttatgtttacagcacttggaattgtgtgttcttgtacattttgtattttaaaaccttttatgggagtgcagtgctccttacacaaatacaaagggaagaagagccagcagttgaggctcctcagttttagtgctgaaataataaacagtgacaggtcaacagtatccttaatctgtctgagtgttcctccgcctggggttggtgtggagcccctcactttggggcaaagttaagggtcctgtgtcttttaaaaagtccatttggtcaataacttttcatttaaggaagagaagatcgagttccaaattgcttccgaggcttcagttctgtaccatttaatgcgtgcaaaggacattccatggtgtctgctgggttcagggcaactggctttcccaaggcatacaagaaaag

SEQ ID NO: 374476 - DNA, 1991 bp, Homo sapiens
agggcgcgagagcgcacccgcggcggcggtggcggcgactgtgggggggcggcggggaacattggctaagccgacagtggaggcttaggcaccggtggcgggcggctgcggttcctggtgctgctcggcgcgcggccagctttcggaacggaacgctcggcgtcgcgggccccgcccggaaagtttgccgtggagtcgcgacctcttggcccgcgcggcccggcatgaagcggcgttgaggagctgctgccgccgcttgccgctgccgccgccgccgcctgaggaggagctgcagcaccctgggccacgccgatgactactgcaaactgtggcgcccacgacgagctcgacttcaaactcgtctttggcgaggacggggcgccggcgccgccgcccccgggctcgcggcctgcagatcttgagccagatgattgtgcatccatttacatctttaatgtagatccacctccatctactttaaccacaccactttgcttaccacatcatggattaccgtctcactcttctgttttgtcaccatcgtttcagctccaaagtcacaaaaactatgaaggaacttgtgagattcctgaatctaaatatagcccattaggtggtcccaaaccctttgagtgcccaagtattcaaattacatctatctctcctaactgtcatcaagaattagatgcacatgaagatgacctacagataaatgacccagaacgggaatttttggaaaggccttctagagatcatctctatcttcctcttgagccatcctaccgggagtcttctcttagtcctagtcctgccagcagcatctcttctaggagttggttctctgatgcatcttcttgtgaatcgctttcacatatttatgatgatgtggactcagagttgaatgaagctgcagcccgatttacccttggatcccctctgacttctcctggtggctctccagggggctgccctggagaagaaacttggcatcaacagtatggacttggacactcattatcacccaggcaatctccttgccactctcctagatccagtgtcactgatgagaattggctgagccccaggccagcctcaggaccctcatcaaggcccacatccccctgtgggaaacggaggcactccagtgctgaagtttgttatgctgggtccctttcaccccatcactcacctgttccttcacctggtcactcccccaggggaagtgtgacagaagatacgtggctcaatgcttctgtccatggtgggtcaggccttggccctgcagtttttccatttcagtactgtgtagagactgacatccctctcaaaacaaggaaaacttctgaagatcaagctgccatactaccaggaaaattagagctgtgttcagatgaccaagggagtttatcaccagcccgggagacttcaatagatgatggccttggatctcagtatcctttaaagaaagattcatgtggtgatcagtttctttcagttccttcaccctttacctggagcaaaccaaagcctggccacacccctatatttcgcacatcttcattacctccactagactggcctttaccagctcattttggacaatgtgaactgaaaatagaagtgcaacctaaaactcatcatcgagcccattatgaaactgaaggtagccgaggggcagtaaaagcatctactgggggacatcctgttgtgaaggaatccaagatacgttcatcttttgatgtcgtctttgatgcacagcttctactgtccatgggaaagaagaaggtgtatggaaagcactcaagatacttaactacattaacctggaaattactatcaatcatcaccacttacaattttttggctacaagtagtcacatggccctacttacatgcagaagtactgggaaaagtagtccctggctgggcagcctttcctcatcaaaactctgtattctgtagtataatatagaactctatacttaaatctt

SEQ ID NO: 374477 - DNA, 1687 bp, Homo sapiens
cccccgggctgcaggaattcggcaccagctttaaaaaaaaaaaaaacctgcccttacccctctccctaatgggattttttttacctgttcctgggcccattacagagcctctgaagtttgcagtatgctttcaaatgaaataatatacttccattgattcaggaagcagattttttgagtgcctatatgtgagacagtgtgctggttgaaggcctgatgctgttattccaggagactgcaggcccttgatgccaggactctctctactaaggccagttcaggtctgggaaagggagctggcctattgcccaccacctgttgtcagtaggttaggagctgttgactcaggatgaggaagtatggtctttaaaaaaaacaaaatatattttagatttctcccctaaagttagttagagaaaaaggtctattcttcagcagatcactgtggcccctcttggagctgggtgttttcaaattttctgtggttggacgcccacagcttcctttggaggggcaagaagttggcctctcggttgacattccagagaaatggccagacttgcccctacccttttgcccctggtgtagctgcctcacatgaggttattgcaagagttccccttgcaataccctttgtgccctcaagaattaaaagcctctatgatccagagttgctatgcaccaaattttgatgccttctaaataccttgatgcctgtagcactagaaatgctttcctatttaaaataaacattaaattttaaaatagagctttgtatactatgtaagcagttttatatcagctttgtaaaagctttggtgttaagagtcaatattttttggctttgtagataaagacttaaatttttgtgcaacatagtggtgttaaagcacacatccattggactatgcaaatcaatttctactagcagcactgagcaactgggcacgtgctagtacgcaccccctcctactctaactgtgctagctcttgggttgaggaatggaatgggtagccttctgcttactggagatgcacagagaaacatggctgaaaacagctttaaaaagaacatgtctttgggttcatgtgtggtgctgctgcccgggtgtaaactatccccacccagggccagccattatcaccagacctcttctgggcctggctgtgaagccctgtttttggtattcagaatggatctttaaggctcagatgggctcaaattgaaaccttgtgttttataaaatggatgtttagtaaaggaactggttctcagttatgtttacagcacttggaattgtgtgttcttgtacattttgtattttaaaaccttttatgggagtgcagtgctccttacacaaatacaaagggaagaagagccagcagttgaggctcctcagttttagtgctgaaataataaacagtgacaggtcaacagtatccttaatctgtctgagtgttcctccgcctggggttggtgtggagcccctcactttggggcaaagttaagggtcctgtgtcttttaaaaagtccatttggtcaataacttttcatttaaggaagagaagatcgagttccaaattgcttccgaggcttcagttctgtaccatttaatgcgtgcaaaggacattccatggtgtctgctgggttcagggcaactggctttcccaaggcatacaagaaaag

SEQ ID NO: 374478 - DNA, 578 bp, Homo sapiens
aggatggaggaaccgcgagtggctcaggacccatgtgagagacagaaaacaatgctctttgtggccctgtttttggtattcagaatggatctttaaggctcagatgggctcaaattgaaaccttgtgttttataaaatggatgtttagtaaaggaactggttctcagttatgtttacagcacttggaattgtgtgttcttgtacattttgtattttaaaaccttttatgggagtgcagtgctccttacacaaatacaaagggaagaagagccagcagttgaggctcctcagttttagtgctgaaataataaacagtgacaggtcaacagtatccttaatctgtctgagtgttcctccgcctggggttggtgtggagcccctcactttggggcaaagttaagggtcctgtgtcttttaaaaagtccatttggtcaataacttttcatttaaggaagagaagatcgagttccaaattgcttccgaggcttcagttctgtaccatttaatgcgtgcaaaggacattccatggtgtctgctgggttcagggcaactggctttcccaaggcatacaagaaaag

SEQ ID NO: 374479 - DNA, 458 bp, Homo sapiens
aaaaaaaaaaaaaaaatctttttcagggcataatgtttcctgattatctttttagaaaatgtggacataaaaaggaaaaattacatatgtaattgtatatgtaataatcacacatatctgcagaaataaccagatgcattgaaaaaacacacacatgccacttctttagtggagctaatgacatacattttatatcccacttttttctctcgagattgttattatttactttctcatctagtaatttatacatctgagttttctaatttcttgttttgttgggtttttttttttttgccttcctccccgtagatcttgagccagatgattgtgcatccatttacatctttaatgtagatccacctccatctactttaaccacaccactttgcttaccacatcatggattaccgtctcactcttctgttttgtcaccatcgtttcagctccaaagtcac

SEQ ID NO: 374480 - DNA, 994 bp, Homo sapiens
  misc_feature (994)..(994): n is a, c, g, or t
ctagctggactctcggtccggtccctgccctctggagactcagccattaaagttgaggtggggggatgaggatgtgggcggcgtccaggtaactctgaggggccctgatgccttccctagagccagccatcaggagtaacacgatgcgcccccacatcaccgaacccagaacctgagtgcttcagcaccccttcctcgacatgagctccgcccaatgaggagaagggtcttctgcattggccggtggtggtcccctatccaattagagaggctaacggccttctctcgtctggtttagaaggaatcgccgggggaatacaggccaaactacaattcccgagagctcctgggctataacgaaaagccaataaatctacaaatgtttattgggacagcagatgatcgatatttacgacctcatgcattttaccaggtgcatcgaatcactgggaagacagtcgctactgcaagccaagagataataattgccagtacaaaagttctggaaattccacttcttcctgaaaataatatgtcagccagtattgattgtgcaggtattttgaaactccgcaattcagatatagaacttcgaaaaggagaaactgatattggcagaaagaatactagagtacgacttgtgtttcgtgtacacatcccacagcccagtggaaaagtcctttctctgcagatagcctctatacccgttgagtgctcccgcggtctgtcagaacttctcatattgggaagtcagtttcacgcgtggtctgtacatgggcgctgcacgcggggcggctaacattttccgaacccaccttttggaacggccatgtggacccggagggaggggaatcagcgcgtggggcctgtgcttaggtccttaacacaggggcgggggccatggggcggagcgacgcgttttacgggcgccaacaaagggtgttgtgcgccagccagtgtgggaggcatccctctcttgtcccccccttttggn

SEQ ID NO: 374481 - DNA, 6668 bp, Homo sapiens
agggcgcgagagcgcacccgcggcggcggtggcggcgactgtgggggggcggcggggaacattggctaagccgacagtggaggcttaggcaccggtggcgggcggctgcggttcctggtgctgctcggcgcgcggccagctttcggaacggaacgctcggcgtcgcgggccccgcccggaaagtttgccgtggagtcgcgacctcttggcccgcgcggcccggcatgaagcggcgttgaggagctgctgccgccgcttgccgctgccgccgccgccgcctgaggaggagctgcagcaccctgggccacgccgatgactactgcaaactgtggcgcccacgacgagctcgacttcaaactcgtctttggcgaggacggggcgccggcgccgccgcccccgggctcgcggcctgcagatcttgagccagatgattgtgcatccatttacatctttaatgtagatccacctccatctactttaaccacaccactttgcttaccacatcatggattaccgtctcactcttctgttttgtcaccatcgtttcagctccaaagtcacaaaaactatgaaggaacttgtgagattcctgaatctaaatatagcccattaggtggtcccaaaccctttgagtgcccaagtattcaaattacatctatctctcctaactgtcatcaagaattagatgcacatgaagatgacctacagataaatgacccagaacgggaatttttggaaaggccttctagagatcatctctatcttcctcttgagccatcctaccgggagtcttctcttagtcctagtcctgccagcagcatctcttctaggagttggttctctgatgcatcttcttgtgaatcgctttcacatatttatgatgatgtggactcagagttgaatgaagctgcagcccgatttacccttggatcccctctgacttctcctggtggctctccagggggctgccctggagaagaaacttggcatcaacagtatggacttggacactcattatcacccaggcaatctccttgccactctcctagatccagtgtcactgatgagaattggctgagccccaggccagcctcaggaccctcatcaaggcccacatccccctgtgggaaacggaggcactccagtgctgaagtttgttatgctgggtccctttcaccccatcactcacctgttccttcacctggtcactcccccaggggaagtgtgacagaagatacgtggctcaatgcttctgtccatggtgggtcaggccttggccctgcagtttttccatttcagtactgtgtagagactgacatccctctcaaaacaaggaaaacttctgaagatcaagctgccatactaccaggaaaattagagctgtgttcagatgaccaagggagtttatcaccagcccgggagacttcaatagatgatggccttggatctcagtatcctttaaagaaagattcatgtggtgatcagtttctttcagttccttcaccctttacctggagcaaaccaaagcctggccacacccctatatttcgcacatcttcattacctccactagactggcctttaccagctcattttggacaatgtgaactgaaaatagaagtgcaacctaaaactcatcatcgagcccattatgaaactgaaggtagccgaggggcagtaaaagcatctactgggggacatcctgttgtgaagctcctgggctataacgaaaagccaataaatctacaaatgtttattgggacagcagatgatcgatatttacgacctcatgcattttaccaggtgcatcgaatcactgggaagacagtcgctactgcaagccaagagataataattgccagtacaaaagttctggaaattccacttcttcctgaaaataatatgtcagccagtattgattgtgcaggtattttgaaactccgcaattcagatatagaacttcgaaaaggagaaactgatattggcagaaagaatactagagtacgacttgtgtttcgtgtacacatcccacagcccagtggaaaagtcctttctctgcagatagcctctatacccgttgagtgctcccagcggtctgctcaagaacttcctcatattgagaagtacagtatcaacagttgttctgtaaatggaggtcatgaaatggttgtgactggatctaattttcttccagaatccaaaatcatttttcttgaaaaaggacaagatggacgacctcagtgggaggtagaagggaagataatcagggaaaaatgtcaaggggctcacattgtccttgaagttcctccatatcataacccagcagttacagctgcagtgcaggtgcacttttatctttgcaatggcaagaggaaaaaaagccagtctcaacgttttacttatacaccagttttgatgaagcaagaacacagagaagagattgatttgtcttcagttccatctttgcctgtgcctcatcctgctcagacccagaggccttcctctgattcagggtgttcacatgacagtgtactgtcaggacagagaagtttgatttgctccatcccacaaacatatgcatccatggtgacctcatcccatctgccacagttgcagtgtagagatgagagtgttagtaaagaacagcatatgattccttctccaattgtacaccagccttttcaagtcacaccaacacctcctgtggggtcttcctatcagcctatgcaaactaatgttgtgtacaatggaccaacttgtcttcctattaatgctgcctctagtcaagaatttgattcagttttgtttcagcaggatgcaactctttctggtttagtgaatcttggctgtcaaccactgtcatccataccatttcattcttcaaattcaggctcaacaggacatctcttagcccatacacctcattctgtgcataccctgcctcatctgcaatcaatgggatatcattgttcaaatacaggacaaagatctctttcttctccagtggctgaccagattacaggtcagccttcgtctcagttacaacctattacatatggtccttcacattcagggtctgctacaacagcttccccagcagcttctcatcccttggctagttcaccgctttctgggccaccatctcctcagcttcagcctatgccttaccaatctcctagctcaggaactgcctcatcaccgtctccagccaccagaatgcattctggacagcactcaactcaagcacaaagtacgggccaggggggtctttctgcaccttcatccttaatatgtcacagtttgtgtgatccagcgtcatttccacctgatggggcaactgtgagcattaaacctgaaccagaagatcgagagcctaactttgcaaccattggtctgcaggacatcactttagatgatgaccaatttatatctgacttggaacaccagccatcaggttcagcagagaaatggcctaaccacagtgtgctctcatgtccagctcctttctggagaatctagaggtgaacgagataattgggagagacatgtcccagatttctgtttcccaaggagcaggggtgagcaggcaggctcccctcccgagtcctgagtccctggatttaggaagatctgatgggctctaacagtgcttactgcagccttgtgtccaccaccaacttctcagcatgtttctctccttggaccttgggtttccaactctgcagccttcaggtctggggccaggagtgggacccaccatttgtggggaaagtagcattcctccacctcaggccttgggtagatttggcaaaagaacaggagcagcataggctgtttgagctttggggaaatgaactttgctttttatatttaactaggatacttttatatgatgggtgctttgagtgtgaatgcagcaggctctcttgtttccgaggtgctgcttttgcaggtgacctggttacttagctaggattggtgatttgtactgctttatggtcatttgaagggccctttagtttttatgataatttttaaaataggaacttttgataagaccttctagaagcaaaaaaaaaaaaaaaaagaaaaacagacacaacacaggcaaacgacaaaattttccccagcgccccacctttgtctcctcaaagtctcgtgtgtgctgctggacgtcgcttcgttgtttggaggaaatgccgcggttgtgtccatctctttataaaactaaactgttgttagataaaatgagaagagaccattccatcattgaagtgttggaatataaaaagacattccagagcatagccttttggtaactttctaggtaatcttgcaatctctccatactggctccatgttgaaattgctttttccctcaggaccctgggtaagatggctacatttaaggtgactctgaatggtggggttctagcttggtcactttcatttcttgccatcataaaaactagtaggctgtggagtgcgcttcctgtttgtgtcatctggtcgtagaaccttttccaaacagaagcatctgcctttggctgttctgtgacctttgaagccagtctcagtggtttaggcagctttgcagttctaactctagctagaggccaggctgtgtgcagagctaaagcacaaatgagcagtacatcagcatgggcagagaaaatacaggactccagatgggaaggttttaagagtcacactggcatggaaggcttatctgccattctatttatagcctgaaatgattctggcctaccctgtcctgtctgtatgatctaaaaaccagccttttccccagaaggctctgagcacatccagaagtgataacctgaccctccacaccaaagacaccctggtgctgctgctggtgagactggtgtccaaggcagggcccagcagaaactgcagcctgctgtctaccaaaggaggtacccgagttgggtactttaaaaaaaaaaaaaacctgcccttacccctctccctaatgggattttttttacctgttcctgggcccattacagagcctctgaagtttgcagtatgctttcaaatgaaataatatacttccattgattcaggaagcagattttttgagtgcctatatgtgagacagtgtgctggttgaaggcctgatgctgttattccaggagactgcaggcccttgatgccaggactctctctactaaggccagttcaggtctgggaaagggagctggcctattgcccaccacctgttgtcagtaggttaggagctgttgactcaggatgaggaagtatggtctttaaaaaaaacaaaatatattttagatttctcccctaaagttagttagagaaaaaggtctattcttcagcagatcactgtggcccctcttggagctgggtgttttcaaattttcttgaaaagtgagttgtgtcacagaatgtggatagtgagatttgcttctgggcctgtggttggacgcccacagcttcctttggaggggcaagaagttggcctctcggttgacattccagagaaatggccagacttgcccctacccttttgcccctggtgtagctgcctcacatgaggttattgcaagagttccccttgcaataccctttgtgccctcaagaattaaaagcctctatgatccagagttgctatgcaccaaattttgatgccttctaaataccttgatgcctgtagcactagaaatgctttcctatttaaaataaacattaaattttaaaatagagctttgtatactatgtaagcagttttatatcagctttgtaaaagctttggtgttaagagtcaatattttttggctttgtagataaagacttaaatttttgtgcaacatagtggtgttaaagcacacatccattggactatgcaaatcaatttctactagcagcactgagcaactgggcacgtgctagtacgcaccccctcctactctaactgtgctagctcttgggttgaggaatggaatgggtagccttctgcttactggagatgcacagagaaacatggctgaaaacagctttaaaaagaacatgtctttgggttcatgtgtggtgctgctgcccgggtgtaaactatccccacccagggccagccattatcaccagacctcttctgggcctggctgtgaagccctgtttttggtattcagaatggatctttaaggctcagatgggctcaaattgaaaccttgtgttttataaaatggatgtttagtaaaggaactggttctcagttatgtttacagcacttggaattgtgtgttcttgtacattttgtattttaaaaccttttatgggagtgcagtgctccttacacaaatacaaagggaagaagagccagcagttgaggctcctcagttttagtgctgaaataataaacagtgacaggtcaacagtatccttaatctgtctgagtgttcctccgcctggggttggtgtggagcccctcactttggggcaaagttaagggtcctgtgtcttttaaaaagtccatttggtcaataacttttcatttaaggaagagaagatcgagttccaaattgcttccgaggcttcagttctgtaccatttaatgcgtgcaaaggacattccatggtgtctgctgggttcagggcaactggctttcccaaggcatacaagaaaag

SEQ ID NO: 374482 - DNA, 4623 bp, Homo sapiens
  misc_feature (4623)..(4623): n is a, c, g, or t
agggcgcgagagcgcacccgcggcggcggtggcggcgactgtgggggggcggcggggaacattggctaagccgacagtggaggcttaggcaccggtggcgggcggctgcggttcctggtgctgctcggcgcgcggccagctttcggaacggaacgctcggcgtcgcgggccccgcccggaaagtttgccgtggagtcgcgacctcttggcccgcgcggcccggcatgaagcggcgttgaggagctgctgccgccgcttgccgctgccgccgccgccgcctgaggaggagctgcagcaccctgggccacgccgatgactactgcaaactgtggcgcccacgacgagctcgacttcaaactcgtctttggcgaggacggggcgccggcgccgccgcccccgggctcgcggcctgcagatcttgagccagatgattgtgcatccatttacatctttaatgtagatccacctccatctactttaaccacaccactttgcttaccacatcatggattaccgtctcactcttctgttttgtcaccatcgtttcagctccaaagtcacaaaaactatgaaggaacttgtgagattcctgaatctaaatatagcccattaggtggtcccaaaccctttgagtgcccaagtattcaaattacatctatctctcctaactgtcatcaagaattagatgcacatgaagatgacctacagataaatgacccagaacgggaatttttggaaaggccttctagagatcatctctatcttcctcttgagccatcctaccgggagtcttctcttagtcctagtcctgccagcagcatctcttctaggagttggttctctgatgcatcttcttgtgaatcgctttcacatatttatgatgatgtggactcagagttgaatgaagctgcagcccgatttacccttggatcccctctgacttctcctggtggctctccagggggctgccctggagaagaaacttggcatcaacagtatggacttggacactcattatcacccaggcaatctccttgccactctcctagatccagtgtcactgatgagaattggctgagccccaggccagcctcaggaccctcatcaaggcccacatccccctgtgggaaacggaggcactccagtgctgaagtttgttatgctgggtccctttcaccccatcactcacctgttccttcacctggtcactcccccaggggaagtgtgacagaagatacgtggctcaatgcttctgtccatggtgggtcaggccttggccctgcagtttttccatttcagtactgtgtagagactgacatccctctcaaaacaaggaaaacttctgaagatcaagctgccatactaccaggaaaattagagctgtgttcagatgaccaagggagtttatcaccagcccgggagacttcaatagatgatggccttggatctcagtatcctttaaagaaagattcatgtggtgatcagtttctttcagttccttcaccctttacctggagcaaaccaaagcctggccacacccctatatttcgcacatcttcattacctccactagactggcctttaccagctcattttggacaatgtgaactgaaaatagaagtgcaacctaaaactcatcatcgagcccattatgaaactgaaggtagccgaggggcagtaaaagcatctactgggggacatcctgttgtgaagctcctgggctataacgaaaagccaataaatctacaaatgtttattgggacagcagatgatcgatatttacgacctcatgcattttaccaggtgcatcgaatcactgggaagacagtcgctactgcaagccaagagataataattgccagtacaaaagttctggaaattccacttcttcctgaaaataatatgtcagccagtattgattgtgcaggtattttgaaactccgcaattcagatatagaacttcgaaaaggagaaactgatattggcagaaagaatactagagtacgacttgtgtttcgtgtacacatcccacagcccagtggaaaagtcctttctctgcagatagcctctatacccgttgagtgctcccagcggtctgctcaagaacttcctcatattgagaagtacagtatcaacagttgttctgtaaatggaggtcatgaaatggttgtgactggatctaattttcttccagaatccaaaatcatttttcttgaaaaaggacaagatggacgacctcagtgggaggtagaagggaagataatcagggaaaaatgtcaaggggctcacattgtccttgaagttcctccatatcataacccagcagttacagctgcagtgcaggtgcacttttatctttgcaatggcaagaggaaaaaaagccagtctcaacgttttacttatacaccagttttgatgaagcaagaacacagagaagagattgatttgtcttcagttccatctttgcctgtgcctcatcctgctcagacccagaggccttcctctgattcagggtgttcacatgacagtgtactgtcaggacagagaagtttgatttgctccatcccacaaacatatgcatccatggtgacctcatcccatctgccacagttgcagtgtagagatgagagtgttagtaaagaacagcatatgattccttctccaattgtacaccagccttttcaagtcacaccaacacctcctgtggggtcttcctatcagcctatgcaaactaatgttgtgtacaatggaccaacttgtcttcctattaatgctgcctctagtcaagaatttgattcagttttgtttcagcaggatgcaactctttctggtttagtgaatcttggctgtcaaccactgtcatccataccatttcattcttcaaattcaggctcaacaggacatctcttagcccatacacctcattctgtgcataccctgcctcatctgcaatcaatgggatatcattgttcaaatacaggacaaagatctctttcttctccagtggctgaccagattacaggtcagccttcgtctcagttacaacctattacatatggtccttcacattcagggtctgctacaacagcttccccagcagcttctcatcccttggctagttcaccgctttctgggccaccatctcctcagcttcagcctatgccttaccaatctcctagctcaggaactgcctcatcaccgtctccagccaccagaatgcattctggacagcactcaactcaagcacaaagtacgggccaggggggtctttctgcaccttcatccttaatatgtcacagtttgtgtgatccagcgtcatttccacctgatggggcaactgtgagcattaaacctgaaccagaagatcgagagcctaactttgcaaccattggtctgcaggacatcactttagatgatgaccaatttatatctgacttggaacaccagccatcaggttcagcagagaaatggcctaaccacagtgtgctctcatgtccagctcctttctggagaatctagaggtgaacgagataattgggagagacatgtcccagatttctgtttcccaaggagcaggggtgagcaggcaggctcccctcccgagtcctgagtccctggatttaggaagatctgatgggctctaacagtgcttactgcagccttgtgtccaccaccaacttctcagcatgtttctctccttggaccttgggtttccaactctgcagccttcaggtctggggccaggagtgggacccaccatttgtggggaaagtagcattcctccacctcaggccttgggtagatttggcaaaagaacaggagcagcataggctgtttgagctttggggaaatgaactttgctttttatatttaactaggatacttttatatgatgggtgctttgagtgtgaatgcagcaggctctcttgtttccgaggtgctgcttttgcaggtgacctggttacttagctaggattggtgatttgtactgctttatggtcatttgaagggccctttagtttttatgataatttttaaaataggaacttttgataagaccttctagaagcaaaaaaaaaaaaaaaaagaaaaaaaaagaaaagaaaaaaagaaaaagaaaaaaaaaaaaattttccaagccccaccccttttgccctcagaaagagtctcagccgttgttgtcccggaagaaagcgttccatatagaaatttttagtggggaaaaattaagggcccagagtggttcgcctcaattcccctcttttattaaaacactataaccgccgtggtcgatcagaatatacaagctgtggagaagagaagacccattcccatctctattggaaagggtgcgtggagaaattcattacaagagggacactttctctccagagagaccatataagccgctgttttgtgcgggaacacactttctctcagagagagaaaacaactctgtgtgccaaagactctttctctccaaatgtaaggggggcgctcacccagagtgtttggacaacatgttgggcgttgttttccccccctcttgagagagacacccctgtggcgtttaagagagagtggggctctcaccatttttcaaaggggcgcgacaaccctgtn

SEQ ID NO: 374483 - DNA, 6178 bp, Homo sapiens
agagtaatccctattttttcttgcctgatcttgagccagatgattgtgcatccatttacatctttaatgtagatccacctccatctactttaaccacaccactttgcttaccacatcatggattaccgtctcactcttctgttttgtcaccatcgtttcagctccaaagtcacaaaaactatgaaggaacttgtgagattcctgaatctaaatatagcccattaggtggtcccaaaccctttgagtgcccaagtattcaaattacatctatctctcctaactgtcatcaagaattagatgcacatgaagatgacctacagataaatgacccagaacgggaatttttggaaaggccttctagagatcatctctatcttcctcttgagccatcctaccgggagtcttctcttagtcctagtcctgccagcagcatctcttctaggagttggttctctgatgcatcttcttgtgaatcgctttcacatatttatgatgatgtggactcagagttgaatgaagctgcagcccgatttacccttggatcccctctgacttctcctggtggctctccagggggctgccctggagaagaaacttggcatcaacagtatggacttggacactcattatcacccaggcaatctccttgccactctcctagatccagtgtcactgatgagaattggctgagccccaggccagcctcaggaccctcatcaaggcccacatccccctgtgggaaacggaggcactccagtgctgaagtttgttatgctgggtccctttcaccccatcactcacctgttccttcacctggtcactcccccaggggaagtgtgacagaagatacgtggctcaatgcttctgtccatggtgggtcaggccttggccctgcagtttttccatttcagtactgtgtagagactgacatccctctcaaaacaaggaaaacttctgaagatcaagctgccatactaccaggaaaattagagctgtgttcagatgaccaagggagtttatcaccagcccgggagacttcaatagatgatggccttggatctcagtatcctttaaagaaagattcatgtggtgatcagtttctttcagttccttcaccctttacctggagcaaaccaaagcctggccacacccctatatttcgcacatcttcattacctccactagactggcctttaccagctcattttggacaatgtgaactgaaaatagaagtgcaacctaaaactcatcatcgagcccattatgaaactgaaggtagccgaggggcagtaaaagcatctactgggggacatcctgttgtgaagctcctgggctataacgaaaagccaataaatctacaaatgtttattgggacagcagatgatcgatatttacgacctcatgcattttaccaggtgcatcgaatcactgggaagacagtcgctactgcaagccaagagataataattgccagtacaaaagttctggaaattccacttcttcctgaaaataatatgtcagccagtattgattgtgcaggtattttgaaactccgcaattcagatatagaacttcgaaaaggagaaactgatattggcagaaagaatactagagtacgacttgtgtttcgtgtacacatcccacagcccagtggaaaagtcctttctctgcagatagcctctatacccgttgagtgctcccagcggtctgctcaagaacttcctcatattgagaagtacagtatcaacagttgttctgtaaatggaggtcatgaaatggttgtgactggatctaattttcttccagaatccaaaatcatttttcttgaaaaaggacaagatggacgacctcagtgggaggtagaagggaagataatcagggaaaaatgtcaaggggctcacattgtccttgaagttcctccatatcataacccagcagttacagctgcagtgcaggtgcacttttatctttgcaatggcaagaggaaaaaaagccagtctcaacgttttacttatacaccagttttgatgaagcaagaacacagagaagagattgatttgtcttcagttccatctttgcctgtgcctcatcctgctcagacccagaggccttcctctgattcagggtgttcacatgacagtgtactgtcaggacagagaagtttgatttgctccatcccacaaacatatgcatccatggtgacctcatcccatctgccacagttgcagtgtagagatgagagtgttagtaaagaacagcatatgattccttctccaattgtacaccagccttttcaagtcacaccaacacctcctgtggggtcttcctatcagcctatgcaaactaatgttgtgtacaatggaccaacttgtcttcctattaatgctgcctctagtcaagaatttgattcagttttgtttcagcaggatgcaactctttctggtttagtgaatcttggctgtcaaccactgtcatccataccatttcattcttcaaattcaggctcaacaggacatctcttagcccatacacctcattctgtgcataccctgcctcatctgcaatcaatgggatatcattgttcaaatacaggacaaagatctctttcttctccagtggctgaccagattacaggtcagccttcgtctcagttacaacctattacatatggtccttcacattcagggtctgctacaacagcttccccagcagcttctcatcccttggctagttcaccgctttctgggccaccatctcctcagcttcagcctatgccttaccaatctcctagctcaggaactgcctcatcaccgtctccagccaccagaatgcattctggacagcactcaactcaagcacaaagtacgggccaggggggtctttctgcaccttcatccttaatatgtcacagtttgtgtgatccagcgtcatttccacctgatggggcaactgtgagcattaaacctgaaccagaagatcgagagcctaactttgcaaccattggtctgcaggacatcactttagatgatgtgaacgagataattgggagagacatgtcccagatttctgtttcccaaggagcaggggtgagcaggcaggctcccctcccgagtcctgagtccctggatttaggaagatctgatgggctctaacagtgcttactgcagccttgtgtccaccaccaacttctcagcatgtttctctccttggaccttgggtttccaactctgcagccttcaggtctggggccaggagtgggacccaccatttgtggggaaagtagcattcctccacctcaggccttgggtagatttggcaaaagaacaggagcagcataggctgtttgagctttggggaaatgaactttgctttttatatttaactaggatacttttatatgatgggtgctttgagtgtgaatgcagcaggctctcttgtttccgaggtgctgcttttgcaggtgacctggttacttagctaggattggtgatttgtactgctttatggtcatttgaagggccctttagtttttatgataatttttaaaataggaacttttgataagaccttctagaagcaaaaaaaaaaaaaaaaagaaaaaaaaagaaaagaaaaaaagaaaaagaaaaaaatatcccaagcccacacctatgcctcagaaagtcagcatgtgtcctgaagacgttcatagatttataggaaataaagccaaatgtagctcatacctctttataaaactaaactgttgttagataaaatgagaagagaccattccatcattgaagtgttggaatataaaaagacattccagagcatagccttttggtaactttctaggtaatcttgcaatctctccatactggctccatgttgaaattgctttttccctcaggaccctgggtaagatggctacatttaaggtgactctgaatggtggggttctagcttggtcactttcatttcttgccatcataaaaactagtaggctgtggagtgcgcttcctgtttgtgtcatctggtcgtagaaccttttccaaacagaagcatctgcctttggctgttctgtgacctttgaagccagtctcagtggtttaggcagctttgcagttctaactctagctagaggccaggctgtgtgcagagctaaagcacaaatgagcagtacatcagcatgggcagagaaaatacaggactccagatgggaaggttttaagagtcacactggcatggaaggcttatctgccattctatttatagcctgaaatgattctggcctaccctgtcctgtctgtatgatctaaaaaccagccttttccccagaaggctctgagcacatccagaagtgataacctgaccctccacaccaaagacaccctggtgctgctgctggtgagactggtgtccaaggcagggcccagcagaaactgcagcctgctgtctaccaaaggaggtacccgagttgggtactttaaaaaaaaaaaaaacctgcccttacccctctccctaatgggattttttttacctgttcctgggcccattacagagcctctgaagtttgcagtatgctttcaaatgaaataatatacttccattgattcaggaagcagattttttgagtgcctatatgtgagacagtgtgctggttgaaggcctgatgctgttattccaggagactgcaggcccttgatgccaggactctctctactaaggccagttcaggtctgggaaagggagctggcctattgcccaccacctgttgtcagtaggttaggagctgttgactcaggatgaggaagtatggtctttaaaaaaaacaaaatatattttagatttctcccctaaagttagttagagaaaaaggtctattcttcagcagatcactgtggcccctcttggagctgggtgttttcaaattttcttgaaaagtgagttgtgtcacagaatgtggatagtgagatttgcttctgggcctgtggttggacgcccacagcttcctttggaggggcaagaagttggcctctcggttgacattccagagaaatggccagacttgcccctacccttttgcccctggtgtagctgcctcacatgaggttattgcaagagttccccttgcaataccctttgtgccctcaagaattaaaagcctctatgatccagagttgctatgcaccaaattttgatgccttctaaataccttgatgcctgtagcactagaaatgctttcctatttaaaataaacattaaattttaaaatagagctttgtatactatgtaagcagttttatatcagctttgtaaaagctttggtgttaagagtcaatattttttggctttgtagataaagacttaaatttttgtgcaacatagtggtgttaaagcacacatccattggactatgcaaatcaatttctactagcagcactgagcaactgggcacgtgctagtacgcaccccctcctactctaactgtgctagctcttgggttgaggaatggaatgggtagccttctgcttactggagatgcacagagaaacatggctgaaaacagctttaaaaagaacatgtctttgggttcatgtgtggtgctgctgcccgggtgtaaactatccccacccagggccagccattatcaccagacctcttctgggcctggctgtgaagccctgtttttggtattcagaatggatctttaaggctcagatgggctcaaattgaaaccttgtgttttataaaatggatgtttagtaaaggaactggttctcagttatgtttacagcacttggaattgtgtgttcttgtacattttgtattttaaaaccttttatgggagtgcagtgctccttacacaaatacaaagggaagaagagccagcagttgaggctcctcagttttagtgctgaaataataaacagtgacaggtcaacagtatccttaatctgtctgagtgttcctccgcctggggttggtgtggagcccctcactttggggcaaagttaagggtcctgtgtcttttaaaaagtccatttggtcaataacttttcatttaaggaagagaagatcgagttccaaattgcttccgaggcttcagttctgtaccatttaatgcgtgcaaaggacattccatggtgtctgctgggttcagggcaactggctttcccaaggcatacaagaaaag

SEQ ID NO: 374484 - DNA, 6620 bp, Homo sapiens
agggcgcgagagcgcacccgcggcggcggtggcggcgactgtgggggggcggcggggaacattggctaagccgacagtggaggcttaggcaccggtggcgggcggctgcggttcctggtgctgctcggcgcgcggccagctttcggaacggaacgctcggcgtcgcgggccccgcccggaaagtttgccgtggagtcgcgacctcttggcccgcgcggcccggcatgaagcggcgttgaggagctgctgccgccgcttgccgctgccgccgccgccgcctgaggaggagctgcagcaccctgggccacgccgatgactactgcaaactgtggcgcccacgacgagctcgacttcaaactcgtctttggcgaggacggggcgccggcgccgccgcccccgggctcgcggcctgcagatcttgagccagatgattgtgcatccatttacatctttaatgtagatccacctccatctactttaaccacaccactttgcttaccacatcatggattaccgtctcactcttctgttttgtcaccatcgtttcagctccaaagtcacaaaaactatgaaggaacttgtgagattcctgaatctaaatatagcccattaggtggtcccaaaccctttgagtgcccaagtattcaaattacatctatctctcctaactgtcatcaagaattagatgcacatgaagatgacctacagataaatgacccagaacgggaatttttggaaaggccttctagagatcatctctatcttcctcttgagccatcctaccgggagtcttctcttagtcctagtcctgccagcagcatctcttctaggagttggttctctgatgcatcttcttgtgaatcgctttcacatatttatgatgatgtggactcagagttgaatgaagctgcagcccgatttacccttggatcccctctgacttctcctggtggctctccagggggctgccctggagaagaaacttggcatcaacagtatggacttggacactcattatcacccaggcaatctccttgccactctcctagatccagtgtcactgatgagaattggctgagccccaggccagcctcaggaccctcatcaaggcccacatccccctgtgggaaacggaggcactccagtgctgaagtttgttatgctgggtccctttcaccccatcactcacctgttccttcacctggtcactcccccaggggaagtgtgacagaagatacgtggctcaatgcttctgtccatggtgggtcaggccttggccctgcagtttttccatttcagtactgtgtagagactgacatccctctcaaaacaaggaaaacttctgaagatcaagctgccatactaccaggaaaattagagctgtgttcagatgaccaagggagtttatcaccagcccgggagacttcaatagatgatggccttggatctcagtatcctttaaagaaagattcatgtggtgatcagtttctttcagttccttcaccctttacctggagcaaaccaaagcctggccacacccctatatttcgcacatcttcattacctccactagactggcctttaccagctcattttggacaatgtgaactgaaaatagaagtgcaacctaaaactcatcatcgagcccattatgaaactgaaggtagccgaggggcagtaaaagcatctactgggggacatcctgttgtgaagctcctgggctataacgaaaagccaataaatctacaaatgtttattgggacagcagatgatcgatatttacgacctcatgcattttaccaggtgcatcgaatcactgggaagacagtcgctactgcaagccaagagataataattgccagtacaaaagttctggaaattccacttcttcctgaaaataatatgtcagccagtattgattgtgcaggtattttgaaactccgcaattcagatatagaacttcgaaaaggagaaactgatattggcagaaagaatactagagtacgacttgtgtttcgtgtacacatcccacagcccagtggaaaagtcctttctctgcagatagcctctatacccgttgagtgctcccagcggtctgctcaagaacttcctcatattgagaagtacagtatcaacagttgttctgtaaatggaggtcatgaaatggttgtgactggatctaattttcttccagaatccaaaatcatttttcttgaaaaaggacaagatggacgacctcagtgggaggtagaagggaagataatcagggaaaaatgtcaaggggctcacattgtccttgaagttcctccatatcataacccagcagttacagctgcagtgcaggtgcacttttatctttgcaatggcaagaggaaaaaaagccagtctcaacgttttacttatacaccagttttgatgaagcaagaacacagagaagagattgatttgtcttcagttccatctttgcctgtgcctcatcctgctcagacccagaggccttcctctgattcagggtgttcacatgacagtgtactgtcaggacagagaagtttgatttgctccatcccacaaacatatgcatccatggtgacctcatcccatctgccacagttgcagtgtagagatgagagtgttagtaaagaacagcatatgattccttctccaattgtacaccagccttttcaagtcacaccaacacctcctgtggggtcttcctatcagcctatgcaaactaatgttgtgtacaatggaccaacttgtcttcctattaatgctgcctctagtcaagaatttgattcagttttgtttcagcaggatgcaactctttctggtttagtgaatcttggctgtcaaccactgtcatccataccatttcattcttcaaattcaggctcaacaggacatctcttagcccatacacctcattctgtgcataccctgcctcatctgcaatcaatgggatatcattgttcaaatacaggacaaagatctctttcttctccagtggctgaccagattacaggtcagccttcgtctcagttacaacctattacatatggtccttcacattcagggtctgctacaacagcttccccagcagcttctcatcccttggctagttcaccgctttctgggccaccatctcctcagcttcagcctatgccttaccaatctcctagctcaggaactgcctcatcaccgtctccagccaccagaatgcattctggacagcactcaactcaagcacaaagtacgggccaggggggtctttctgcaccttcatccttaatatgtcacagtttgtgtgatccagcgtcatttccacctgatggggcaactgtgagcattaaacctgaaccagaagatcgagagcctaactttgcaaccattggtctgcaggacatcactttagatgatgttgagacctacgttttggccagtcccagcaggaagatatctgaggaatctagagtgaacgagataattgggagagacatgtcccagatttctgtttcccaaggagcaggggtgagcaggcaggctcccctcccgagtcctgagtccctggatttaggaagatctgatgggctctaacagtgcttactgcagccttgtgtccaccaccaacttctcagcatgtttctctccttggaccttgggtttccaactctgcagccttcaggtctggggccaggagtgggacccaccatttgtggggaaagtagcattcctccacctcaggccttgggtagatttggcaaaagaacaggagcagcataggctgtttgagctttggggaaatgaactttgctttttatatttaactaggatacttttatatgatgggtgctttgagtgtgaatgcagcaggctctcttgtttccgaggtgctgcttttgcaggtgacctggttacttagctaggattggtgatttgtactgctttatggtcatttgaagggccctttagtttttatgataatttttaaaataggaacttttgataagaccttctagaagcaaaaaaaaaaaaaaaaagaaaaaaaaagaaaagaaaaaaagaaaaagaaaaaaatatcccaagcccacacctatgcctcagaaagtcagcatgtgtcctgaagacgttcatagatttataggaaataaagccaaatgtagctcatacctctttataaaactaaactgttgttagataaaatgagaagagaccattccatcattgaagtgttggaatataaaaagacattccagagcatagccttttggtaactttctaggtaatcttgcaatctctccatactggctccatgttgaaattgctttttccctcaggaccctgggtaagatggctacatttaaggtgactctgaatggtggggttctagcttggtcactttcatttcttgccatcataaaaactagtaggctgtggagtgcgcttcctgtttgtgtcatctggtcgtagaaccttttccaaacagaagcatctgcctttggctgttctgtgacctttgaagccagtctcagtggtttaggcagctttgcagttctaactctagctagaggccaggctgtgtgcagagctaaagcacaaatgagcagtacatcagcatgggcagagaaaatacaggactccagatgggaaggttttaagagtcacactggcatggaaggcttatctgccattctatttatagcctgaaatgattctggcctaccctgtcctgtctgtatgatctaaaaaccagccttttccccagaaggctctgagcacatccagaagtgataacctgaccctccacaccaaagacaccctggtgctgctgctggtgagactggtgtccaaggcagggcccagcagaaactgcagcctgctgtctaccaaaggaggtacccgagttgggtactttaaaaaaaaaaaaaacctgcccttacccctctccctaatgggattttttttacctgttcctgggcccattacagagcctctgaagtttgcagtatgctttcaaatgaaataatatacttccattgattcaggaagcagattttttgagtgcctatatgtgagacagtgtgctggttgaaggcctgatgctgttattccaggagactgcaggcccttgatgccaggactctctctactaaggccagttcaggtctgggaaagggagctggcctattgcccaccacctgttgtcagtaggttaggagctgttgactcaggatgaggaagtatggtctttaaaaaaaacaaaatatattttagatttctcccctaaagttagttagagaaaaaggtctattcttcagcagatcactgtggcccctcttggagctgggtgttttcaaattttcttgaaaagtgagttgtgtcacagaatgtggatagtgagatttgcttctgggcctgtggttggacgcccacagcttcctttggaggggcaagaagttggcctctcggttgacattccagagaaatggccagacttgcccctacccttttgcccctggtgtagctgcctcacatgaggttattgcaagagttccccttgcaataccctttgtgccctcaagaattaaaagcctctatgatccagagttgctatgcaccaaattttgatgccttctaaataccttgatgcctgtagcactagaaatgctttcctatttaaaataaacattaaattttaaaatagagctttgtatactatgtaagcagttttatatcagctttgtaaaagctttggtgttaagagtcaatattttttggctttgtagataaagacttaaatttttgtgcaacatagtggtgttaaagcacacatccattggactatgcaaatcaatttctactagcagcactgagcaactgggcacgtgctagtacgcaccccctcctactctaactgtgctagctcttgggttgaggaatggaatgggtagccttctgcttactggagatgcacagagaaacatggctgaaaacagctttaaaaagaacatgtctttgggttcatgtgtggtgctgctgcccgggtgtaaactatccccacccagggccagccattatcaccagacctcttctgggcctggctgtgaagccctgtttttggtattcagaatggatctttaaggctcagatgggctcaaattgaaaccttgtgttttataaaatggatgtttagtaaaggaactggttctcagttatgtttacagcacttggaattgtgtgttcttgtacattttgtattttaaaaccttttatgggagtgcagtgctccttacacaaatacaaagggaagaagagccagcagttgaggctcctcagttttagtgctgaaataataaacagtgacaggtcaacagtatccttaatctgtctgagtgttcctccgcctggggttggtgtggagcccctcactttggggcaaagttaagggtcctgtgtcttttaaaaagtccatttggtcaataacttttcatttaaggaagagaagatcgagttccaaattgcttccgaggcttcagttctgtaccatttaatgcgtgcaaaggacattccatggtgtctgctgggttcagggcaactggctttcccaaggcatacaagaaaag

SEQ ID NO: 374485 - DNA, 4282 bp, Homo sapiens
tcattagcttgatttcctagatgtacaagcccgttgacttggccggtctctgacttggaaacacccttctcgtttgcaatggcaagaggaaaaaaagccagtctcaacgttttacttatacaccagttttgatgaagcaagaacacagagaagagattgatttgtcttcagttccatctttgcctgtgcctcatcctgctcagacccagaggccttcctctgattcagggtgttcacatgacagtgtactgtcaggacagagaagtttgatttgctccatcccacaaacatatgcatccatggtgacctcatcccatctgccacagttgcagtgtagagatgagagtgttagtaaagaacagcatatgattccttctccaattgtacaccagccttttcaagtcacaccaacacctcctgtggggtcttcctatcagcctatgcaaactaatgttgtgtacaatggaccaacttgtcttcctattaatgctgcctctagtcaagaatttgattcagttttgtttcagcaggatgcaactctttctggtttagtgaatcttggctgtcaaccactgtcatccataccatttcattcttcaaattcaggctcaacaggacatctcttagcccatacacctcattctgtgcataccctgcctcatctgcaatcaatgggatatcattgttcaaatacaggacaaagatctctttcttctccagtggctgaccagattacaggtcagccttcgtctcagttacaacctattacatatggtccttcacattcagggtctgctacaacagcttccccagcagcttctcatcccttggctagttcaccgctttctgggccaccatctcctcagcttcagcctatgccttaccaatctcctagctcaggaactgcctcatcaccgtctccagccaccagaatgcattctggacagcactcaactcaagcacaaagtacgggccaggggggtctttctgcaccttcatccttaatatgtcacagtttgtgtgatccagcgtcatttccacctgatggggcaactgtgagcattaaacctgaaccagaagatcgagagcctaactttgcaaccattggtctgcaggacatcactttagatgatgtgaacgagataattgggagagacatgtcccagatttctgtttcccaaggagcaggggtgagcaggcaggctcccctcccgagtcctgagtccctggatttaggaagatctgatgggctctaacagtgcttactgcagccttgtgtccaccaccaacttctcagcatgtttctctccttggaccttgggtttccaactctgcagccttcaggtctggggccaggagtgggacccaccatttgtggggaaagtagcattcctccacctcaggccttgggtagatttggcaaaagaacaggagcagcataggctgtttgagctttggggaaatgaactttgctttttatatttaactaggatacttttatatgatgggtgctttgagtgtgaatgcagcaggctctcttgtttccgaggtgctgcttttgcaggtgacctggttacttagctaggattggtgatttgtactgctttatggtcatttgaagggccctttagtttttatgataatttttaaaataggaacttttgataagaccttctagaagcaaaaaaaaaaaaaaaaagaaaaaaaaagaaaagaaaaaaagaaaaagaaaaaaatatcccaagcccacacctatgcctcagaaagtcagcatgtgtcctgaagacgttcatagatttataggaaataaagccaaatgtagctcatacctctttataaaactaaactgttgttagataaaatgagaagagaccattccatcattgaagtgttggaatataaaaagacattccagagcatagccttttggtaactttctaggtaatcttgcaatctctccatactggctccatgttgaaattgctttttccctcaggaccctgggtaagatggctacatttaaggtgactctgaatggtggggttctagcttggtcactttcatttcttgccatcataaaaactagtaggctgtggagtgcgcttcctgtttgtgtcatctggtcgtagaaccttttccaaacagaagcatctgcctttggctgttctgtgacctttgaagccagtctcagtggtttaggcagctttgcagttctaactctagctagaggccaggctgtgtgcagagctaaagcacaaatgagcagtacatcagcatgggcagagaaaatacaggactccagatgggaaggttttaagagtcacactggcatggaaggcttatctgccattctatttatagcctgaaatgattctggcctaccctgtcctgtctgtatgatctaaaaaccagccttttccccagaaggctctgagcacatccagaagtgataacctgaccctccacaccaaagacaccctggtgctgctgctggtgagactggtgtccaaggcagggcccagcagaaactgcagcctgctgtctaccaaaggaggtacccgagttgggtactttaaaaaaaaaaaaaacctgcccttacccctctccctaatgggattttttttacctgttcctgggcccattacagagcctctgaagtttgcagtatgctttcaaatgaaataatatacttccattgattcaggaagcagattttttgagtgcctatatgtgagacagtgtgctggttgaaggcctgatgctgttattccaggagactgcaggcccttgatgccaggactctctctactaaggccagttcaggtctgggaaagggagctggcctattgcccaccacctgttgtcagtaggttaggagctgttgactcaggatgaggaagtatggtctttaaaaaaaacaaaatatattttagatttctcccctaaagttagttagagaaaaaggtctattcttcagcagatcactgtggcccctcttggagctgggtgttttcaaattttcttgaaaagtgagttgtgtcacagaatgtggatagtgagatttgcttctgggcctgtggttggacgcccacagcttcctttggaggggcaagaagttggcctctcggttgacattccagagaaatggccagacttgcccctacccttttgcccctggtgtagctgcctcacatgaggttattgcaagagttccccttgcaataccctttgtgccctcaagaattaaaagcctctatgatccagagttgctatgcaccaaattttgatgccttctaaataccttgatgcctgtagcactagaaatgctttcctatttaaaataaacattaaattttaaaatagagctttgtatactatgtaagcagttttatatcagctttgtaaaagctttggtgttaagagtcaatattttttggctttgtagataaagacttaaatttttgtgcaacatagtggtgttaaagcacacatccattggactatgcaaatcaatttctactagcagcactgagcaactgggcacgtgctagtacgcaccccctcctactctaactgtgctagctcttgggttgaggaatggaatgggtagccttctgcttactggagatgcacagagaaacatggctgaaaacagctttaaaaagaacatgtctttgggttcatgtgtggtgctgctgcccgggtgtaaactatccccacccagggccagccattatcaccagacctcttctgggcctggctgtgaagccctgtttttggtattcagaatggatctttaaggctcagatgggctcaaattgaaaccttgtgttttataaaatggatgtttagtaaaggaactggttctcagttatgtttacagcacttggaattgtgtgttcttgtacattttgtattttaaaaccttttatgggagtgcagtgctccttacacaaatacaaagggaagaagagccagcagttgaggctcctcagttttagtgctgaaataataaacagtgacaggtcaacagtatccttaatctgtctgagtgttcctccgcctggggttggtgtggagcccctcactttggggcaaagttaagggtcctgtgtcttttaaaaagtccatttggtcaataacttttcatttaaggaagagaagatcgagttccaaattgcttccgaggcttcagttctgtaccatttaatgcgtgcaaaggacattccatggtgtctgctgggttcagggcaactggctttcccaaggcatacaagaaaag

SEQ ID NO: 374486 - DNA, 3844 bp, Homo sapiens
ccccggcctgtaggaattcattgccgagtcgacacgatttcgagaagacgaccgaagggagtcaagaatttgattcagttttgtttcagcaggatgcaactctttctggtttagtgaatcttggctgtcaaccactgtcatccataccatttcattcttcaaattcaggctcaacaggacatctcttagcccatacacctcattctgtgcataccctgcctcatctgcaatcaatgggatatcattgttcaaatacaggacaaagatctctttcttctccagtggctgaccagattacaggtcagccttcgtctcagttacaacctattacatatggtccttcacattcagggtctgctacaacagcttccccagcagcttctcatcccttggctagttcaccgctttctgggccaccatctcctcagcttcagcctatgccttaccaatctcctagctcaggaactgcctcatcaccgtctccagccaccagaatgcattctggacagcactcaactcaagcacaaagtacgggccaggggggtctttctgcaccttcatccttaatatgtcacagtttgtgtgatccagcgtcatttccacctgatggggcaactgtgagcattaaacctgaaccagaagatcgagagcctaactttgcaaccattggtctgcaggacatcactttagatgatgtgaacgagataattgggagagacatgtcccagatttctgtttcccaaggagcaggggtgagcaggcaggctcccctcccgagtcctgagtccctggatttaggaagatctgatgggctctaacagtgcttactgcagccttgtgtccaccaccaacttctcagcatgtttctctccttggaccttgggtttccaactctgcagccttcaggtctggggccaggagtgggacccaccatttgtggggaaagtagcattcctccacctcaggccttgggtagatttggcaaaagaacaggagcagcataggctgtttgagctttggggaaatgaactttgctttttatatttaactaggatacttttatatgatgggtgctttgagtgtgaatgcagcaggctctcttgtttccgaggtgctgcttttgcaggtgacctggttacttagctaggattggtgatttgtactgctttatggtcatttgaagggccctttagtttttatgataatttttaaaataggaacttttgataagaccttctagaagcaaaaaaaaaaaaaaaaagaaaaaaaaagaaaagaaaaaaagaaaaagaaaaaaatatcccaagcccacacctatgcctcagaaagtcagcatgtgtcctgaagacgttcatagatttataggaaataaagccaaatgtagctcatacctctttataaaactaaactgttgttagataaaatgagaagagaccattccatcattgaagtgttggaatataaaaagacattccagagcatagccttttggtaactttctaggtaatcttgcaatctctccatactggctccatgttgaaattgctttttccctcaggaccctgggtaagatggctacatttaaggtgactctgaatggtggggttctagcttggtcactttcatttcttgccatcataaaaactagtaggctgtggagtgcgcttcctgtttgtgtcatctggtcgtagaaccttttccaaacagaagcatctgcctttggctgttctgtgacctttgaagccagtctcagtggtttaggcagctttgcagttctaactctagctagaggccaggctgtgtgcagagctaaagcacaaatgagcagtacatcagcatgggcagagaaaatacaggactccagatgggaaggttttaagagtcacactggcatggaaggcttatctgccattctatttatagcctgaaatgattctggcctaccctgtcctgtctgtatgatctaaaaaccagccttttccccagaaggctctgagcacatccagaagtgataacctgaccctccacaccaaagacaccctggtgctgctgctggtgagactggtgtccaaggcagggcccagcagaaactgcagcctgctgtctaccaaaggaggtacccgagttgggtactttaaaaaaaaaaaaaacctgcccttacccctctccctaatgggattttttttacctgttcctgggcccattacagagcctctgaagtttgcagtatgctttcaaatgaaataatatacttccattgattcaggaagcagattttttgagtgcctatatgtgagacagtgtgctggttgaaggcctgatgctgttattccaggagactgcaggcccttgatgccaggactctctctactaaggccagttcaggtctgggaaagggagctggcctattgcccaccacctgttgtcagtaggttaggagctgttgactcaggatgaggaagtatggtctttaaaaaaaacaaaatatattttagatttctcccctaaagttagttagagaaaaaggtctattcttcagcagatcactgtggcccctcttggagctgggtgttttcaaattttcttgaaaagtgagttgtgtcacagaatgtggatagtgagatttgcttctgggcctgtggttggacgcccacagcttcctttggaggggcaagaagttggcctctcggttgacattccagagaaatggccagacttgcccctacccttttgcccctggtgtagctgcctcacatgaggttattgcaagagttccccttgcaataccctttgtgccctcaagaattaaaagcctctatgatccagagttgctatgcaccaaattttgatgccttctaaataccttgatgcctgtagcactagaaatgctttcctatttaaaataaacattaaattttaaaatagagctttgtatactatgtaagcagttttatatcagctttgtaaaagctttggtgttaagagtcaatattttttggctttgtagataaagacttaaatttttgtgcaacatagtggtgttaaagcacacatccattggactatgcaaatcaatttctactagcagcactgagcaactgggcacgtgctagtacgcaccccctcctactctaactgtgctagctcttgggttgaggaatggaatgggtagccttctgcttactggagatgcacagagaaacatggctgaaaacagctttaaaaagaacatgtctttgggttcatgtgtggtgctgctgcccgggtgtaaactatccccacccagggccagccattatcaccagacctcttctgggcctggctgtgaagccctgtttttggtattcagaatggatctttaaggctcagatgggctcaaattgaaaccttgtgttttataaaatggatgtttagtaaaggaactggttctcagttatgtttacagcacttggaattgtgtgttcttgtacattttgtattttaaaaccttttatgggagtgcagtgctccttacacaaatacaaagggaagaagagccagcagttgaggctcctcagttttagtgctgaaataataaacagtgacaggtcaacagtatccttaatctgtctgagtgttcctccgcctggggttggtgtggagcccctcactttggggcaaagttaagggtcctgtgtcttttaaaaagtccatttggtcaataacttttcatttaaggaagagaagatcgagttccaaattgcttccgaggcttcagttctgtaccatttaatgcgtgcaaaggacattccatggtgtctgctgggttcagggcaactggctttcccaaggcatacaagaaaag

SEQ ID NO: 374487 - DNA, 3860 bp, Homo sapiens
agggcgcgagagcgcacccgcggcggcggtggcggcgactgtgggggggcggcggggaacattggctaagccgacagtggaggcttaggcaccggtggcgggcggctgcggttcctggtgctgctcggcgcgcggccagctttcggaacggaacgctcggcgtcgcgggccccgcccggaaagtttgccgtggagtcgcgacctcttggcccgcgcggcccggcatgaagcggcgttgaggagctgctgccgccgcttgccgctgccgccgccgccgcctgaggaggagctgcagcaccctgggccacgccgatgactactgcaaactgtggcgcccacgacgagctcgacttcaaactcgtctttggcgaggacggggcgccggcgccgccgcccccgggctcgcggcctgcagatcttgagccagatgattgtgcatccatttacatctttaatgtagatccacctccatctactttaaccacaccactttgcttaccacatcatggattaccgtctcactcttctgttttgtcaccatcgtttcagctccaaagtcacaaaaactatgaaggaacttgtgagattcctgaatctaaatatagcccattaggtggtcccaaaccctttgagtgcccaagtattcaaattacatctatctctcctaactgtcatcaagaattagatgcacatgaagatgacctacagataaatgacccagaacgggaatttttggaaaggccttctagagatcatctctatcttcctcttgagccatcctaccgggagtcttctcttagtcctagtcctgccagcagcatctcttctaggagttggttctctgatgcatcttcttgtgaatcgctttcacatatttatgatgatgtggactcagagttgaatgaagctgcagcccgatttacccttggatcccctctgacttctcctggtggctctccagggggctgccctggagaagaaacttggcatcaacagtatggacttggacactcattatcacccaggcaatctccttgccactctcctagatccagtgtcactgatgagaattggctgagccccaggccagcctcaggaccctcatcaaggcccacatccccctgtgggaaacggaggcactccagtgctgaagtttgttatgctgggtccctttcaccccatcactcacctgttccttcacctggtcactcccccaggggaagtgtgacagaagatacgtggctcaatgcttctgtccatggtgggtcaggccttggccctgcagtttttccatttcagtactgtgtagagactgacatccctctcaaaacaaggaaaacttctgaagatcaagctgccatactaccaggaaaattagagctgtgttcagatgaccaagggagtttatcaccagcccgggagacttcaatagatgatggccttggatctcagtatcctttaaagaaagattcatgtggtgatcagtttctttcagttccttcaccctttacctggagcaaaccaaagcctggccacacccctatatttcgcacatcttcattacctccactagactggcctttaccagctcattttggacaatgtgaactgaaaatagaagtgcaacctaaaactcatcatcgagcccattatgaaactgaaggtagccgaggggcagtaaaagcatctactgggggacatcctgttgtgaagctcctgggctataacgaaaagccaataaatctacaaatgtttattgggacagcagatgatcgatatttacgacctcatgcattttaccaggtgcatcgaatcactgggaagacagtcgctactgcaagccaagagataataattgccagtacaaaagttctggaaattccacttcttcctgaaaataatatgtcagccagtattgattgtgcaggtattttgaaactccgcaattcagatatagaacttcgaaaaggagaaactgatattggcagaaagaatactagagtacgacttgtgtttcgtgtacacatcccacagcccagtggaaaagtcctttctctgcagatagcctctatacccgttgagtgctcccagcggtctgctcaagaacttcctcatattgagaagtacagtatcaacagttgttctgtaaatggaggtcatgaaatggttgtgactggatctaattttcttccagaatccaaaatcatttttcttgaaaaaggacaagatggacgacctcagtgggaggtagaagggaagataatcagggaaaaatgtcaaggggctcacattgtccttgaagttcctccatatcataacccagcagttacagctgcagtgcaggtgcacttttatctttgcaatggcaagaggaaaaaaagccagtctcaacgttttacttatacaccagttttgatgaagcaagaacacagagaagagattgatttgtcttcagttccatctttgcctgtgcctcatcctgctcagacccagaggccttcctctgattcagggtgttcacatgacagtgtactgtcaggacagagaagtttgatttgctccatcccacaaacatatgcatccatggtgacctcatcccatctgccacagttgcagtgtagagatgagagtgttagtaaagaacagcatatgattccttctccaattgtacaccagccttttcaagtcacaccaacacctcctgtggggtcttcctatcagcctatgcaaactaatgttgtgtacaatggaccaacttgtcttcctattaatgctgcctctagtcaagaatttgattcagttttgtttcagcaggatgcaactctttctggtttagtgaatcttggctgtcaaccactgtcatccataccatttcattcttcaaattcaggctcaacaggacatctcttagcccatacacctcattctgtgcataccctgcctcatctgcaatcaatgggatatcattgttcaaatacaggacaaagatctctttcttctccagtggctgaccagattacaggtcagccttcgtctcagttacaacctattacatatggtccttcacattcagggtctgctacaacagcttccccagcagcttctcatcccttggctagttcaccgctttctgggccaccatctcctcagcttcagcctatgccttaccaatctcctagctcaggaactgcctcatcaccgtctccagccaccagaatgcattctggacagcactcaactcaagcacaaagtacgggccaggggggtctttctgcaccttcatccttaatatgtcacagtttgtgtgatccagcgtcatttccacctgatggggcaactgtgagcattaaacctgaaccagaagatcgagagcctaactttgcaaccattggtctgcaggacatcactttagatgatggtaagttcatctctgatatgttcttgaagtagtgaagattcagggactttattctcccaagtgtcatgaaaaagtttctatggattgcttattggcatatggttgggcttttaaataagttgttattagaaatatatgttaatatataactttgccaggtaccacggctcacgcctgtatcccagcactttggaaggctgaggcgggtggatcacaaggtcaggagttcaagaccagcctggccaacatggtgtaacgctgtctctactaaaaatacaaaaaattagccaggcatggtggtgtgtgactataatcccagctactcgggaggctgagacaggagaatcacttgaacccgggaggtggcagttgcagggagctaagatcgcgccattgcactccagcctgggcggcagagcaagactccgtctcgggaaaaaaa

SEQ ID NO: 374488 - DNA, 3582 bp, Homo sapiens
agggcgcgagagcgcacccgcggcggcggtggcggcgactgtgggggggcggcggggaacattggctaagccgacagtggaggcttaggcaccggtggcgggcggctgcggttcctggtgctgctcggcgcgcggccagctttcggaacggaacgctcggcgtcgcgggccccgcccggaaagtttgccgtggagtcgcgacctcttggcccgcgcggcccggcatgaagcggcgttgaggagctgctgccgccgcttgccgctgccgccgccgccgcctgaggaggagctgcagcaccctgggccacgccgatgactactgcaaactgtggcgcccacgacgagctcgacttcaaactcgtctttggcgaggacggggcgccggcgccgccgcccccgggctcgcggcctgcagatcttgagccagatgattgtgcatccatttacatctttaatgtagatccacctccatctactttaaccacaccactttgcttaccacatcatggattaccgtctcactcttctgttttgtcaccatcgtttcagctccaaagtcacaaaaactatgaaggaacttgtgagattcctgaatctaaatatagcccattaggtggtcccaaaccctttgagtgcccaagtattcaaattacatctatctctcctaactgtcatcaagaattagatgcacatgaagatgacctacagataaatgacccagaacgggaatttttggaaaggccttctagagatcatctctatcttcctcttgagccatcctaccgggagtcttctcttagtcctagtcctgccagcagcatctcttctaggagttggttctctgatgcatcttcttgtgaatcgctttcacatatttatgatgatgtggactcagagttgaatgaagctgcagcccgatttacccttggatcccctctgacttctcctggtggctctccagggggctgccctggagaagaaacttggcatcaacagtatggacttggacactcattatcacccaggcaatctccttgccactctcctagatccagtgtcactgatgagaattggctgagccccaggccagcctcaggaccctcatcaaggcccacatccccctgtgggaaacggaggcactccagtgctgaagtttgttatgctgggtccctttcaccccatcactcacctgttccttcacctggtcactcccccaggggaagtgtgacagaagatacgtggctcaatgcttctgtccatggtgggtcaggccttggccctgcagtttttccatttcagtactgtgtagagactgacatccctctcaaaacaaggaaaacttctgaagatcaagctgccatactaccaggaaaattagagctgtgttcagatgaccaagggagtttatcaccagcccgggagacttcaatagatgatggccttggatctcagtatcctttaaagaaagattcatgtggtgatcagtttctttcagttccttcaccctttacctggagcaaaccaaagcctggccacacccctatatttcgcacatcttcattacctccactagactggcctttaccagctcattttggacaatgtgaactgaaaatagaagtgcaacctaaaactcatcatcgagcccattatgaaactgaaggtagccgaggggcagtaaaagcatctactgggggacatcctgttgtgaagctcctgggctataacgaaaagccaataaatctacaaatgtttattgggacagcagatgatcgatatttacgacctcatgcattttaccaggtgcatcgaatcactgggaagacagtcgctactgcaagccaagagataataattgccagtacaaaagttctggaaattccacttcttcctgaaaataatatgtcagccagtattgattgtgcaggtattttgaaactccgcaattcagatatagaacttcgaaaaggagaaactgatattggcagaaagaatactagagtacgacttgtgtttcgtgtacacatcccacagcccagtggaaaagtcctttctctgcagatagcctctatacccgttgagtgctcccagcggtctgctcaagaacttcctcatattgagaagtacagtatcaacagttgttctgtaaatggaggtcatgaaatggttgtgactggatctaattttcttccagaatccaaaatcatttttcttgaaaaaggacaagatggacgacctcagtgggaggtagaagggaagataatcagggaaaaatgtcaaggggctcacattgtccttgaagttcctccatatcataacccagcagttacagctgcagtgcaggtgcacttttatctttgcaatggcaagaggaaaaaaagccagtctcaacgttttacttatacaccagttttgatgaagcaagaacacagagaagagattgatttgtcttcagttccatctttgcctgtgcctcatcctgctcagacccagaggccttcctctgattcagggtgttcacatgacagtgtactgtcaggacagagaagtttgatttgctccatcccacaaacatatgcatccatggtgacctcatcccatctgccacagttgcagtgtagagatgagagtgttagtaaagaacagcatatgattccttctccaattgtacaccagccttttcaagtcacaccaacacctcctgtggggtcttcctatcagcctatgcaaactaatgttgtgtacaatggaccaacttgtcttcctattaatgctgcctctagtcaagaatttgattcagttttgtttcagcaggatgcaactctttctggtttagtgaatcttggctgtcaaccactgtcatccataccatttcattcttcaaattcaggctcaacaggacatctcttagcccatacacctcattctgtgcataccctgcctcatctgcaatcaatgggatatcattgttcaaatacaggacaaagatctctttcttctccagtggctgaccagattacaggtcagccttcgtctcagttacaacctattacatatggtccttcacattcagggtctgctacaacagcttccccagcagcttctcatcccttggctagttcaccgctttctgggccaccatctcctcagcttcagcctatgccttaccaatctcctagctcaggaactgcctcatcaccgtctccagccaccagaatgcattctggacagcactcaactcaagcacaaagtacgggccaggggggtctttctgcaccttcatccttaatatgtcacagtttgtgtgatccagcgtcatttccacctgatggggcaactgtgagcattaaacctgaaccagaagatcgagagcctaactttgcaaccattggtctgcaggacatcactttagatgatgttgagacctacgttttggccagtcccagcaggaagatatctgaggaatctagaggtgaagagcctgaacccagagcccccagcccgagggagaagtgagggagaaggaaagccagaggacttgctgattaacactcggtcaagttattgctaaaggtctgtgaa

SEQ ID NO: 374489 - DNA, 2891 bp, Homo sapiens
agggcgcgagagcgcacccgcggcggcggtggcggcgactgtgggggggcggcggggaacattggctaagccgacagtggaggcttaggcaccggtggcgggcggctgcggttcctggtgctgctcggcgcgcggccagctttcggaacggaacgctcggcgtcgcgggccccgcccggaaagtttgccgtggagtcgcgacctcttggcccgcgcggcccggcatgaagcggcgttgaggagctgctgccgccgcttgccgctgccgccgccgccgcctgaggaggagctgcagcaccctgggccacgccgatgactactgcaaactgtggcgcccacgacgagctcgacttcaaactcgtctttggcgaggacggggcgccggcgccgccgcccccgggctcgcggcctgcagatcttgagccagatgattgtgcatccatttacatctttaatgtagatccacctccatctactttaaccacaccactttgcttaccacatcatggattaccgtctcactcttctgttttgtcaccatcgtttcagctccaaagtcacaaaaactatgaaggaacttgtgagattcctgaatctaaatatagcccattaggtggtcccaaaccctttgagtgcccaagtattcaaattacatctatctctcctaactgtcatcaagaattagatgcacatgaagatgacctacagataaatgacccagaacgggaatttttggaaaggccttctagagatcatctctatcttcctcttgagccatcctaccgggagtcttctcttagtcctagtcctgccagcagcatctcttctaggagttggttctctgatgcatcttcttgtgaatcgctttcacatatttatgatgatgtggactcagagttgaatgaagctgcagcccgatttacccttggatcccctctgacttctcctggtggctctccagggggctgccctggagaagaaacttggcatcaacagtatggacttggacactcattatcacccaggcaatctccttgccactctcctagatccagtgtcactgatgagaattggctgagccccaggccagcctcaggaccctcatcaaggcccacatccccctgtgggaaacggaggcactccagtgctgaagtttgttatgctgggtccctttcaccccatcactcacctgttccttcacctggtcactcccccaggggaagtgtgacagaagatacgtggctcaatgcttctgtccatggtgggtcaggccttggccctgcagtttttccatttcagtactgtgtagagactgacatccctctcaaaacaaggaaaacttctgaagatcaagctgccatactaccaggaaaattagagctgtgttcagatgaccaagggagtttatcaccagcccgggagacttcaatagatgatggccttggatctcagtatcctttaaagaaagattcatgtggtgatcagtttctttcagttccttcaccctttacctggagcaaaccaaagcctggccacacccctatatttcgcacatcttcattacctccactagactggcctttaccagctcattttggacaatgtgaactgaaaatagaagtgcaacctaaaactcatcatcgagcccattatgaaactgaaggtagccgaggggcagtaaaagcatctactgggggacatcctgttgtgaagctcctgggctataacgaaaagccaataaatctacaaatgtttattgggacagcagatgatcgatatttacgacctcatgcattttaccaggtgcatcgaatcactgggaagacagtcgctactgcaagccaagagataataattgccagtacaaaagttctggaaattccacttcttcctgaaaataatatgtcagccagtattgattgtgcaggtattttgaaactccgcaattcagatatagaacttcgaaaaggagaaactgatattggcagaaagaatactagagtacgacttgtgtttcgtgtacacatcccacagcccagtggaaaagtcctttctctgcagatagcctctatacccgttgagtgctcccagcggtctgctcaagaacttcctcatattgagaagtacagtatcaacagttgttctgtaaatggaggtcatgaaatggttgtgactggatctaattttcttccagaatccaaaatcatttttcttgaaaaaggacaagatggacgacctcagtgggaggtagaagggaagataatcagggaaaaatgtcaaggggctcacattgtccttgaagttcctccatatcataacccagcagttacagctgcagtgcaggtgcacttttatctttgcaatggcaagaggaaaaaaagccagtctcaacgttttacttatacaccagttttgatgaagcaagaacacagagaagagattgatttgtcttcagttccatctttgcctgtgcctcatcctgctcagacccagaggccttcctctgattcagggtgttcacatgacagtgtactgtcaggacagagaagtttgatttgctccatcccacaaacatatgcatccatggtgacctcatcccatctgccacagttgcagtgtagagatgagagtgttagtaaagaacagcatatgattccttctccaattgtacaccagccttttcaagtcacaccaacacctcctgtggggtcttcctatcagcctatgcaaactaatgttgtgtacaatggaccaacttgtcttcctattaatgctgcctctagtcaagaatttgattcagttttgtttcagcaggatgatcaggacagcaggatgatcaggacagcaggatgatcagagcaggatgatcaggacagcaggatgatcaggac

SEQ ID NO: 374490 - DNA, 769 bp, Homo sapiens
ctgtccacgtacttaatttacttaagtgttcattttaagtaacgtgctcactgtgtataggaatttgtattttgcaggtgcttgatctatctacaaagaaaaattaattaggaattactttattataaaatgctcctagaagtcttaattgtgtttattttttaaaaaaacaaatgttagacttgtgtgcatggaagtaattaaggtacatcattattgtagtttgaaagttgtacatgataagacattttgttttcactgtatgtttttactgaatgatctattccccatcccaaggcaagcatgaatacaattaggttaaacgtaaaaaaaaaaaaaaaacaagggtcggtctagcgctgcgtgggccatggtgcagctccgaccgcgagcgtctcgcgccccggcgtcggcggaggcgatggtggacgagggccagctggcctcggaggaggaggaggcggagcacgggctgttgctcgggcagcccagcagcggcgcggccgccgagcccctggaggaagacgaggaaggggacgatgagtttgacgatgaggccccggaggagctgactttcgccagcgcccaggcggaagcgagagaagaggagcggcgagtgcgggagaccgtgcgcagggataaaacgctcctgaaggagaagaggaagcgacgcgaggagctgttcatcgaacagaagcatcaagaaatcgcaggaaaggtgaaagaagttaatttgcaaaaaaaaaaattaaaatttaaaaaaaaaagc

SEQ ID NO: 374491 - DNA, 220 bp, Homo sapiens
tttttttttttaatttaaaggctttttattaggaaccaggggaatgagctgctgtccagtttttgaataatgcttggggaatccaaaaaaaacaaaatgccaagaggtttaaaagacggtggatggtcagaaagatgaaaactaagaagtaaatcaatgctaaatgaagaatctgtactttgtatgtatagaatttatctaataaatcattcatagatca

SEQ ID NO: 374492 - DNA, 3525 bp, Homo sapiens
cctgaagtgattacatacttggaccacatcacctcagccccttgcaaaattgcatttaatgttacacccttggcttttgtagaaacaggcagcaagacactatcatataaaactttgtactgcattgcaaggcataacctttaataaatcccagtggtcctttgtgtagggaacggggatgctcatagcctatggggcggctggagaaccagtcagggaccctgagggctcgatgtacactttacatgggtgggccaaggagtttacactgagggcactggtaatacctgtaatagtcttatagtacttataaagcagttttgcacataaaataccatcatgcacttataagtttgttcttgggctgctccaagttaactttattcattttcctagtgttagtgtctcagggagtctgattatatttttgatttgtaatttctatctgactaaggcctagagatttcaaaactgttctttgcaattcctctcatactgaacctctggttcagcagctttttttgttgttgttgttttcaagttttatcatttttgttcctatttggttttgtcgtttttaaattgagaattgcttctaaaacagaagacatgaaaagagaattaaaaatacaatatatgtgtaagatagaattattcaacttagcatttattaaacatctaccagatgatagacattagaaataaaatgactagcaagacctggcccttcccctcaggggttcacagaatggctggagcaactgtcatataagctgttatgaagtgcagaaactacacagacatttgtgcgggttcagaccagcgcaattagagatgggcagagtgggatggggtaggggtaaggtgcttgaaatttgcctgggtgggaatttttgaagtataaaaaggacttctacctggggggctgcggcagtagagggaagagcacggtcggtacaaatgcatggcaggtgtgaaacagtttgatttgttcaaagaatgatgaatcacttagtgttgtataatggatgggaggagagaaacacagcgatcacaaagggccatgtttgccaagaaataaaatatacttggaaaaaaagtacgtatgtgtatataccacaaaactcgggtgcattctctagggaccggcgaagccattctttcaggagatatgctcagcatttgccacgggccagctgctgttccaggtcgtgggttagggcccggcaccaggaagggcgcccctcccacagggccgacatcctaaccggcgtcgctgcggccgcggagctgggaaggccgagggcgccgggcacgtctgtgcagatttctttagagtccaggtctgtcgcccgcgtcttcgtcggtggcagcagggctgactggccacggcggccatctgctagagcgcatttcttcccatgaaacgccacctcctccgaagtgcggagcgaacgcagccaaatctacacaaagactgacaagctggatccactcgacggaacccagggccaaaaaacggcggcgagcagcgcctcgggcccgcgattaccggttttctgagcaccggacagcgtgagccgtgccagccctgtctcgccatcccagccgaggagggcagcgcgatggctcttccctgccttgaaatcaaccccattgccagccgctttcgccggcagagcattttccgtggggtccatccggctccaaggcggcctgcgctggccacgtggaaagaaacacgcccactgcctacaggccacgcccttcctcccttcgcgcatgcgccccacccgtcctgaggacctccgaacctgcagggggcgatgaaagtaggcttgcgctccgcttgtagctgcttccgggtcagaggtcagaggtcggtctagcgctgcgtgggccatggtgcagctccgaccgcgagcgtctcgcgccccggcgtcggcggaggcgatggtggacgagggccagctggcctcggaggaggaggaggcggagcacgggctgttgctcgggcagcccagcagcggcgcggccgccgagcccctggaggaagacgaggaaggggacgatgagtttgacgatgaggccccggaggagctgactttcgccagcgcccaggcggaagcgagagaagaggagcggcgagtgcgggagaccgtgcgcagggataaaacgctcctgaaggagaagaggaagcgacgcgaggagctgttcatcgaacagaagaaaagaaaactccttccagacactattttggagaagttaaccacagcttcacagactaacatcaagaaatcgccaggaaaggtgaaagaagttaatttgcaaaagaaaaatgaagactgtgaaaaaggaaatgactccaagaaagttaaagtacaaaaagtacagtctgtcagccagaataaaagctacttggccgtaaggctaaaagaccaagatctgagagattcaaggcaacaagcagcacaagccttcatacataattcattatatgggccaggaaccaacaggactactgtaaataagttcctgtctcttgccaacaagaggttaccagtgaaaagagctgctgtccagtttttgaataatgcttggggaatccaaaaaaaacaaaatgccaagaggtttaaaagacggtggatggtcagaaagatgaaaactaagaagtaaatcaatgctaaatgaagaatctgtactttgtatgtatagaatttatctaataaatcattcatagatcattttaaaggatcattataaaaatcataaacctatttgaggaagtgctcaaccacatttcattcttctggagtagaactgtgccttgcaatcctagaggaaaaagtggtttaagaaggaattgttttctttttaatatatttaactgaattcaagccatacccacatcagcaacagcacctcttctactctccccgggttagaggggtggcaaaaatggcacggactaaaaggagaaatggatattccagcaaagtctctaactgcagcctgtagacaatttgctattaaagattcagtgcacaaaatatagctaacagcttttaaatttttacttttaaccagtctggggatttgcttgcctggtgagtctcatatgccatattatgaatatgaaaataatgaagttaatttcctgttgcctttctgtgtcagccacaatatcaggtctaaccctaatccagggatgccagtaaactgaaggcaattttaggttgtagaactcagattaattgtagaaaccattaattttaattgctctaattttcatagtaatcataaaaagtatgcaagtacctaatatataaactcaattgacactgtatctgtagaagtaaatttttaatggctggttaattatatcactacattttattgcaatatagtactcatttaagcacttaaaaatggaaggtgtacaaagattaaattaagacacggtaaattgactaaatatttggtttttatataaataaaggtcataaccacaccgttaaaaaaaaa

SEQ ID NO: 374493 - DNA, 1993 bp, Homo sapiens
ctgtccacgtacttaatttacttaagtgttcattttaagtaacgtgctcactgtgtataggaatttgtattttgcaggtgcttgatctatctacaaagaaaaattaattaggaattactttattataaaatgctcctagaagtcttaattgtgtttattttttaaaaaaacaaatgttagacttgtgtgcatggaagtaattaaggtacatcattattgtagtttgaaagttgtacatgataagacattttgttttcactgtatgtttttactgaatgatctattccccatcccaaggcaagcatgaatacaattaggttaaacgtaaaaaaaaaaaaaaaacaagggtcggtctagcgctgcgtgggccatggtgcagctccgaccgcgagcgtctcgcgccccggcgtcggcggaggcgatggtggacgagggccagctggcctcggaggaggaggaggcggagcacgggctgttgctcgggcagcccagcagcggcgcggccgccgagcccctggaggaagacgaggaaggggacgatgagtttgacgatgaggccccggaggagctgactttcgccagcgcccaggcggaagcgagagaagaggagcggcgagtgcgggagaccgtgcgcagggataaaacgctcctgaaggagaagaggaagcgacgcgaggagctgttcatcgaacagaagaaaagaaaactccttccagacactattttggagaagttaaccacagcttcacagactaacatcaagaaatcgccaggaaaggtgaaagaagttaatttgcaaaagaaaaatgaagactgtgaaaaaggaaatgactccaagaaagttaaagtacaaaaagtacagtctgtcagccagaataaaagctacttggccgtaaggctaaaagaccaagatctgagagattcaaggcaacaagcagcacaagccttcatacataattcattatatgggccaggaaccaacaggactactgtaaataagttcctgtctcttgccaacaagaggttaccagtgaaaagagctgctgtccagtttttgaataatgcttggggaatccaaaaaaaacaaaatgccaagaggtttaaaagacggtggatggtcagaaagatgaaaactaagaagtaaatcaatgctaaatgaagaatctgtactttgtatgtatagaatttatctaataaatcattcatagatcattttaaaggatcattataaaaatcataaacctatttgaggaagtgctcaaccacatttcattcttctggagtagaactgtgccttgcaatcctagaggaaaaagtggtttaagaaggaattgttttctttttaatatatttaactgaattcaagccatacccacatcagcaacagcacctcttctactctccccgggttagaggggtggcaaaaatggcacggactaaaaggagaaatggatattccagcaaagtctctaactgcagcctgtagacaatttgctattaaagattcagtgcacaaaatatagctaacagcttttaaatttttacttttaaccagtctggggatttgcttgcctggtgagtctcatatgccatattatgaatatgaaaataatgaagttaatttcctgttgcctttctgtgtcagccacaatatcaggtctaaccctaatccagggatgccagtaaactgaaggcaattttaggttgtagaactcagattaattgtagaaaccattaattttaattgctctaattttcatagtaatcataaaaagtatgcaagtacctaatatataaactcaattgacactgtatctgtagaagtaaatttttaatggctggttaattatatcactacattttattgcaatatagtactcatttaagcacttaaaaatggaaggtgtacaaagattaaattaagacacggtaaattgactaaatatttggtttttatataaataaaggtcataaccacaccgttaaaaaaaaa

SEQ ID NO: 374494 - DNA, 2603 bp, Homo sapiens
cctgaagtgattacatacttggaccacatcacctcagccccttgcaaaattgcatttaatgttacacccttggcttttgtagaaacaggcagcaagacactatcatataaaactttgtactgcattgcaaggcataacctttaataaatcccagtggtcctttgtgtagggaacggggatgctcatagcctatggggcggctggagaaccagtcagggaccctgagggctcgatgtacactttacatgggtgggccaaggagtttacactgagggcactggtaatacctgtaatagtcttatagtacttataaagcagttttgcacataaaataccatcatgcacttataagtttgttcttgggctgctccaagttaactttattcattttcctagtgttagtgtctcagggagtctgattatatttttgatttgtaatttctatctgactaaggcctagagatttcaaaactgttctttgcaattcctctcatactgaacctctggttcagcagctttttttgttgttgttgttttcaagttttatcatttttgttcctatttggttttgtcgtttttaaattgagaattgcttctaaaacagaagacatgaaaagagaattaaaaatacaatatatgtgtaagatagaattattcaacttagcatttattaaacatctaccagatgatagacattagaaataaaatgactagcaagacctggcccttcccctcaggggttcacagaatggctggagcaactgtcatataagctgttatgaagtgcagaaactacacagacatttgtgcgggttcagaccagcgcaattagagatgggcagagtgggatggggtaggggtaaggtgcttgaaatttgcctgggtgggaatttttgaagtataaaaaggacttctacctggggggctgcggcagtagagggaagagcacggtcggtacaaatgcatggcaggtgtgaaacagtttgatttgttcaaagaatgatgaatcacttagtgttgtataatggatgggaggagagaaacacagcgatcacaaagggccatgtttgccaagaaataaaatatacttggaaaaaaagtacgtatgtgtatataccacaaaactcgggtgcattctctagggaccggcgaagccattctttcaggagatatgctcagcatttgccacgggccagctgctgttccaggtcgtgggttagggcccggcaccaggaagggcgcccctcccacagggccgacatcctaaccggcgtcgctgcggccgcggagctgggaaggccgagggcgccgggcacgtctgtgcagatttctttagagtccaggtctgtcgcccgcgtcttcgtcggtggcagcagggctgactggccacggcggccatctgctagagcgcatttcttcccatgaaacgccacctcctccgaagtgcggagcgaacgcagccaaatctacacaaagactgacaagctggatccactcgacggaacccagggccaaaaaacggcggcgagcagcgcctcgggcccgcgattaccggttttctgagcaccggacagcgtgagccgtgccagccctgtctcgccatcccagccgaggagggcagcgcgatggctcttccctgccttgaaatcaaccccattgccagccgctttcgccggcagagcattttccgtggggtccatccggctccaaggcggcctgcgctggccacgtggaaagaaacacgcccactgcctacaggccacgcccttcctcccttcgcgcatgcgccccacccgtcctgaggacctccgaacctgcagggggcgatgaaagtaggcttgcgctccgcttgtagctgcttccgggtcagaggtcagaggtcggtctagcgctgcgtgggccatggtgcagctccgaccgcgagcgtctcgcgccccggcgtcggcggaggcgatggtggacgagggccagctggcctcggaggaggaggaggcggagcacgggctgttgctcgggcagcccagcagcggcgcggccgccgagcccctggaggaagacgaggaaggggacgatgagtttgacgatgaggccccggaggagctgactttcgccagcgcccaggcggaagcgagagaagaggagcggcgagtgcgggagaccgtgcgcagggataaaacgctcctgaaggagaagaggaagcgacgcgaggagctgttcatcgaacagaagaaaagaaaactccttccagacactattttggagaagttaaccacagcttcacagactaacatcaagaaatcgccaggaaaggtgaaagaagttaatttgcaaaagaaaaatgaagactgtgaaaaaggaaatgactccaagaaagttaaagtacaaaaagtacagtctgtcagccagaataaaagctacttggccgtaaggctaaaagaccaagatctgagagattcaaggcaacaagcagcacaagccttcatacataattcattatatgggccaggaaccaacaggactactgtaaataagttcctgtctcttgccaacaagaggttaccagtgaaaagagctgcttgttgccttgaacctcgtgccgaatt

SEQ ID NO: 374495 - DNA, 3781 bp, Homo sapiens
cctgaagtgattacatacttggaccacatcacctcagccccttgcaaaattgcatttaatgttacacccttggcttttgtagaaacaggcagcaagacactatcatataaaactttgtactgcattgcaaggcataacctttaataaatcccagtggtcctttgtgtagggaacggggatgctcatagcctatggggcggctggagaaccagtcagggaccctgagggctcgatgtacactttacatgggtgggccaaggagtttacactgagggcactggtaatacctgtaatagtcttatagtacttataaagcagttttgcacataaaataccatcatgcacttataagtttgttcttgggctgctccaagttaactttattcattttcctagtgttagtgtctcagggagtctgattatatttttgatttgtaatttctatctgactaaggcctagagatttcaaaactgttctttgcaattcctctcatactgaacctctggttcagcagctttttttgttgttgttgttttcaagttttatcatttttgttcctatttggttttgtcgtttttaaattgagaattgcttctaaaacagaagacatgaaaagagaattaaaaatacaatatatgtgtaagatagaattattcaacttagcatttattaaacatctaccagatgatagacattagaaataaaatgactagcaagacctggcccttcccctcaggggttcacagaatggctggagcaactgtcatataagctgttatgaagtgcagaaactacacagacatttgtgcgggttcagaccagcgcaattagagatgggcagagtgggatggggtaggggtaaggtgcttgaaatttgcctgggtgggaatttttgaagtataaaaaggacttctacctggggggctgcggcagtagagggaagagcacggtcggtacaaatgcatggcaggtgtgaaacagtttgatttgttcaaagaatgatgaatcacttagtgttgtataatggatgggaggagagaaacacagcgatcacaaagggccatgtttgccaagaaataaaatatacttggaaaaaaagtacgtatgtgtatataccacaaaactcgggtgcattctctagggaccggcgaagccattctttcaggagatatgctcagcatttgccacgggccagctgctgttccaggtcgtgggttagggcccggcaccaggaagggcgcccctcccacagggccgacatcctaaccggcgtcgctgcggccgcggagctgggaaggccgagggcgccgggcacgtctgtgcagatttctttagagtccaggtctgtcgcccgcgtcttcgtcggtggcagcagggctgactggccacggcggccatctgctagagcgcatttcttcccatgaaacgccacctcctccgaagtgcggagcgaacgcagccaaatctacacaaagactgacaagctggatccactcgacggaacccagggccaaaaaacggcggcgagcagcgcctcgggcccgcgattaccggttttctgagcaccggacagcgtgagccgtgccagccctgtctcgccatcccagccgaggagggcagcgcgatggctcttccctgccttgaaatcaaccccattgccagccgctttcgccggcagagcattttccgtggggtccatccggctccaaggcggcctgcgctggccacgtggaaagaaacacgcccactgcctacaggccacgcccttcctcccttcgcgcatgcgccccacccgtcctgaggacctccgaacctgcagggggcgatgaaagtaggcttgcgctccgcttgtagctgcttccgggtcagaggtcagaggtcggtctagcgctgcgtgggccatggtgcagctccgaccgcgagcgtctcgcgccccggcgtcggcggaggcgatggtggacgagggccagctggcctcggaggaggaggaggcggagcacgggctgttgctcgggcagcccagcagcggcgcggccgccgagcccctggaggaagacgaggaaggggacgatgagtttgacgatgaggccccggaggagctgactttcgccagcgcccaggcggaagcgagagaagaggagcggcgagtgcgggagaccgtgcgcagggataaaacgctcctgaaggagaagaggaagcgacgcgaggagctgttcatcgaacagaagaaaagaaaactccttccagacactattttggagaagttaaccacagcttcacagactaacatcaagaaatcgccaggaaaggtgaaagaaggtatgactattctaatttaactaacttctcatgtaagtgtcaagtgcacttgcagatgtttccagtcaaatatgaatggcccttagaaagccagcatgggcctggccaaggttagctggggcctattccctgtatttcatacaaataaaaactgcatccacattggtgtgtagtggatgcttaaagtgaactccagtaaatttcctgatttatttttacgtgaatgctaattagaaaatgtaactctattttttagttaatttgcaaaagaaaaatgaagactgtgaaaaaggaaatgactccaagaaagttaaagtacaaaaagtacagtctgtcagccagaataaaagctacttggccgtaaggctaaaagaccaagatctgagagattcaaggcaacaagcagcacaagccttcatacataattcattatatgggccaggaaccaacaggactactgtaaataagttcctgtctcttgccaacaagaggttaccagtgaaaagagctgctgtccagtttttgaataatgcttggggaatccaaaaaaaacaaaatgccaagaggtttaaaagacggtggatggtcagaaagatgaaaactaagaagtaaatcaatgctaaatgaagaatctgtactttgtatgtatagaatttatctaataaatcattcatagatcattttaaaggatcattataaaaatcataaacctatttgaggaagtgctcaaccacatttcattcttctggagtagaactgtgccttgcaatcctagaggaaaaagtggtttaagaaggaattgttttctttttaatatatttaactgaattcaagccatacccacatcagcaacagcacctcttctactctccccgggttagaggggtggcaaaaatggcacggactaaaaggagaaatggatattccagcaaagtctctaactgcagcctgtagacaatttgctattaaagattcagtgcacaaaatatagctaacagcttttaaatttttacttttaaccagtctggggatttgcttgcctggtgagtctcatatgccatattatgaatatgaaaataatgaagttaatttcctgttgcctttctgtgtcagccacaatatcaggtctaaccctaatccagggatgccagtaaactgaaggcaattttaggttgtagaactcagattaattgtagaaaccattaattttaattgctctaattttcatagtaatcataaaaagtatgcaagtacctaatatataaactcaattgacactgtatctgtagaagtaaatttttaatggctggttaattatatcactacattttattgcaatatagtactcatttaagcacttaaaaatggaaggtgtacaaagattaaattaagacacggtaaattgactaaatatttggtttttatataaataaaggtcataaccacaccgttaaaaaaaaa

SEQ ID NO: 374496 - DNA, 1250 bp, Homo sapiens
gaggcagaagttgcagtgagctgagatcgcgcagcctgggtgacagagcgagactctgtctcaggaagaaaaaaaaaagaaagtaagcatgtgtaattcttatttaaccttttatattgatcaacagccagaataaaagctacttggccgtaaggctaaaagaccaagatctgagagattcaaggcaacaagcagcacaagccttcatacataattcattatatgggccaggaaccaacaggactactgtaaataagttcctgtctcttgccaacaagaggttaccagtgaaaagagctgctgtccagtttttgaataatgcttggggaatccaaaaaaaacaaaatgccaagaggtttaaaagacggtggatggtcagaaagatgaaaactaagaagtaaatcaatgctaaatgaagaatctgtactttgtatgtatagaatttatctaataaatcattcatagatcattttaaaggatcattataaaaatcataaacctatttgaggaagtgctcaaccacatttcattcttctggagtagaactgtgccttgcaatcctagaggaaaaagtggtttaagaaggaattgttttctttttaatatatttaactgaattcaagccatacccacatcagcaacagcacctcttctactctccccgggttagaggggtggcaaaaatggcacggactaaaaggagaaatggatattccagcaaagtctctaactgcagcctgtagacaatttgctattaaagattcagtgcacaaaatatagctaacagcttttaaatttttacttttaaccagtctggggatttgcttgcctggtgagtctcatatgccatattatgaatatgaaaataatgaagttaatttcctgttgcctttctgtgtcagccacaatatcaggtctaaccctaatccagggatgccagtaaactgaaggcaattttaggttgtagaactcagattaattgtagaaaccattaattttaattgctctaattttcatagtaatcataaaaagtatgcaagtacctaatatataaactcaattgacactgtatctgtagaagtaaatttttaatggctggttaattatatcactacattttattgcaatatagtactcatttaagcacttaaaaatggaaggtgtacaaagattaaattaagacacggtaaattgactaaatatttggtttttatataaataaaggtcataaccacaccgttaaaaaaaaa

SEQ ID NO: 374497 - DNA, 1001 bp, Homo sapiens
tttttttttttaatttaaaggctttttattaggaaccaggggaatgagctgctgtccagtttttgaataatgcttggggaatccaaaaaaaacaaaatgccaagaggtttaaaagacggtggatggtcagaaagatgaaaactaagaagtaaatcaatgctaaatgaagaatctgtactttgtatgtatagaatttatctaataaatcattcatagatcattttaaaggatcattataaaaatcataaacctatttgaggaagtgctcaaccacatttcattcttctggagtagaactgtgccttgcaatcctagaggaaaaagtggtttaagaaggaattgttttctttttaatatatttaactgaattcaagccatacccacatcagcaacagcacctcttctactctccccgggttagaggggtggcaaaaatggcacggactaaaaggagaaatggatattccagcaaagtctctaactgcagcctgtagacaatttgctattaaagattcagtgcacaaaatatagctaacagcttttaaatttttacttttaaccagtctggggatttgcttgcctggtgagtctcatatgccatattatgaatatgaaaataatgaagttaatttcctgttgcctttctgtgtcagccacaatatcaggtctaaccctaatccagggatgccagtaaactgaaggcaattttaggttgtagaactcagattaattgtagaaaccattaattttaattgctctaattttcatagtaatcataaaaagtatgcaagtacctaatatataaactcaattgacactgtatctgtagaagtaaatttttaatggctggttaattatatcactacattttattgcaatatagtactcatttaagcacttaaaaatggaaggtgtacaaagattaaattaagacacggtaaattgactaaatatttggtttttatataaataaaggtcataaccacaccgttaaaaaaaaa

SEQ ID NO: 374498 - DNA, 2661 bp, Homo sapiens
cctgaagtgattacatacttggaccacatcacctcagccccttgcaaaattgcatttaatgttacacccttggcttttgtagaaacaggcagcaagacactatcatataaaactttgtactgcattgcaaggcataacctttaataaatcccagtggtcctttgtgtagggaacggggatgctcatagcctatggggcggctggagaaccagtcagggaccctgagggctcgatgtacactttacatgggtgggccaaggagtttacactgagggcactggtaatacctgtaatagtcttatagtacttataaagcagttttgcacataaaataccatcatgcacttataagtttgttcttgggctgctccaagttaactttattcattttcctagtgttagtgtctcagggagtctgattatatttttgatttgtaatttctatctgactaaggcctagagatttcaaaactgttctttgcaattcctctcatactgaacctctggttcagcagctttttttgttgttgttgttttcaagttttatcatttttgttcctatttggttttgtcgtttttaaattgagaattgcttctaaaacagaagacatgaaaagagaattaaaaatacaatatatgtgtaagatagaattattcaacttagcatttattaaacatctaccagatgatagacattagaaataaaatgactagcaagacctggcccttcccctcaggggttcacagaatggctggagcaactgtcatataagctgttatgaagtgcagaaactacacagacatttgtgcgggttcagaccagcgcaattagagatgggcagagtgggatggggtaggggtaaggtgcttgaaatttgcctgggtgggaatttttgaagtataaaaaggacttctacctggggggctgcggcagtagagggaagagcacggtcggtacaaatgcatggcaggtgtgaaacagtttgatttgttcaaagaatgatgaatcacttagtgttgtataatggatgggaggagagaaacacagcgatcacaaagggccatgtttgccaagaaataaaatatacttggaaaaaaagtacgtatgtgtatataccacaaaactcgggtgcattctctagggaccggcgaagccattctttcaggagatatgctcagcatttgccacgggccagctgctgttccaggtcgtgggttagggcccggcaccaggaagggcgcccctcccacagggccgacatcctaaccggcgtcgctgcggccgcggagctgggaaggccgagggcgccgggcacgtctgtgcagatttctttagagtccaggtctgtcgcccgcgtcttcgtcggtggcagcagggctgactggccacggcggccatctgctagagcgcatttcttcccatgaaacgccacctcctccgaagtgcggagcgaacgcagccaaatctacacaaagactgacaagctggatccactcgacggaacccagggccaaaaaacggcggcgagcagcgcctcgggcccgcgattaccggttttctgagcaccggacagcgtgagccgtgccagccctgtctcgccatcccagccgaggagggcagcgcgatggctcttccctgccttgaaatcaaccccattgccagccgctttcgccggcagagcattttccgtggggtccatccggctccaaggcggcctgcgctggccacgtggaaagaaacacgcccactgcctacaggccacgcccttcctcccttcgcgcatgcgccccacccgtcctgaggacctccgaacctgcagggggcgatgaaagtaggcttgcgctccgcttgtagctgcttccgggtcagaggtcagaggtcggtctagcgctgcgtgggccatggtgcagctccgaccgcgagcgtctcgcgccccggcgtcggcggaggcgatggtggacgagggccagctggcctcggaggaggaggaggcggagcacgggctgttgctcgggcagcccagcagcggcgcggccgccgagcccctggaggaagacgaggaaggggacgatgagtttgacgatgaggccccggaggagctgactttcgccagcgcccaggcggaagcgagagaagaggagcggcgagtgcgggagaccgtgcgcagggataaaacgctcctgaaggagaagaggaagcgacgcgaggagctgttcatcgaacagaagaaaagaaaactccttccagacactattttggagaagttaaccacagcttcacagactaacatcaagaaatcgccaggaaaggtgaaagaaggtatgactattctaatttaactaacttctcatgtaagtgtcaagtgcacttgcagatgtttccagtcaaatatgaatggcccttagaaagccagcatgggcctggccaaggttagctggggcctattccctgtatttcatacaaataaaaactgcatccacattggtgtgtagtggatgcttaaagtgaactccagtaaatttcctgatttatttttacgtgaatgctaattagaaaatgtaactctattttttagttaatttgcaaaagaaaaatgaagactgtggtaatgagtcttttgtttcatttgggatgtaaaggagacctttaagagagttaaa

SEQ ID NO: 374499 - DNA, 2794 bp, Homo sapiens
cctgaagtgattacatacttggaccacatcacctcagccccttgcaaaattgcatttaatgttacacccttggcttttgtagaaacaggcagcaagacactatcatataaaactttgtactgcattgcaaggcataacctttaataaatcccagtggtcctttgtgtagggaacggggatgctcatagcctatggggcggctggagaaccagtcagggaccctgagggctcgatgtacactttacatgggtgggccaaggagtttacactgagggcactggtaatacctgtaatagtcttatagtacttataaagcagttttgcacataaaataccatcatgcacttataagtttgttcttgggctgctccaagttaactttattcattttcctagtgttagtgtctcagggagtctgattatatttttgatttgtaatttctatctgactaaggcctagagatttcaaaactgttctttgcaattcctctcatactgaacctctggttcagcagctttttttgttgttgttgttttcaagttttatcatttttgttcctatttggttttgtcgtttttaaattgagaattgcttctaaaacagaagacatgaaaagagaattaaaaatacaatatatgtgtaagatagaattattcaacttagcatttattaaacatctaccagatgatagacattagaaataaaatgactagcaagacctggcccttcccctcaggggttcacagaatggctggagcaactgtcatataagctgttatgaagtgcagaaactacacagacatttgtgcgggttcagaccagcgcaattagagatgggcagagtgggatggggtaggggtaaggtgcttgaaatttgcctgggtgggaatttttgaagtataaaaaggacttctacctggggggctgcggcagtagagggaagagcacggtcggtacaaatgcatggcaggtgtgaaacagtttgatttgttcaaagaatgatgaatcacttagtgttgtataatggatgggaggagagaaacacagcgatcacaaagggccatgtttgccaagaaataaaatatacttggaaaaaaagtacgtatgtgtatataccacaaaactcgggtgcattctctagggaccggcgaagccattctttcaggagatatgctcagcatttgccacgggccagctgctgttccaggtcgtgggttagggcccggcaccaggaagggcgcccctcccacagggccgacatcctaaccggcgtcgctgcggccgcggagctgggaaggccgagggcgccgggcacgtctgtgcagatttctttagagtccaggtctgtcgcccgcgtcttcgtcggtggcagcagggctgactggccacggcggccatctgctagagcgcatttcttcccatgaaacgccacctcctccgaagtgcggagcgaacgcagccaaatctacacaaagactgacaagctggatccactcgacggaacccagggccaaaaaacggcggcgagcagcgcctcgggcccgcgattaccggttttctgagcaccggacagcgtgagccgtgccagccctgtctcgccatcccagccgaggagggcagcgcgatggctcttccctgccttgaaatcaaccccattgccagccgctttcgccggcagagcattttccgtggggtccatccggctccaaggcggcctgcgctggccacgtggaaagaaacacgcccactgcctacaggccacgcccttcctcccttcgcgcatgcgccccacccgtcctgaggacctccgaacctgcagggggcgatgaaagtaggcttgcgctccgcttgtagctgcttccgggtcagaggtcagaggtcggtctagcgctgcgtgggccatggtgcagctccgaccgcgagcgtctcgcgccccggcgtcggcggaggcgatggtggacgagggccagctggcctcggaggaggaggaggcggagcacgggctgttgctcgggcagcccagcagcggcgcggccgccgagcccctggaggaagacgaggaaggggacgatgagtttgacgatgaggccccggaggagctgactttcgccagcgcccaggcggaagcgagagaagaggagcggcgagtgcgggagaccgtgcgcaggttcggagcccgctgcccggcggggagaaccgccctttctcgtcccgcttgtccttccctttgctgacttatcacccttcctcccagggataaaacgctcctgaaggagaagaggaagcgacgcgaggagctgttcatcgaacagaaggttagaggctagggaggaggtgtcttattaaaacaactcggctcagggagaattcctatggtggatgtaatttgggttggcaggatattggagtggggaaacagtcaccaagattgcctctgacagtggtggaaagatgctcgggccgggcgcggcagtactttagttggacgaggtgggcggagcccgggatgtcgaggctgcctggagccgagatcacaccactgcgctccagcctgggcgacagagcgagaccctgtctcaaaaaaaaaaagttcgtctcctttagtgtccaccaactgaaaataagaggttgctgtgagaattaaatgaggtgatttgtaaactgtaagggctgtacagacttagtgtatggttgctttgctgtctgatactcgacacagagagctggctccaggcagacattacttaactgctttcaatttataacagtgacctgagggttagaataccgtgg

SEQ ID NO: 374500 - DNA, 917 bp, Homo sapiens
ttcgactggagcacgaggacactgacatggactgaaggagtagaaagtcagggtcggtctagcgctgcgtgggccatggtgcagctccgaccgcgagcgtctcgcgccccggcgtcggcggaggcgatggtggacgagggccagctggcctcggaggaggaggaggcggagcacgggctgttgctcgggcagcccagcagcggcgcggccgccgagcccctggaggaagacgaggaaggggacgatgagtttgacgatgaggccccggaggagctgactttcgccagcgcccaggcggaagcgagagaagaggagcggcgagtgcgggagaccgtgcgcagggataaaacgctcctgaaggagaagaggaagcgacgcgaggagctgttcatcgaacagaagaaaagaaaactccttccagacactattttggagaagttaaccacagcttcacagactaacatcaagaaatcgccaggaaaggtgaaagaagttaatttgcaaaagaaaaatgaagactgtgaaaaaggaaatgactccaagaaagttaaagtacaaaaagtacagtctgtcagccagaataaaagctacttggccgtaaggctaaaagaccaagatctgagagattcaaggcaacaagcagcacaagccttcatacataattcattatatgggccaggaaccaacaggactactgtaaataagttcctgtctcttgccaacaagaggttaccagtgaaaagagctgctgtccagtttttgaataatgcttggggaatccaaaaaaaacaaaatgccaagaggtttaaaagacggtggatggtcagaaagatgaaaactaagaagtaaatcaatgctaaatgaagaatctgtactttgtatgtatagaatttatctaataaatcattcatagatca

SEQ ID NO: 374501 - DNA, 2744 bp, Homo sapiens
cctgaagtgattacatacttggaccacatcacctcagccccttgcaaaattgcatttaatgttacacccttggcttttgtagaaacaggcagcaagacactatcatataaaactttgtactgcattgcaaggcataacctttaataaatcccagtggtcctttgtgtagggaacggggatgctcatagcctatggggcggctggagaaccagtcagggaccctgagggctcgatgtacactttacatgggtgggccaaggagtttacactgagggcactggtaatacctgtaatagtcttatagtacttataaagcagttttgcacataaaataccatcatgcacttataagtttgttcttgggctgctccaagttaactttattcattttcctagtgttagtgtctcagggagtctgattatatttttgatttgtaatttctatctgactaaggcctagagatttcaaaactgttctttgcaattcctctcatactgaacctctggttcagcagctttttttgttgttgttgttttcaagttttatcatttttgttcctatttggttttgtcgtttttaaattgagaattgcttctaaaacagaagacatgaaaagagaattaaaaatacaatatatgtgtaagatagaattattcaacttagcatttattaaacatctaccagatgatagacattagaaataaaatgactagcaagacctggcccttcccctcaggggttcacagaatggctggagcaactgtcatataagctgttatgaagtgcagaaactacacagacatttgtgcgggttcagaccagcgcaattagagatgggcagagtgggatggggtaggggtaaggtgcttgaaatttgcctgggtgggaatttttgaagtataaaaaggacttctacctggggggctgcggcagtagagggaagagcacggtcggtacaaatgcatggcaggtgtgaaacagtttgatttgttcaaagaatgatgaatcacttagtgttgtataatggatgggaggagagaaacacagcgatcacaaagggccatgtttgccaagaaataaaatatacttggaaaaaaagtacgtatgtgtatataccacaaaactcgggtgcattctctagggaccggcgaagccattctttcaggagatatgctcagcatttgccacgggccagctgctgttccaggtcgtgggttagggcccggcaccaggaagggcgcccctcccacagggccgacatcctaaccggcgtcgctgcggccgcggagctgggaaggccgagggcgccgggcacgtctgtgcagatttctttagagtccaggtctgtcgcccgcgtcttcgtcggtggcagcagggctgactggccacggcggccatctgctagagcgcatttcttcccatgaaacgccacctcctccgaagtgcggagcgaacgcagccaaatctacacaaagactgacaagctggatccactcgacggaacccagggccaaaaaacggcggcgagcagcgcctcgggcccgcgattaccggttttctgagcaccggacagcgtgagccgtgccagccctgtctcgccatcccagccgaggagggcagcgcgatggctcttccctgccttgaaatcaaccccattgccagccgctttcgccggcagagcattttccgtggggtccatccggctccaaggcggcctgcgctggccacgtggaaagaaacacgcccactgcctacaggccacgcccttcctcccttcgcgcatgcgccccacccgtcctgaggacctccgaacctgcagggggcgatgaaagtaggcttgcgctccgcttgtagctgcttccgggtcagaggtcagaggtcggtctagcgctgcgtgggccatggtgcagctccgaccgcgagcgtctcgcgccccggcgtcggcggaggcgatggtggacgagggccagctggcctcggaggaggaggaggcggagcacgggctgttgctcgggcagcccagcagcggcgcggccgccgagcccctggaggaagacgaggaaggggacgatgagtttgacgatgaggccccggaggagctgactttcgccagcgcccaggcggaagcgagagaagaggagcggcgagtgcgggagaccgtgcgcagggataaaacgctcctgaaggagaagaggaagcgacgcgaggagctgttcatcgaacagaagaaaagaaaactccttccagacactattttggagaagttaaccacagcttcacagactaacatcaagaaatcgccaggaaaggtgaaagaagttaatttgcaaaagaaaaatgaagactgtgaaaaaggaaatgactccaagaaagttaaagtacaaaaagtacagtctgtcagccagaataaaagctacttggccgtaaggctaaaagaccaagatctgagagattcaaggcaacaagcagcacaagccttcatacataattcattatatgggccaggaaccaacaggactactgtaaataagttcctgtctcttgccaacaagaggttaccagtgaaaagagctgctgtccagtttttgaataatgcttggggaatccaaaaaaaacaaaatgccaagaggtttaaaagacggtggatggtcagaaagatgaaaactaagaagtaaatcaatgctaaatgaagaatctgtactttgtatgtatagaatttatctaataaatcattcatagatca

SEQ ID NO: 374502 - DNA, 3153 bp, Homo sapiens
cctgaagtgattacatacttggaccacatcacctcagccccttgcaaaattgcatttaatgttacacccttggcttttgtagaaacaggcagcaagacactatcatataaaactttgtactgcattgcaaggcataacctttaataaatcccagtggtcctttgtgtagggaacggggatgctcatagcctatggggcggctggagaaccagtcagggaccctgagggctcgatgtacactttacatgggtgggccaaggagtttacactgagggcactggtaatacctgtaatagtcttatagtacttataaagcagttttgcacataaaataccatcatgcacttataagtttgttcttgggctgctccaagttaactttattcattttcctagtgttagtgtctcagggagtctgattatatttttgatttgtaatttctatctgactaaggcctagagatttcaaaactgttctttgcaattcctctcatactgaacctctggttcagcagctttttttgttgttgttgttttcaagttttatcatttttgttcctatttggttttgtcgtttttaaattgagaattgcttctaaaacagaagacatgaaaagagaattaaaaatacaatatatgtgtaagatagaattattcaacttagcatttattaaacatctaccagatgatagacattagaaataaaatgactagcaagacctggcccttcccctcaggggttcacagaatggctggagcaactgtcatataagctgttatgaagtgcagaaactacacagacatttgtgcgggttcagaccagcgcaattagagatgggcagagtgggatggggtaggggtaaggtgcttgaaatttgcctgggtgggaatttttgaagtataaaaaggacttctacctggggggctgcggcagtagagggaagagcacggtcggtacaaatgcatggcaggtgtgaaacagtttgatttgttcaaagaatgatgaatcacttagtgttgtataatggatgggaggagagaaacacagcgatcacaaagggccatgtttgccaagaaataaaatatacttggaaaaaaagtacgtatgtgtatataccacaaaactcgggtgcattctctagggaccggcgaagccattctttcaggagatatgctcagcatttgccacgggccagctgctgttccaggtcgtgggttagggcccggcaccaggaagggcgcccctcccacagggccgacatcctaaccggcgtcgctgcggccgcggagctgggaaggccgagggcgccgggcacgtctgtgcagatttctttagagtccaggtctgtcgcccgcgtcttcgtcggtggcagcagggctgactggccacggcggccatctgctagagcgcatttcttcccatgaaacgccacctcctccgaagtgcggagcgaacgcagccaaatctacacaaagactgacaagctggatccactcgacggaacccagggccaaaaaacggcggcgagcagcgcctcgggcccgcgattaccggttttctgagcaccggacagcgtgagccgtgccagccctgtctcgccatcccagccgaggagggcagcgcgatggctcttccctgccttgaaatcaaccccattgccagccgctttcgccggcagagcattttccgtggggtccatccggctccaaggcggcctgcgctggccacgtggaaagaaacacgcccactgcctacaggccacgcccttcctcccttcgcgcatgcgccccacccgtcctgaggacctccgaacctgcagggggcgatgaaagtaggcttgcgctccgcttgtagctgcttccgggtcagaggtcagaggtcggtctagcgctgcgtgggccatggtgcagctccgaccgcgagcgtctcgcgccccggcgtcggcggaggcgatggtggacgagggccagctggcctcggaggaggaggaggcggagcacgggctgttgctcgggcagcccagcagcggcgcggccgccgagcccctggaggaagacgaggaaggggacgatgagtttgacgatgaggccccggaggagctgactttcgccagcgcccaggcggaagcgagagaagaggagcggcgagtgcgggagaccgtgcgcagggataaaacgctcctgaaggagaagaggaagcgacgcgaggagctgttcatcgaacagaagaaaagaaaactccttccagacactattttggagaagttaaccacagcttcacagactaacatcaagaaatcgccaggaaaggtgaaagaagttaatttgcaaaagaaaaatgaagactgtgaaaaaggaaatgactccaagaaagttaaagtacaaaaagtacagtctgtcagccagaataaaagctacttggccgtaaggctaaaagaccaagatctgagagattcaaggcaacaagcagcacaagccttcatacataattcattatatgggccaggaaccaacaggactactgtaaataagttcctgtctcttgccaacaagaggttaccagtgaaaagagctgctgtccagtttttgaataatgcttggggaatccaaaaaaaacaaaatgccaagaggtttaaaagacggtggatggtcagaaagatgaaaactaagaagtaaatcaatgctaaatgaagaatctgtacttttgttcttgccacagtctctccttagctgttcactcattgcttgcagctctcgtccaaagtggatcattctttctatggcggcctgacttcctccacacaactggcgtctcaactgacttgaatcaacttctgtaagaaaaacagacaagtattttactaccttatggaatggagtataatgaggacacgaacatacatttcttataccattttgtacatttagtaactattccctaatatttcatctaaatatgcagattgttaaaaattcatttttaatatgaaactgcagctaaaagatatactttatttagctctcaagagtctaggatccagtattcagcatgcagttgagaggggacaacctttcagtgttagagggtacttatgtcagaaaaaaattttagaaaaagtataattccctaaaactacattaagcaacatttaa

SEQ ID NO: 374503 - DNA, 2631 bp, Homo sapiens
cctgaagtgattacatacttggaccacatcacctcagccccttgcaaaattgcatttaatgttacacccttggcttttgtagaaacaggcagcaagacactatcatataaaactttgtactgcattgcaaggcataacctttaataaatcccagtggtcctttgtgtagggaacggggatgctcatagcctatggggcggctggagaaccagtcagggaccctgagggctcgatgtacactttacatgggtgggccaaggagtttacactgagggcactggtaatacctgtaatagtcttatagtacttataaagcagttttgcacataaaataccatcatgcacttataagtttgttcttgggctgctccaagttaactttattcattttcctagtgttagtgtctcagggagtctgattatatttttgatttgtaatttctatctgactaaggcctagagatttcaaaactgttctttgcaattcctctcatactgaacctctggttcagcagctttttttgttgttgttgttttcaagttttatcatttttgttcctatttggttttgtcgtttttaaattgagaattgcttctaaaacagaagacatgaaaagagaattaaaaatacaatatatgtgtaagatagaattattcaacttagcatttattaaacatctaccagatgatagacattagaaataaaatgactagcaagacctggcccttcccctcaggggttcacagaatggctggagcaactgtcatataagctgttatgaagtgcagaaactacacagacatttgtgcgggttcagaccagcgcaattagagatgggcagagtgggatggggtaggggtaaggtgcttgaaatttgcctgggtgggaatttttgaagtataaaaaggacttctacctggggggctgcggcagtagagggaagagcacggtcggtacaaatgcatggcaggtgtgaaacagtttgatttgttcaaagaatgatgaatcacttagtgttgtataatggatgggaggagagaaacacagcgatcacaaagggccatgtttgccaagaaataaaatatacttggaaaaaaagtacgtatgtgtatataccacaaaactcgggtgcattctctagggaccggcgaagccattctttcaggagatatgctcagcatttgccacgggccagctgctgttccaggtcgtgggttagggcccggcaccaggaagggcgcccctcccacagggccgacatcctaaccggcgtcgctgcggccgcggagctgggaaggccgagggcgccgggcacgtctgtgcagatttctttagagtccaggtctgtcgcccgcgtcttcgtcggtggcagcagggctgactggccacggcggccatctgctagagcgcatttcttcccatgaaacgccacctcctccgaagtgcggagcgaacgcagccaaatctacacaaagactgacaagctggatccactcgacggaacccagggccaaaaaacggcggcgagcagcgcctcgggcccgcgattaccggttttctgagcaccggacagcgtgagccgtgccagccctgtctcgccatcccagccgaggagggcagcgcgatggctcttccctgccttgaaatcaaccccattgccagccgctttcgccggcagagcattttccgtggggtccatccggctccaaggcggcctgcgctggccacgtggaaagaaacacgcccactgcctacaggccacgcccttcctcccttcgcgcatgcgccccacccgtcctgaggacctccgaacctgcagggggcgatgaaagtaggcttgcgctccgcttgtagctgcttccgggtcagaggtcagaggtcggtctagcgctgcgtgggccatggtgcagctccgaccgcgagcgtctcgcgccccggcgtcggcggaggcgatggtggacgagggccagctggcctcggaggaggaggaggcggagcacgggctgttgctcgggcagcccagcagcggcgcggccgccgagcccctggaggaagacgaggaaggggacgatgagtttgacgatgaggccccggaggagctgactttcgccagcgcccaggcggaagcgagagaagaggagcggcgagtgcgggagaccgtgcgcagggataaaacgctcctgaaggagaagaggaagcgacgcgaggagctgttcatcgaacagaagaaaagaaaactccttccagacactattttggagaagttaaccacagcttcacagactaacatcaagaaatcgccaggaaaggtgaaagaagttaatttgcaaaagaaaaatgaagactgtgaaaaaggaaatgactccaagaaagttaaagtacaaaaagtacagtctgtcagccagaataaaagctacttggccgtaaggctaaaagaccaagatctgagagattcaaggcaacaagcagcacaagccttcatacataattcattatatgggccaggaaccaacaggactactgaaatagtttctgttttggcaacagggttccgttgaagagtgtgccgttttgaataggtgggaatcaacaatgcaagttacgaggtgtgtgaagataatttatcagag

SEQ ID NO: 374504 - DNA, 2360 bp, Homo sapiens
cctgaagtgattacatacttggaccacatcacctcagccccttgcaaaattgcatttaatgttacacccttggcttttgtagaaacaggcagcaagacactatcatataaaactttgtactgcattgcaaggcataacctttaataaatcccagtggtcctttgtgtagggaacggggatgctcatagcctatggggcggctggagaaccagtcagggaccctgagggctcgatgtacactttacatgggtgggccaaggagtttacactgagggcactggtaatacctgtaatagtcttatagtacttataaagcagttttgcacataaaataccatcatgcacttataagtttgttcttgggctgctccaagttaactttattcattttcctagtgttagtgtctcagggagtctgattatatttttgatttgtaatttctatctgactaaggcctagagatttcaaaactgttctttgcaattcctctcatactgaacctctggttcagcagctttttttgttgttgttgttttcaagttttatcatttttgttcctatttggttttgtcgtttttaaattgagaattgcttctaaaacagaagacatgaaaagagaattaaaaatacaatatatgtgtaagatagaattattcaacttagcatttattaaacatctaccagatgatagacattagaaataaaatgactagcaagacctggcccttcccctcaggggttcacagaatggctggagcaactgtcatataagctgttatgaagtgcagaaactacacagacatttgtgcgggttcagaccagcgcaattagagatgggcagagtgggatggggtaggggtaaggtgcttgaaatttgcctgggtgggaatttttgaagtataaaaaggacttctacctggggggctgcggcagtagagggaagagcacggtcggtacaaatgcatggcaggtgtgaaacagtttgatttgttcaaagaatgatgaatcacttagtgttgtataatggatgggaggagagaaacacagcgatcacaaagggccatgtttgccaagaaataaaatatacttggaaaaaaagtacgtatgtgtatataccacaaaactcgggtgcattctctagggaccggcgaagccattctttcaggagatatgctcagcatttgccacgggccagctgctgttccaggtcgtgggttagggcccggcaccaggaagggcgcccctcccacagggccgacatcctaaccggcgtcgctgcggccgcggagctgggaaggccgagggcgccgggcacgtctgtgcagatttctttagagtccaggtctgtcgcccgcgtcttcgtcggtggcagcagggctgactggccacggcggccatctgctagagcgcatttcttcccatgaaacgccacctcctccgaagtgcggagcgaacgcagccaaatctacacaaagactgacaagctggatccactcgacggaacccagggccaaaaaacggcggcgagcagcgcctcgggcccgcgattaccggttttctgagcaccggacagcgtgagccgtgccagccctgtctcgccatcccagccgaggagggcagcgcgatggctcttccctgccttgaaatcaaccccattgccagccgctttcgccggcagagcattttccgtggggtccatccggctccaaggcggcctgcgctggccacgtggaaagaaacacgcccactgcctacaggccacgcccttcctcccttcgcgcatgcgccccacccgtcctgaggacctccgaacctgcagggggcgatgaaagtaggcttgcgctccgcttgtagctgcttccgggtcagaggtcagaggtcggtctagcgctgcgtgggccatggtgcagctccgaccgcgagcgtctcgcgccccggcgtcggcggaggcgatggtggacgagggccagctggcctcggaggaggaggaggcggagcacgggctgttgctcgggcagcccagcagcggcgcggccgccgagcccctggaggaagacgaggaaggggacgatgagtttgacgatgaggccccggaggagctgactttcgccagcgcccaggcggaagcgagagaagaggagcggcgagtgcgggagaccgtgcgcagggataaaacgctcctgaaggagaagaggaagcgacgcgaggagctgttcatcgaacagaagaaaagaaaactccttccagacactattttggagaagttaaccacagcttcacagactaacatcaagaaatcgcaggaaaggtgaaagaagttaatttgcaaaaaaaaaaattaaaatttaaaaaaaaaagc

SEQ ID NO: 374505 - DNA, 580 bp, Homo sapiens
catagatcctaggagacagggattttttttcttttcatttgacctaacccagggactgcttgagcactatttattccctatatccttgcctttcacaaccaacaaacctatctgtatgtggcactgtgccaagtactgtagtccataagttaaaaatatatatatcggccaggtgcagtggctcacgcctgtaatcccagctacttgggaggctgaggcagagaattgcttgaacccaggaggcggaggttgcagtgagccaagatcgcgccactgcactccagcctgggtgacagagcgagactccgtctcaaataaaaaacaacaaaaaacaaaaaaaacttaaaattctttgcttgttagtgaccttgatcatggttctctttgtacgatagttgggcatctgtatttccacttgtgtgaatttgcctttaaattttggttatgggtttcaccttttaaaataatcaaacatatttatcttttcctgtgtgataggtttttttctgtatcttttcctgttaaacacacagacccctccccaatctggacattgaataaatattcattttcctttgca

SEQ ID NO: 374506 - DNA, 390 bp, Homo sapiens
ttttttttttgagacagagtttcgctcttgttgcccaggctggagtgcaatggcggaggttgcagtgagccaagatcgcgccactgcactccagcctgggtgacagagcgagactccgtctcaaataaaaaacaacaaaaaacaaaaaaaacttaaaattctttgcttgttagtgaccttgatcatggttctctttgtacgatagttgggcatctgtatttccacttgtgtgaatttgcctttaaattttggttatgggtttcaccttttaaaataatcaaacatatttatcttttcctgtgtgataggtttttttctgtatcttttcctgttaaacacacagacccctccccaatctggacattgaataaatattcattttcctttgca

SEQ ID NO: 374507 - DNA, 379 bp, Homo sapiens
ctttactcctctgtccctccccttatctagtctcccgcattgacttcataaccaagttctgggtccctgcctctggagtgcctgatgagacaaaacggctcctcgtcctgcatccccgctgctacttccagaattcaggcctcgtggtctggagcctgcactgttccatgagcctcctgagcaacctggagtcctctgtctttcttccctcaggtctgtcgtccacattccatcggctcagtttctaagtcacaaatctgtccccagcaatcctctagtgaaaacgctgctgggccttctcaggtttaagtcctagcagttcagggagtcggctcagctctccccacccttaagcggaacagtctttgggttcacgctg

SEQ ID NO: 374508 - DNA, 833 bp, Homo sapiens
tgatgcctctgctgcctccttcatagggtgagagataggtttcagcatgggctctaaggagctgactgatcttgtccttgtgggtcccttccacagagcctagcacaaatcatcagggcttagggaccaggaagtcagatgcttagttctcaaatagaaactagagagtttggctttagaggggacttttgtagatgaggaaactgagccccaaagaagggaggttccacttgcccatttgtttacagagttttaattatggggagtggggtgttgaaagactcatcatgttttaacaacctttttttttttccaagggatatcttctaaccataccgatgattctccgtatagctggtcttttccaccttatcatccttcctctgagaagtatgaaaacactaaggtaaggctgtgaaagggacatttctgaagaggaaccactttttcctttgtcacataaactactgggtatactgcatgttctgtgaagctggttatataccacgaagttgtgggtttcatttgtgataatgttttgacagaagtaagtgttgggatcttcagcattaggcccgacagggaccgggggtcctctagaagccggggggggcacacggtccaaaacacgggggcccaacggggccaacccctggacccccggggcacccgggagaacgcaatgtggacaccacccagacggggggaggccctcgcccccacgggagagggcgaccgcctagccccgccacggcgtagaacaacaacagcgagcgagcaccaacagaccgcacacagcggggccacgacgcgactgctaccgcgcgcatagt

SEQ ID NO: 374509 - DNA, 399 bp, Homo sapiens
tgcgggtggtgttcggctaaccctgagaaagggaccagaatgcacctgagtcttgattttcattcccaatagcaggtcagcacgaaacccaaaaacgctctgatttctgccttccatgccacactctcttcacctgctgccttctcactcctctcattaacaatgtcctggcaggaacaagactttcccctccctctcttctcgtctcttagcaggtcaggtcggccttcacctccctagacccgtcctgctcctgccttcccctgtggggccctccatggatgctctggagtcccgggcaatagtcagccaactgcagacatgcggggccttcttgggttccttgctgtgctcccttgaaaccactgtgcctgactgcaccccagtagcacacactga

SEQ ID NO: 374510 - DNA, 6086 bp, Homo sapiens
  misc_feature (248)..(248): n is a, c, g, or t
ttataaaaagaaggaagggcagggcttccaggtgaaaggcatagcacaagcaaaggcaaaaagacgggtaactgctagttgttaagggcagtggctgaatcgctatacccctagcagttctacacctaggggcctgcgggccgctgggtctgcgaagcttgcaaggcaactggcccgcccccgctctgcgcctgtctctcggccacgcctattgctgcaggatgacgcgcacctctagaacccgcccnggagggtgagtgggacgcagggaagagtcgcacggacgcactcgcgctgcggccagcgcccgggcctgcgggcccgggcggcggctgtgttgcgcagtcttcatgggttcccgacgaggaggtctctgtggctgcggcggcggctgctaactgcgccacctgctgcagcctgtccccgccgctctgaagcggccgcgtcgaagccgaaatgccgccaccccggaccggccgaggccttctctggctgggtctggttctgagctccgtctgcgtcgccctcggatccgaaacgcaggccaactcgaccacagatgctctgaacgttcttctcatcatcgtggatgacctgcgcccctccctgggctgttatggggataagctggtgaggtccccaaatattgaccaactggcatcccacagcctcctcttccagaatgcctttgcgcagcaagcagtgtgcgccccgagccgcgtttctttcctcactggcaggagacctgacaccacccgcctgtacgacttcaactcctactggagggtgcacgctggaaacttctccaccatcccccagtacttcaaggagaatggctatgtgaccatgtcggtgggaaaagtctttcaccctgggatatcttctaaccataccgatgattctccgtatagctggtcttttccaccttatcatccttcctctgagaagtatgaaaacactaagacatgtcgagggccagatggagaactccatgccaacctgctttgccctgtggatgtgctggatgttcccgagggcaccttgcctgacaaacagagcactgagcaagccatacagttgttggaaaagatgaaaacgtcagccagtcctttcttcctggccgttgggtatcataagccacacatccccttcagataccccaaggaatttcagaagttgtatcccttggagaacatcaccctggcccccgatcccgaggtccctgatggcctaccccctgtggcctacaacccctggatggacatcaggcaacgggaagacgtccaagccttaaacatcagtgtgccgtatggtccaattcctgtggactttcagcggaaaatccgccagagctactttgcctctgtgtcatatttggatacacaggtcggccgcctcttgagtgctttggacgatcttcagctggccaacagcaccatcattgcatttacctcggatcatgggtgggctctaggtgaacatggagaatgggccaaatacagcaattttgatgttgctacccatgttcccctgatattctatgttcctggaaggacggcttcacttccggaggcaggcgagaagcttttcccttacctcgacccttttgattccgcctcacagttgatggagccaggcaggcaatccatggaccttgtggaacttgtgtctctttttcccacgctggctggacttgcaggactgcaggttccacctcgctgccccgttccttcatttcacgttgagctgtgcagagaaggcaagaaccttctgaagcattttcgattccgtgacttggaagaggatccgtacctccctggtaatccccgtgaactgattgcctatagccagtatccccggccttcagacatccctcagtggaattctgacaagccgagtttaaaagatataaagatcatgggctattccatacgcaccatagactataggtatactgtgtgggttggcttcaatcctgatgaatttctagctaacttttctgacatccatgcaggggaactgtattttgtggattctgacccattgcaggatcacaatatgtataatgattcccaaggtggagatcttttccagttgttgatgccttgagttttgccaaccatggatggcaaatgtgatgtgctcccttccagctggtgagaggaggagttagagctggtcgttttgtgattacccataatattggaagcagcctgagggctagttaatccaaacatgcatcaacaatttggcctgagaatatgtaacagccaaaccttttcgtttagtctttattaaaatttataattggtaattggaccagttttttttttaatttccctctttttaaaacagttacggcttatttactgaataaatacaaagcaaacaaactcaagttatgtcatacctttggatacgaagaccatacataataaccaaacataacattatacacaaagaatactttcattatttgtggaatttagtgcatttcaaaaagtaatcatatatcaaactaggcaccacactaagttcctgattattttgtttataatttaataatatatcttatgagccctatatattcaaaatattatgttaacatgtaatccatgtttctttttcaaatctaaagttaaaaaaaaatagcagaagccagtgtcttaaagtctatcttttgtttctaagaccatgggatttcataatctcaagataaaatatgtatgaagtaattaatgtagaatttttacaccaaataataaataatgcttaataaactagagatatgagatgtgtaggaaatttggttaaacttttttcagatactttctggcccaaataataatttgttagcaaataatatgacccttgaactcaatggccatctattaaaagactgttgttcacactggaaaacatttaaagatgtgactatatccatgggtggattgaatcactcaaaatatattagtatccttctttagggatggttggttacagacatgtatttattcaggaggcagaaaatattccattttaattgcttattaaagaaaacattaaattctaaattattttgaggactgtgaagacttttcattagtgtaatattaggtcattgtcaatctcccagaatgtagttctatattctctaaatatgaaagtatccagaaaggccagtggtagtaaaaagcttagtgtatataatctcaaaagggatggaatatttacagctcatatttataacatgttgaatcttctcagttatcagtagtcatcagaagtgtcaatagctttctaaataaatattaaatatctactgtcctgtagtgaaggagtaatttttagtaattttctctttacaaagtctccagtgtttccaggtaaatatttgtgaaacaaaatacagcaaactacattgttacttcagtgtattgttgccaaaaatgacaagatattatattaaaatcagtaaattttagacagattttaaaaattaattagcctacaatagaggttatatggtaacacggtgatcttctaagcagttaagtgactgactgttctggcaacaacgacttctccgtgactgaagggccctgttcatttcctgatcctgaagctcgtctctcttttgagcctccgcttgctttggtcgatggtttccctcagctttttctttgctgttcttcatcctcgttgttgctgtcatcatgttcactgtggcttttacaatacagcctgtaaattccttatgacatagttcagtgcatttggctttatcgcctgctccacagttctttacctttacttggcttagagaaactgtatctttgttgcttcatataacctttccccaaccccactaagctggacataacttattagtggtcctcccgtcactttatttgtagaaatctctctttcacatgagcaggggttctttcatgtggtttagctgacagcagaactagtgattctagacattttgcatggccctcattcagtggctcacaaacatgagggagcatcagaactacttgaggggcttgttaaaacccagtgcgttagaagtcggatgcggtggctcacacctgtaatcccagcactttgggaggcccaggcaggcggatcacttgaggttaggagttcaagaccagcctggccaacatggtgaaaccccgtctctactaaaaatacaaaagttagccgggtgtggtggtgcatgcctgtaatcccagcttcttgggaggccaaggcacaagaatcgcttgaaccaggagacggaggtttcagtgaatgaagatcgtgccattgtattccagcctcggcaacacagcaggactgtgattttctttggagactcctagattttctgtggttttgaactgaatttgttggatgttggcaagtgcctcttatgagctgtttctttatcctgcatttgccccacaaagacttatctggaggtgagcaaagtatgtttggtagtgaggtcacaaaggcaatcagccccttcctccccactcccattgccatcttctcagtccttctccctttctttccaagtagtttacccacccctcctctttcctcccctgtccctaaaataatccacgtgtcttcctaaaatctctctttgatcctgtcctttgataacaccgtcagtgcctactactgggtctagacagacctctgttgagcagtcagagtcttccctgactccacaatgcccctttccttggctgaccagtatgactactggtccccacctttcccttgcctatccctacctccctcctactaggttgtcccatccctctcttcacccattcattcatgaccatttttcactaccaagctccccccctcccgaaggaggctgaggtttttgtgactctctagactctattgtgggatggaatgaacattgctaaagaatcttgtgttcgctttactttaaaaaggtatttttttcctaattataaaactgatgtgtcagttacggaaaaattagaaatgcagcacaaatacatgaatattttaccacgaaattgccatataatatcttgtcttttttgggggtgtgaattttttgcattgttctgatcatattctttatcatgtaatttatgttcttttttactaagtattatgtgtggttattatagattttcacaaagatatattgctggtaatatattttattgtgtagtcttataatttacttaaccttctttcaattgttagaaatttaggctatttccagattttcagtattgtaaataatgctgtgatgaccaattttgtgaataaaatgtttttatgtatttcagattattcccttaggatagtctctcagtgccaagttgtcaaaaacatctctattttgcttatcttcctgctctcttgctgccttagggggtagtaaactgaaacataaagtaaacatgcatacaaataaaaaacataaaacaaaaataagcaacctgatggtaataggtgaaagtggtaacctgttttaactttgaattcttgccgggcgcggtggctcacgcctgtaatcccagcactttgggaggctgaggcgggtggatcacgaggtcaggagttcaaaaccagcctggccaagatggtgaaatcccgtctctactaaaaatacaaaaattagccgggcgtggtggcgggcgcctgtaatcccagctacttgggaggctgaggcagagaattgcttgaacccaggaggcggaggttgcagtgagccaagatcgcgccactgcactccagcctgggtgacagagcgagactccgtctcaaataaaaaacaacaaaaaacaaaaaaaacttaaaattctttgcttgttagtgaccttgatcatggttctctttgtacgatagttgggcatctgtatttccacttgtgtgaatttgcctttaaattttggttatgggtttcaccttttaaaataatcaaacatatttatcttttcctgtgtgataggtttttttctgtatcttttcctgttaaacacacagacccctccccaatctggacattgaataaatattcattttcctttgca

SEQ ID NO: 374511 - DNA, 5922 bp, Homo sapiens
  misc_feature (138)..(138): n is a, c, g, or t
gcgatctagacctagttagccaagtctctaacgtgacatagggaaagcttgcaaggcaactggcccgcccccgctctgcgcctgtctctcggccacgcctattgctgcaggatgacgcgcacctctagaacccgcccnggagggtgagtgggacgcagggaagagtcgcacggacgcactcgcgctgcggccagcgcccgggcctgcgggcccgggcggcggctgtgttgcgcagtcttcatgggttcccgacgaggaggtctctgtggctgcggcggcggctgctaactgcgccacctgctgcagcctgtccccgccgctctgaagcggccgcgtcgaagccgaaatgccgccaccccggaccggccgaggccttctctggctgggtctggttctgagctccgtctgcgtcgccctcggatccgaaacgcaggccaactcgaccacagatgctctgaacgttcttctcatcatcgtggatgacctgcgcccctccctgggctgttatggggataagctggtgaggtccccaaatattgaccaactggcatcccacagcctcctcttccagaatgcctttgcgcagcaagcagtgtgcgccccgagccgcgtttctttcctcactggcaggagacctgacaccacccgcctgtacgacttcaactcctactggagggtgcacgctggaaacttctccaccatcccccagtacttcaaggagaatggctatgtgaccatgtcggtgggaaaagtctttcaccctgggatatcttctaaccataccgatgattctccgtatagctggtcttttccaccttatcatccttcctctgagaagtatgaaaacactaagacatgtcgagggccagatggagaactccatgccaacctgctttgccctgtggatgtgctggatgttcccgagggcaccttgcctgacaaacagagcactgagcaagccatacagttgttggaaaagatgaaaacgtcagccagtcctttcttcctggccgttgggtatcataagccacacatccccttcagataccccaaggaatttcagaagttgtatcccttggagaacatcaccctggcccccgatcccgaggtccctgatggcctaccccctgtggcctacaacccctggatggacatcaggcaacgggaagacgtccaagccttaaacatcagtgtgccgtatggtccaattcctgtggactttcagcggaaaatccgccagagctactttgcctctgtgtcatatttggatacacaggtcggccgcctcttgagtgctttggacgatcttcagctggccaacagcaccatcattgcatttacctcggatcatgggtgggctctaggtgaacatggagaatgggccaaatacagcaattttgatgttgctacccatgttcccctgatattctatgttcctggaaggacggcttcacttccggaggcaggcgagaagcttttcccttacctcgacccttttgattccgcctcacagttgatggagccaggcaggcaatccatggaccttgtggaacttgtgtctctttttcccacgctggctggacttgcaggactgcaggttccacctcgctgccccgttccttcatttcacgttgagctgtgcagagaaggcaagaaccttctgaagcattttcgattccgtgacttggaagaggatccgtacctccctggtaatccccgtgaactgattgcctatagccagtatccccggccttcagacatccctcagtggaattctgacaagccgagtttaaaagatataaagatcatgggctattccatacgcaccatagactataggtatactgtgtgggttggcttcaatcctgatgaatttctagctaacttttctgacatccatgcaggggaactgtattttgtggattctgacccattgcaggatcacaatatgtataatgattcccaaggtggagatcttttccagttgttgatgccttgagttttgccaaccatggatggcaaatgtgatgtgctcccttccagctggtgagaggaggagttagagctggtcgttttgtgattacccataatattggaagcagcctgagggctagttaatccaaacatgcatcaacaatttggcctgagaatatgtaacagccaaaccttttcgtttagtctttattaaaatttataattggtaattggaccagttttttttttaatttccctctttttaaaacagttacggcttatttactgaataaatacaaagcaaacaaactcaagttatgtcatacctttggatacgaagaccatacataataaccaaacataacattatacacaaagaatactttcattatttgtggaatttagtgcatttcaaaaagtaatcatatatcaaactaggcaccacactaagttcctgattattttgtttataatttaataatatatcttatgagccctatatattcaaaatattatgttaacatgtaatccatgtttctttttcaaatctaaagttaaaaaaaaatagcagaagccagtgtcttaaagtctatcttttgtttctaagaccatgggatttcataatctcaagataaaatatgtatgaagtaattaatgtagaatttttacaccaaataataaataatgcttaataaactagagatatgagatgtgtaggaaatttggttaaacttttttcagatactttctggcccaaataataatttgttagcaaataatatgacccttgaactcaatggccatctattaaaagactgttgttcacactggaaaacatttaaagatgtgactatatccatgggtggattgaatcactcaaaatatattagtatccttctttagggatggttggttacagacatgtatttattcaggaggcagaaaatattccattttaattgcttattaaagaaaacattaaattctaaattattttgaggactgtgaagacttttcattagtgtaatattaggtcattgtcaatctcccagaatgtagttctatattctctaaatatgaaagtatccagaaaggccagtggtagtaaaaagcttagtgtatataatctcaaaagggatggaatatttacagctcatatttataacatgttgaatcttctcagttatcagtagtcatcagaagtgtcaatagctttctaaataaatattaaatatctactgtcctgtagtgaaggagtaatttttagtaattttctctttacaaagtctccagtgtttccaggtaaatatttgtgaaacaaaatacagcaaactacattgttacttcagtgtattgttgccaaaaatgacaagatattatattaaaatcagtaaattttagacagattttaaaaattaattagcctacaatagaggttatatggtaacacggtgatcttctaagcagttaagtgactgactgttctggcaacaacgacttctccgtgactgaagggccctgttcatttcctgatcctgaagctcgtctctcttttgagcctccgcttgctttggtcgatggtttccctcagctttttctttgctgttcttcatcctcgttgttgctgtcatcatgttcactgtggcttttacaatacagcctgtaaattccttatgacatagttcagtgcatttggctttatcgcctgctccacagttctttacctttacttggcttagagaaactgtatctttgttgcttcatataacctttccccaaccccactaagctggacataacttattagtggtcctcccgtcactttatttgtagaaatctctctttcacatgagcaggggttctttcatgtggtttagctgacagcagaactagtgattctagacattttgcatggccctcattcagtggctcacaaacatgagggagcatcagaactacttgaggggcttgttaaaacccagtgcgttagaagtcggatgcggtggctcacacctgtaatcccagcactttgggaggcccaggcaggcggatcacttgaggttaggagttcaagaccagcctggccaacatggtgaaaccccgtctctactaaaaatacaaaagcacaagaatcgcttgaaccaggagacggaggtttcagtgaatgaagatcgtgccattgtattccagcctcggcaacacagcaggactgtgattttctttggagactcctagattttctgtggttttgaactgaatttgttggatgttggcaagtgcctcttatgagctgtttctttatcctgcatttgccccacaaagacttatctggaggtgagcaaagtatgtttggtagtgaggtcacaaaggcaatcagccccttcctccccactcccattgccatcttctcagtccttctccctttctttccaagtagtttacccacccctcctctttcctcccctgtccctaaaataatccacgtgtcttcctaaaatctctctttgatcctgtcctttgataacaccgtcagtgcctactactgggtctagacagacctctgttgagcagtcagagtcttccctgactccacaatgcccctttccttggctgaccagtatgactactggtccccacctttcccttgcctatccctacctccctcctactaggttgtcccatccctctcttcacccattcattcatgaccatttttcactaccaagctccccccctcccgaaggaggctgaggtttttgtgactctctagactctattgtgggatggaatgaacattgctaaagaatcttgtgttcgctttactttaaaaaggtatttttttcctaattataaaactgatgtgtcagttacggaaaaattagaaatgcagcacaaatacatgaatattttaccacgaaattgccatataatatcttgtcttttttgggggtgtgaattttttgcattgttctgatcatattctttatcatgtaatttatgttcttttttactaagtattatgtgtggttattatagattttcacaaagatatattgctggtaatatattttattgtgtagtcttataatttacttaaccttctttcaattgttagaaatttaggctatttccagattttcagtattgtaaataatgctgtgatgaccaattttgtgaataaaatgtttttatgtatttcagattattcccttaggatagtctctcagtgccaagttgtcaaaaacatctctattttgcttatcttcctgctctcttgctgccttagggggtagtaaactgaaacataaagtaaacatgcatacaaataaaaaacataaaacaaaaataagcaacctgatggtaataggtgaaagtggtaacctgttttaactttgaattcttgccgggcgcggtggctcacgcctgtaatcccagcactttgggaggctgaggcgggtggatcacgaggtcaggagttcaaaaccagcctggccaagatggtgaaatcccgtctctactaaaaatacaaaaattagccgggcgtggtggcgggcgcctgtaatcccagctacttgggaggctgaggcagagaattgcttgaacccaggaggcggaggttgcagtgagccaagatcgcgccactgcactccagcctgggtgacagagcgagactccgtctcaaataaaaaacaacaaaaaacaaaaaaaacttaaaattctttgcttgttagtgaccttgatcatggttctctttgtacgatagttgggcatctgtatttccacttgtgtgaatttgcctttaaattttggttatgggtttcaccttttaaaataatcaaacatatttatcttttcctgtgtgataggtttttttctgtatcttttcctgttaaacacacagacccctccccaatctggacattgaataaatattcattttcctttgca

SEQ ID NO: 374512 - DNA, 5912 bp, Homo sapiens
  misc_feature (248)..(248): n is a, c, g, or t
ttataaaaagaaggaagggcagggcttccaggtgaaaggcatagcacaagcaaaggcaaaaagacgggtaactgctagttgttaagggcagtggctgaatcgctatacccctagcagttctacacctaggggcctgcgggccgctgggtctgcgaagcttgcaaggcaactggcccgcccccgctctgcgcctgtctctcggccacgcctattgctgcaggatgacgcgcacctctagaacccgcccnggagggtgagtgggacgcagggaagagtcgcacggacgcactcgcgctgcggccagcgcccgggcctgcgggcccgggcggcggctgtgttgcgcagtcttcatgggttcccgacgaggaggtctctgtggctgcggcggcggctgctaactgcgccacctgctgcagcctgtccccgccgctctgaagcggccgcgtcgaagccgaaatgccgccaccccggaccggccgaggccttctctggctgggtctggttctgagctccgtctgcgtcgccctcggatccgaaacgcaggccaactcgaccacagatgctctgaacgttcttctcatcatcgtggatgacctgcgcccctccctgggctgttatggggataagctggtgaggtccccaaatattgaccaactggcatcccacagcctcctcttccagaatgcctttgcgcagcaagcagtgtgcgccccgagccgcgtttctttcctcactggcaggagacctgacaccacccgcctgtacgacttcaactcctactggagggtgcacgctggaaacttctccaccatcccccagtacttcaaggagaatggctatgtgaccatgtcggtgggaaaagtctttcaccctgggatatcttctaaccataccgatgattctccgtatagctggtcttttccaccttatcatccttcctctgagaagtatgaaaacactaagacatgtcgagggccagatggagaactccatgccaacctgctttgccctgtggatgtgctggatgttcccgagggcaccttgcctgacaaacagagcactgagcaagccatacagttgttggaaaagatgaaaacgtcagccagtcctttcttcctggccgttgggtatcataagccacacatccccttcagataccccaaggaatttcagaagttgtatcccttggagaacatcaccctggcccccgatcccgaggtccctgatggcctaccccctgtggcctacaacccctggatggacatcaggcaacgggaagacgtccaagccttaaacatcagtgtgccgtatggtccaattcctgtggactttcagcggaaaatccgccagagctactttgcctctgtgtcatatttggatacacaggtcggccgcctcttgagtgctttggacgatcttcagctggccaacagcaccatcattgcatttacctcggatcatggcaggcaatccatggaccttgtggaacttgtgtctctttttcccacgctggctggacttgcaggactgcaggttccacctcgctgccccgttccttcatttcacgttgagctgtgcagagaaggcaagaaccttctgaagcattttcgattccgtgacttggaagaggatccgtacctccctggtaatccccgtgaactgattgcctatagccagtatccccggccttcagacatccctcagtggaattctgacaagccgagtttaaaagatataaagatcatgggctattccatacgcaccatagactataggtatactgtgtgggttggcttcaatcctgatgaatttctagctaacttttctgacatccatgcaggggaactgtattttgtggattctgacccattgcaggatcacaatatgtataatgattcccaaggtggagatcttttccagttgttgatgccttgagttttgccaaccatggatggcaaatgtgatgtgctcccttccagctggtgagaggaggagttagagctggtcgttttgtgattacccataatattggaagcagcctgagggctagttaatccaaacatgcatcaacaatttggcctgagaatatgtaacagccaaaccttttcgtttagtctttattaaaatttataattggtaattggaccagttttttttttaatttccctctttttaaaacagttacggcttatttactgaataaatacaaagcaaacaaactcaagttatgtcatacctttggatacgaagaccatacataataaccaaacataacattatacacaaagaatactttcattatttgtggaatttagtgcatttcaaaaagtaatcatatatcaaactaggcaccacactaagttcctgattattttgtttataatttaataatatatcttatgagccctatatattcaaaatattatgttaacatgtaatccatgtttctttttcaaatctaaagttaaaaaaaaatagcagaagccagtgtcttaaagtctatcttttgtttctaagaccatgggatttcataatctcaagataaaatatgtatgaagtaattaatgtagaatttttacaccaaataataaataatgcttaataaactagagatatgagatgtgtaggaaatttggttaaacttttttcagatactttctggcccaaataataatttgttagcaaataatatgacccttgaactcaatggccatctattaaaagactgttgttcacactggaaaacatttaaagatgtgactatatccatgggtggattgaatcactcaaaatatattagtatccttctttagggatggttggttacagacatgtatttattcaggaggcagaaaatattccattttaattgcttattaaagaaaacattaaattctaaattattttgaggactgtgaagacttttcattagtgtaatattaggtcattgtcaatctcccagaatgtagttctatattctctaaatatgaaagtatccagaaaggccagtggtagtaaaaagcttagtgtatataatctcaaaagggatggaatatttacagctcatatttataacatgttgaatcttctcagttatcagtagtcatcagaagtgtcaatagctttctaaataaatattaaatatctactgtcctgtagtgaaggagtaatttttagtaattttctctttacaaagtctccagtgtttccaggtaaatatttgtgaaacaaaatacagcaaactacattgttacttcagtgtattgttgccaaaaatgacaagatattatattaaaatcagtaaattttagacagattttaaaaattaattagcctacaatagaggttatatggtaacacggtgatcttctaagcagttaagtgactgactgttctggcaacaacgacttctccgtgactgaagggccctgttcatttcctgatcctgaagctcgtctctcttttgagcctccgcttgctttggtcgatggtttccctcagctttttctttgctgttcttcatcctcgttgttgctgtcatcatgttcactgtggcttttacaatacagcctgtaaattccttatgacatagttcagtgcatttggctttatcgcctgctccacagttctttacctttacttggcttagagaaactgtatctttgttgcttcatataacctttccccaaccccactaagctggacataacttattagtggtcctcccgtcactttatttgtagaaatctctctttcacatgagcaggggttctttcatgtggtttagctgacagcagaactagtgattctagacattttgcatggccctcattcagtggctcacaaacatgagggagcatcagaactacttgaggggcttgttaaaacccagtgcgttagaagtcggatgcggtggctcacacctgtaatcccagcactttgggaggcccaggcaggcggatcacttgaggttaggagttcaagaccagcctggccaacatggtgaaaccccgtctctactaaaaatacaaaagttagccgggtgtggtggtgcatgcctgtaatcccagcttcttgggaggccaaggcacaagaatcgcttgaaccaggagacggaggtttcagtgaatgaagatcgtgccattgtattccagcctcggcaacacagcaggactgtgattttctttggagactcctagattttctgtggttttgaactgaatttgttggatgttggcaagtgcctcttatgagctgtttctttatcctgcatttgccccacaaagacttatctggaggtgagcaaagtatgtttggtagtgaggtcacaaaggcaatcagccccttcctccccactcccattgccatcttctcagtccttctccctttctttccaagtagtttacccacccctcctctttcctcccctgtccctaaaataatccacgtgtcttcctaaaatctctctttgatcctgtcctttgataacaccgtcagtgcctactactgggtctagacagacctctgttgagcagtcagagtcttccctgactccacaatgcccctttccttggctgaccagtatgactactggtccccacctttcccttgcctatccctacctccctcctactaggttgtcccatccctctcttcacccattcattcatgaccatttttcactaccaagctccccccctcccgaaggaggctgaggtttttgtgactctctagactctattgtgggatggaatgaacattgctaaagaatcttgtgttcgctttactttaaaaaggtatttttttcctaattataaaactgatgtgtcagttacggaaaaattagaaatgcagcacaaatacatgaatattttaccacgaaattgccatataatatcttgtcttttttgggggtgtgaattttttgcattgttctgatcatattctttatcatgtaatttatgttcttttttactaagtattatgtgtggttattatagattttcacaaagatatattgctggtaatatattttattgtgtagtcttataatttacttaaccttctttcaattgttagaaatttaggctatttccagattttcagtattgtaaataatgctgtgatgaccaattttgtgaataaaatgtttttatgtatttcagattattcccttaggatagtctctcagtgccaagttgtcaaaaacatctctattttgcttatcttcctgctctcttgctgccttagggggtagtaaactgaaacataaagtaaacatgcatacaaataaaaaacataaaacaaaaataagcaacctgatggtaataggtgaaagtggtaacctgttttaactttgaattcttgccgggcgcggtggctcacgcctgtaatcccagcactttgggaggctgaggcgggtggatcacgaggtcaggagttcaaaaccagcctggccaagatggtgaaatcccgtctctactaaaaatacaaaaattagccgggcgtggtggcgggcgcctgtaatcccagctacttgggaggctgaggcagagaattgcttgaacccaggaggcggaggttgcagtgagccaagatcgcgccactgcactccagcctgggtgacagagcgagactccgtctcaaataaaaaacaacaaaaaacaaaaaaaacttaaaattctttgcttgttagtgaccttgatcatggttctctttgtacgatagttgggcatctgtatttccacttgtgtgaatttgcctttaaattttggttatgggtttcaccttttaaaataatcaaacatatttatcttttcctgtgtgataggtttttttctgtatcttttcctgttaaacacacagacccctccccaatctggacattgaataaatattcattttcctttgca

SEQ ID NO: 374513 - DNA, 5942 bp, Homo sapiens
  misc_feature (138)..(138): n is a, c, g, or t
gcgatctagacctagttagccaagtctctaacgtgacatagggaaagcttgcaaggcaactggcccgcccccgctctgcgcctgtctctcggccacgcctattgctgcaggatgacgcgcacctctagaacccgcccnggagggtgagtgggacgcagggaagagtcgcacggacgcactcgcgctgcggccagcgcccgggcctgcgggcccgggcggcggctgtgttgcgcagtcttcatgggttcccgacgaggaggtctctgtggctgcggcggcggctgctaactgcgccacctgctgcagcctgtccccgccgctctgaagcggccgcgtcgaagccgaaatgccgccaccccggaccggccgaggccttctctggctgggtctggttctgagctccgtctgcgtcgccctcggatccgaaacgcaggccaactcgaccacagatgctctgaacgttcttctcatcatcgtggatgacctgcgcccctccctgggctgttatggggataagctggtgaggtccccaaatattgaccaactggcatcccacagcctcctcttccagaatgcctttgcgcagcaagcagtgtgcgccccgagccgcgtttctttcctcactggcaggagacctgacaccacccgcctgtacgacttcaactcctactggagggtgcacgctggaaacttctccaccatcccccagtacttcaaggagaatggctatgtgaccatgtcggtgggaaaagtctttcaccctgggatatcttctaaccataccgatgattctccgtatagctggtcttttccaccttatcatccttcctctgagaagtatgaaaacactaagacatgtcgagggccagatggagaactccatgccaacctgctttgccctgtggatgtgctggatgttcccgagggcaccttgcctgacaaacagagcactgagcaagccatacagttgttggaaaagatgaaaacgtcagccagtcctttcttcctggccgttgggtatcataagccacacatccccttcagataccccaaggaatttcagaagttgtatcccttggagaacatcaccctggcccccgatcccgaggtccctgatggcctaccccctgtggcctacaacccctggatggacatcaggcaacgggaagacgtccaagccttaaacatcagtgtgccgtatggtccaattcctgtggactttcagcggaaaatccgccagagctactttgcctctgtgtcatatttggatacacaggtcggccgcctcttgagtgctttggacgatcttcagctggccaacagcaccatcattgcatttacctcggatcatgggtgggctctaggtgaacatggagaatgggccaaatacagcaattttgatgttgctacccatgttcccctgatattctatgttcctggaaggacggcttcacttccggaggcaggcgagaagcttttcccttacctcgacccttttgattccgcctcacagttgatggagccaggcaggcaatccatggaccttgtggaacttgtgtctctttttcccacgctggctggacttgcaggactgcaggttccacctcgctgccccgttccttcatttcacgttgagctgtgcagagaaggcaagaaccttctgaagcattttcgattccgtgacttggaagaggatccgtacctccctggtaatccccgtgaactgattgcctatagccagtatccccggccttcagacatccctcagtggaattctgacaagccgagtttaaaagatataaagatcatgggctattccatacgcaccatagactataggtatactgtgtgggttggcttcaatcctgatgaatttctagctaacttttctgacatccatgcaggggaactgtattttgtggattctgacccattgcaggatcacaatatgtataatgattcccaaggtggagatcttttccagttgttgatgccttgagttttgccaaccatggatggcaaatgtgatgtgctcccttccagctggtgagaggaggagttagagctggtcgttttgtgattacccataatattggaagcagcctgagggctagttaatccaaacatgcatcaacaatttggcctgagaatatgtaacagccaaaccttttcgtttagtctttattaaaatttataattggtaattggaccagttttttttttaatttccctctttttaaaacagttacggcttatttactgaataaatacaaagcaaacaaactcaagttatgtcatacctttggatacgaagaccatacataataaccaaacataacattatacacaaagaatactttcattatttgtggaatttagtgcatttcaaaaagtaatcatatatcaaactaggcaccacactaagttcctgattattttgtttataatttaataatatatcttatgagccctatatattcaaaatattatgttaacatgtaatccatgtttctttttcaaatctaaagttaaaaaaaaatagcagaagccagtgtcttaaagtctatcttttgtttctaagaccatgggatttcataatctcaagataaaatatgtatgaagtaattaatgtagaatttttacaccaaataataaataatgcttaataaactagagatatgagatgtgtaggaaatttggttaaacttttttcagatactttctggcccaaataataatttgttagcaaataatatgacccttgaactcaatggccatctattaaaagactgttgttcacactggaaaacatttaaagatgtgactatatccatgggtggattgaatcactcaaaatatattagtatccttctttagggatggttggttacagacatgtatttattcaggaggcagaaaatattccattttaattgcttattaaagaaaacattaaattctaaattattttgaggactgtgaagacttttcattagtgtaatattaggtcattgtcaatctcccagaatgtagttctatattctctaaatatgaaagtatccagaaaggccagtggtagtaaaaagcttagtgtatataatctcaaaagggatggaatatttacagctcatatttataacatgttgaatcttctcagttatcagtagtcatcagaagtgtcaatagctttctaaataaatattaaatatctactgtcctgtagtgaaggagtaatttttagtaattttctctttacaaagtctccagtgtttccaggtaaatatttgtgaaacaaaatacagcaaactacattgttacttcagtgtattgttgccaaaaatgacaagatattatattaaaatcagtaaattttagacagattttaaaaattaattagcctacaatagaggttatatggtaacacggtgatcttctaagcagttaagtgactgactgttctggcaacaacgacttctccgtgactgaagggccctgttcatttcctgatcctgaagctcgtctctcttttgagcctccgcttgctttggtcgatggtttccctcagctttttctttgctgttcttcatcctcgttgttgctgtcatcatgttcactgtggcttttacaatacagcctgtaaattccttatgacatagttcagtgcatttggctttatcgcctgctccacagttctttacctttacttggcttagagaaactgtatctttgttgcttcatataacctttccccaaccccactaagctggacataacttattagtggtcctcccgtcactttatttgtagaaatctctctttcacatgagcaggggttctttcatgtggtttagctgacagcagaactagtgattctagacattttgcatggccctcattcagtggctcacaaacatgagggagcatcagaactacttgaggggcttgttaaaacccagtgcgttagaagtcggatgcggtggctcacacctgtaatcccagcactttgggaggcccaggcaggcggatcacttgaggttaggagttcaagaccagcctggccaacatggtgaaaccccgtctctactaaaaatacaaaagttagccgggtgtggtggtgcatgcctgtaatcccagcttcttgggaggccaaggcacaagaatcgcttgaaccaggagacggaggtttcagtgaatgaagatcgtgccattgtattccagcctcggcaacacagcaggactgtgattttctttggagactcctagattttctgtggttttgaactgaatttgttggatgttggcaagtgcctcttatgagctgtttctttatcctgcatttgccccacaaagacttatctggaggtgagcaaagtatgtttggtagtgaggtcacaaaggcaatcagccccttctccctttctttccaagtagtttacccacccctcctctttcctcccctgtccctaaaataatccacgtgtcttcctaaaatctctctttgatcctgtcctttgataacaccgtcagtgcctactactgggtctagacagacctctgttgagcagtcagagtcttccctgactccacaatgcccctttccttggctgaccagtatgactactggtccccacctttcccttgcctatccctacctccctcctactaggttgtcccatccctctcttcacccattcattcatgaccatttttcactaccaagctccccccctcccgaaggaggctgaggtttttgtgactctctagactctattgtgggatggaatgaacattgctaaagaatcttgtgttcgctttactttaaaaaggtatttttttcctaattataaaactgatgtgtcagttacggaaaaattagaaatgcagcacaaatacatgaatattttaccacgaaattgccatataatatcttgtcttttttgggggtgtgaattttttgcattgttctgatcatattctttatcatgtaatttatgttcttttttactaagtattatgtgtggttattatagattttcacaaagatatattgctggtaatatattttattgtgtagtcttataatttacttaaccttctttcaattgttagaaatttaggctatttccagattttcagtattgtaaataatgctgtgatgaccaattttgtgaataaaatgtttttatgtatttcagattattcccttaggatagtctctcagtgccaagttgtcaaaaacatctctattttgcttatcttcctgctctcttgctgccttagggggtagtaaactgaaacataaagtaaacatgcatacaaataaaaaacataaaacaaaaataagcaacctgatggtaataggtgaaagtggtaacctgttttaactttgaattcttgccgggcgcggtggctcacgcctgtaatcccagcactttgggaggctgaggcgggtggatcacgaggtcaggagttcaaaaccagcctggccaagatggtgaaatcccgtctctactaaaaatacaaaaattagccgggcgtggtggcgggcgcctgtaatcccagctacttgggaggctgaggcagagaattgcttgaacccaggaggcggaggttgcagtgagccaagatcgcgccactgcactccagcctgggtgacagagcgagactccgtctcaaataaaaaacaacaaaaaacaaaaaaaacttaaaattctttgcttgttagtgaccttgatcatggttctctttgtacgatagttgggcatctgtatttccacttgtgtgaatttgcctttaaattttggttatgggtttcaccttttaaaataatcaaacatatttatcttttcctgtgtgataggtttttttctgtatcttttcctgttaaacacacagacccctccccaatctggacattgaataaatattcattttcctttgca

SEQ ID NO: 374514 - DNA, 5922 bp, Homo sapiens
  misc_feature (138)..(138): n is a, c, g, or t
gcgatctagacctagttagccaagtctctaacgtgacatagggaaagcttgcaaggcaactggcccgcccccgctctgcgcctgtctctcggccacgcctattgctgcaggatgacgcgcacctctagaacccgcccnggagggtgagtgggacgcagggaagagtcgcacggacgcactcgcgctgcggccagcgcccgggcctgcgggcccgggcggcggctgtgttgcgcagtcttcatgggttcccgacgaggaggtctctgtggctgcggcggcggctgctaactgcgccacctgctgcagcctgtccccgccgctctgaagcggccgcgtcgaagccgaaatgccgccaccccggaccggccgaggccttctctggctgggtctggttctgagctccgtctgcgtcgccctcggatccgaaacgcaggccaactcgaccacagatgctctgaacgttcttctcatcatcgtggatgacctgcgcccctccctgggctgttatggggataagctggtgaggtccccaaatattgaccaactggcatcccacagcctcctcttccagaatgcctttgcgcagcaagcagtgtgcgccccgagccgcgtttctttcctcactggcaggagacctgacaccacccgcctgtacgacttcaactcctactggagggtgcacgctggaaacttctccaccatcccccagtacttcaaggagaatggctatgtgaccatgtcggtgggaaaagtctttcaccctgggatatcttctaaccataccgatgattctccgtatagctggtcttttccaccttatcatccttcctctgagaagtatgaaaacactaagacatgtcgagggccagatggagaactccatgccaacctgctttgccctgtggatgtgctggatgttcccgagggcaccttgcctgacaaacagagcactgagcaagccatacagttgttggaaaagatgaaaacgtcagccagtcctttcttcctggccgttgggtatcataagccacacatccccttcagataccccaaggaatttcagaagttgtatcccttggagaacatcaccctggcccccgatcccgaggtccctgatggcctaccccctgtggcctacaacccctggatggacatcaggcaacgggaagacgtccaagccttaaacatcagtgtgccgtatggtccaattcctgtggactttcagcggaaaatccgccagagctactttgcctctgtgtcatatttggatacacaggtcggccgcctcttgagtgctttggacgatcttcagctggccaacagcaccatcattgcatttacctcggatcatgggtgggctctaggtgaacatggagaatgggccaaatacagcaattttgatgttgctacccatgttcccctgatattctatgttcctggaaggacggcttcacttccggaggcaggcgagaagcttttcccttacctcgacccttttgattccgcctcacagttgatggagccaggcaggcaatccatggaccttgtggaacttgtgtctctttttcccacgctggctggacttgcaggactgcaggttccacctcgctgccccgttccttcatttcacgttgagctgtgcagagaaggcaagaaccttctgaagcattttcgattccgtgacttggaagaggatccgtacctccctggtaatccccgtgaactgattgcctatagccagtatccccggccttcagacatccctcagtggaattctgacaagccgagtttaaaagatataaagatcatgggctattccatacgcaccatagactataggtatactgtgtgggttggcttcaatcctgatgaatttctagctaacttttctgacatccatgcaggggaactgtattttgtggattctgacccattgcaggatcacaatatgtataatgattcccaaggtggagatcttttccagttgttgatgccttgagttttgccaaccatggatggcaaatgtgatgtgctcccttccagctggtgagaggaggagttagagctggtcgttttgtgattacccataatattggaagcagcctgagggctagttaatccaaacatgcatcaacaatttggcctgagaatatgtaacagccaaaccttttcgtttagtctttattaaaatttataattggtaattggaccagttttttttttaatttccctctttttaaaacagttacggcttatttactgaataaatacaaagcaaacaaactcaagttatgtcatacctttggatacgaagaccatacataataaccaaacataacattatacacaaagaatactttcattatttgtggaatttagtgcatttcaaaaagtaatcatatatcaaactaggcaccacactaagttcctgattattttgtttataatttaataatatatcttatgagccctatatattcaaaatattatgttaacatgtaatccatgtttctttttcaaatctaaagttaaaaaaaaatagcagaagccagtgtcttaaagtctatcttttgtttctaagaccatgggatttcataatctcaagataaaatatgtatgaagtaattaatgtagaatttttacaccaaataataaataatgcttaataaactagagatatgagatgtgtaggaaatttggttaaacttttttcagatactttctggcccaaataataatttgttagcaaataatatgacccttgaactcaatggccatctattaaaagactgttgttcacactggaaaacatttaaagatgtgactatatccatgggtggattgaatcactcaaaatatattagtatccttctttagggatggttggttacagacatgtatttattcaggaggcagaaaatattccattttaattgcttattaaagaaaacattaaattctaaattattttgaggactgtgaagacttttcattagtgtaatattaggtcattgtcaatctcccagaatgtagttctatattctctaaatatgaaagtatccagaaaggccagtggtagtaaaaagcttagtgtatataatctcaaaagggatggaatatttacagctcatatttataacatgttgaatcttctcagttatcagtagtcatcagaagtgtcaatagctttctaaataaatattaaatatctactgtcctgtagtgaaggagtaatttttagtaattttctctttacaaagtctccagtgtttccaggtaaatatttgtgaaacaaaatacagcaaactacattgttacttcagtgtattgttgccaaaaatgacaagatattatattaaaatcagtaaattttagacagattttaaaaattaattagcctacaatagaggttatatggtaacacggtgatcttctaagcagttaagtgactgactgttctggcaacaacgacttctccgtgactgaagggccctgttcatttcctgatcctgaagctcgtctctcttttgagcctccgcttgctttggtcgatggtttccctcagctttttctttgctgttcttcatcctcgttgttgctgtcatcatgttcactgtggcttttacaatacagcctgtaaattccttatgacatagttcagtgcatttggctttatcgcctgctccacagttctttacctttacttggcttagagaaactgtatctttgttgcttcatataacctttccccaaccccactaagctggacataacttattagtggtcctcccgtcactttatttgtagaaatctctctttcacatgagcaggggttctttcatgtggtttagctgacagcagaactagtgattctagacattttgcatggccctcattcagtggctcacaaacatgagggagcatcagaactacttgaggggcttgttaaaacccagtgcgttagaagtcggatgcggtggctcacacctgtaatcccagcactttgggaggcccaggcaggcggatcacttgaggttaggagttcaagaccagcctggccaacatggtgaaaccccgtctctactaaaaatacaaaagttagccgggtgtggtggtgcatgcctgtaatcccagcttcttgggaggccaaggcacaagaatcgcttgaaccaggagacggaggtttcagtgaatgaagatcgtgccattgtattccagcctcggcaacacagcaggactgtgattttctttggagactcctagattttctgtggttttgaactgaatttgttggatgttggcaagtgcctcttatgagctgtttctttatcctgcatttgccccacaaagacttatctggaggtgagcaaagtatgtttggtagtgaggtcacaaaggcaatcagccccttcctccccactcccattgccatcttctcagtccttctccctttctttccaagtagtttacccacccctcctctttcctcccctgtccctaaaataatccacgtgtcttcctaaaatctctctttgatcctgtcctttgataacaccgtcagtgcctactactgggtctagacagacctctgttgagcagtcagagtcttccctgactccacaatgcccctttccttggctgaccagtatgactactggtccccacctttcccttgcctatccctacctccctcctactaggttgtcccatccctctcttcacccattcattcatgaccatttttcactaccaagctccccccctcccgaaggaggctgaggtttttgtgactctctagactctattgtgggatggaatgaacattgctaaagaatcttgtgttcgctttactttaaaaaggtatttttttcctaattataaaactgatgtgtcagttacggaaatatcttgtcttttttgggggtgtgaattttttgcattgttctgatcatattctttatcatgtaatttatgttcttttttactaagtattatgtgtggttattatagattttcacaaagatatattgctggtaatatattttattgtgtagtcttataatttacttaaccttctttcaattgttagaaatttaggctatttccagattttcagtattgtaaataatgctgtgatgaccaattttgtgaataaaatgtttttatgtatttcagattattcccttaggatagtctctcagtgccaagttgtcaaaaacatctctattttgcttatcttcctgctctcttgctgccttagggggtagtaaactgaaacataaagtaaacatgcatacaaataaaaaacataaaacaaaaataagcaacctgatggtaataggtgaaagtggtaacctgttttaactttgaattcttgccgggcgcggtggctcacgcctgtaatcccagcactttgggaggctgaggcgggtggatcacgaggtcaggagttcaaaaccagcctggccaagatggtgaaatcccgtctctactaaaaatacaaaaattagccgggcgtggtggcgggcgcctgtaatcccagctacttgggaggctgaggcagagaattgcttgaacccaggaggcggaggttgcagtgagccaagatcgcgccactgcactccagcctgggtgacagagcgagactccgtctcaaataaaaaacaacaaaaaacaaaaaaaacttaaaattctttgcttgttagtgaccttgatcatggttctctttgtacgatagttgggcatctgtatttccacttgtgtgaatttgcctttaaattttggttatgggtttcaccttttaaaataatcaaacatatttatcttttcctgtgtgataggtttttttctgtatcttttcctgttaaacacacagacccctccccaatctggacattgaataaatattcattttcctttgca

SEQ ID NO: 374515 - DNA, 7519 bp, Homo sapiens
  misc_feature (988)..(988): n is a, c, g, or t
acttgccacaaggagacgctgttcagtttaccggatcctgtcccgcgccagccaaccaggacaaggccggggagctcgagacaggcagcctagaccaagaaccggaaggaggaaaaggaaccggagggaggaagaggaggggcgggacgagaccaccaggcaagagtccaaactttcccgcggcgacctaactgcacctccagtgtcttcccccagagggcacagaagcagcaagaagggcgggaacacttgactggggtccatgcagctctaggctgagtcttgcagggctgagccccccaggcctgctctcctgtgtcctggccgctccgtcagtgcctgccagtggggtccagagggaccgtttttttaacgcctcttttgcagtgagatgcgcctacttctccctggagaagcttgaggaagcagaaatgctggagatgagctgctcctcactctcactcctgggtgtgctgggcagtggggtgcaatgtgcacgtaggtgcacactctccctgggcggcagcgagcagcagaggtctgatctgtggtcggatgacgagaggaagtgcaagtaaagcagctgcagcgagacctcgtccgcacaggggcttgttcttctgtgtctttgcagggctgttttggactcagtattcacctaagcactccaaattacccagcacaccctgcctgcatggcgctgcgctgcaccttcactctggtcacgggtctggcagtcagctcaccaattcctcctgcttccctgggacttgccggcttttagcactgcaattcactcagcaaactgggactgttggtcaccctacctggcagccagtgataaggtgagggccactcctgggagggaggacacctgtggggaaaattcttgtgttatttatttctccttcgggatagggtgcctgcagcgcttcatgggagggggtgggctgatgctgcgggctcagaagtttcaagggcatctggngagaccagatattcagagaccttctagatgtgcctgttccatgtatcagggacgcaggttttcccaacagggctggtgtcattggcatgacagacctgccttggctgagcgttcacctgtctttggagttcagccaccttagcaagtcctgggtttgttcttcagactttgctgctcgcccattgcctggatcgggggctactttgtaaaccaccaggaagactccagtgtttctggttaatttttagatgtttgttaattgctcttggtctctcattaatcccctgtgggtcatccaggaaacatactcaccactgtctgttctctgagttttcatttccaggcatccgccctgcctggatctcctcacctgccaggaacttcctctccacaagccggccatcccagcaaaagttctaacaccaaaggtctggcaactagcctgccatcttgtgcctggagccgcctgcgtgccacctactcccgaagatgggaaccttgttgccagttgggcagatgcggggcaatcctgtaccaagaccccattttaccacctgctttctcagaccactctggaacccactgtctcagattgtgtcctccaggaagcagaccatgagagggagttggcagggccaaagatttactggggctaactaacactcaggaaagggataggaaggaaacagggctggagagcaggttgagcccgacctgacagtctcgagcagcccaacagggaggtgtggagcaagggttgcccactagaggggcctgcattgggtacgggtgatggggtccacatggtacctggcatatagcaggctgtgcaatccatattaactgactggataaattaatgcccagaaaaggtgccctggagaatgggtgtgtgctgaacacaatagggaagggcccagcatctgccttggcataggcagaactgtgctgtgccctgcaacaggccacctgagagctgctttgatcttgtgtgtacattagatgactgccaggggcatgaaggggatgtgcttccagggcatttgctggcagggcgtctcgtgatctcttggtattggtgtgagcacagcctggcaggagagggcagatctccatgcaaagtatgtcagaaagcagatggaagccaggccccctcctgaaagaggctccttgaagataattctaacatctttgtcatcagtgttgacatctcttgattgtatcctgtcattccatttgagatcttcctggttctggctggcatcctctgacatcactccagcagaagaaagggaaggaacacgctgcattactgcgtgggatatcttctaaccataccgatgattctccgtatagctggtcttttccaccttatcatccttcctctgagaagtatgaaaacactaagacatgtcgagggccagatggagaactccatgccaacctgctttgccctgtggatgtgctggatgttcccgagggcaccttgcctgacaaacagagcactgagcaagccatacagttgttggaaaagatgaaaacgtcagccagtcctttcttcctggccgttgggtatcataagccacacatccccttcagataccccaaggaatttcagaagttgtatcccttggagaacatcaccctggcccccgatcccgaggtccctgatggcctaccccctgtggcctacaacccctggatggacatcaggcaacgggaagacgtccaagccttaaacatcagtgtgccgtatggtccaattcctgtggactttcagcggaaaatccgccagagctactttgcctctgtgtcatatttggatacacaggtcggccgcctcttgagtgctttggacgatcttcagctggccaacagcaccatcattgcatttacctcggatcatgggtgggctctaggtgaacatggagaatgggccaaatacagcaattttgatgttgctacccatgttcccctgatattctatgttcctggaaggacggcttcacttccggaggcaggcgagaagcttttcccttacctcgacccttttgattccgcctcacagttgatggagccaggcaggcaatccatggaccttgtggaacttgtgtctctttttcccacgctggctggacttgcaggactgcaggttccacctcgctgccccgttccttcatttcacgttgagctgtgcagagaaggcaagaaccttctgaagcattttcgattccgtgacttggaagaggatccgtacctccctggtaatccccgtgaactgattgcctatagccagtatccccggccttcagacatccctcagtggaattctgacaagccgagtttaaaagatataaagatcatgggctattccatacgcaccatagactataggtatactgtgtgggttggcttcaatcctgatgaatttctagctaacttttctgacatccatgcaggggaactgtattttgtggattctgacccattgcaggatcacaatatgtataatgattcccaaggtggagatcttttccagttgttgatgccttgagttttgccaaccatggatggcaaatgtgatgtgctcccttccagctggtgagaggaggagttagagctggtcgttttgtgattacccataatattggaagcagcctgagggctagttaatccaaacatgcatcaacaatttggcctgagaatatgtaacagccaaaccttttcgtttagtctttattaaaatttataattggtaattggaccagttttttttttaatttccctctttttaaaacagttacggcttatttactgaataaatacaaagcaaacaaactcaagttatgtcatacctttggatacgaagaccatacataataaccaaacataacattatacacaaagaatactttcattatttgtggaatttagtgcatttcaaaaagtaatcatatatcaaactaggcaccacactaagttcctgattattttgtttataatttaataatatatcttatgagccctatatattcaaaatattatgttaacatgtaatccatgtttctttttcaaatctaaagttaaaaaaaaatagcagaagccagtgtcttaaagtctatcttttgtttctaagaccatgggatttcataatctcaagataaaatatgtatgaagtaattaatgtagaatttttacaccaaataataaataatgcttaataaactagagatatgagatgtgtaggaaatttggttaaacttttttcagatactttctggcccaaataataatttgttagcaaataatatgacccttgaactcaatggccatctattaaaagactgttgttcacactggaaaacatttaaagatgtgactatatccatgggtggattgaatcactcaaaatatattagtatccttctttagggatggttggttacagacatgtatttattcaggaggcagaaaatattccattttaattgcttattaaagaaaacattaaattctaaattattttgaggactgtgaagacttttcattagtgtaatattaggtcattgtcaatctcccagaatgtagttctatattctctaaatatgaaagtatccagaaaggccagtggtagtaaaaagcttagtgtatataatctcaaaagggatggaatatttacagctcatatttataacatgttgaatcttctcagttatcagtagtcatcagaagtgtcaatagctttctaaataaatattaaatatctactgtcctgtagtgaaggagtaatttttagtaattttctctttacaaagtctccagtgtttccaggtaaatatttgtgaaacaaaatacagcaaactacattgttacttcagtgtattgttgccaaaaatgacaagatattatattaaaatcagtaaattttagacagattttaaaaattaattagcctacaatagaggttatatggtaacacggtgatcttctaagcagttaagtgactgactgttctggcaacaacgacttctccgtgactgaagggccctgttcatttcctgatcctgaagctcgtctctcttttgagcctccgcttgctttggtcgatggtttccctcagctttttctttgctgttcttcatcctcgttgttgctgtcatcatgttcactgtggcttttacaatacagcctgtaaattccttatgacatagttcagtgcatttggctttatcgcctgctccacagttctttacctttacttggcttagagaaactgtatctttgttgcttcatataacctttccccaaccccactaagctggacataacttattagtggtcctcccgtcactttatttgtagaaatctctctttcacatgagcaggggttctttcatgtggtttagctgacagcagaactagtgattctagacattttgcatggccctcattcagtggctcacaaacatgagggagcatcagaactacttgaggggcttgttaaaacccagtgcgttagaagtcggatgcggtggctcacacctgtaatcccagcactttgggaggcccaggcaggcggatcacttgaggttaggagttcaagaccagcctggccaacatggtgaaaccccgtctctactaaaaatacaaaagttagccgggtgtggtggtgcatgcctgtaatcccagcttcttgggaggccaaggcacaagaatcgcttgaaccaggagacggaggtttcagtgaatgaagatcgtgccattgtattccagcctcggcaacacagcaggactgtgattttctttggagactcctagattttctgtggttttgaactgaatttgttggatgttggcaagtgcctcttatgagctgtttctttatcctgcatttgccccacaaagacttatctggaggtgagcaaagtatgtttggtagtgaggtcacaaaggcaatcagccccttcctccccactcccattgccatcttctcagtccttctccctttctttccaagtagtttacccacccctcctctttcctcccctgtccctaaaataatccacgtgtcttcctaaaatctctctttgatcctgtcctttgataacaccgtcagtgcctactactgggtctagacagacctctgttgagcagtcagagtcttccctgactccacaatgcccctttccttggctgaccagtatgactactggtccccacctttcccttgcctatccctacctccctcctactaggttgtcccatccctctcttcacccattcattcatgaccatttttcactaccaagctccccccctcccgaaggaggctgaggtttttgtgactctctagactctattgtgggatggaatgaacattgctaaagaatcttgtgttcgctttactttaaaaaggtatttttttcctaattataaaactgatgtgtcagttacggaaaaattagaaatgcagcacaaatacatgaatattttaccacgaaattgccatataatatcttgtcttttttgggggtgtgaattttttgcattgttctgatcatattctttatcatgtaatttatgttcttttttactaagtattatgtgtggttattatagattttcacaaagatatattgctggtaatatattttattgtgtagtcttataatttacttaaccttctttcaattgttagaaatttaggctatttccagattttcagtattgtaaataatgctgtgatgaccaattttgtgaataaaatgtttttatgtatttcagattattcccttaggatagtctctcagtgccaagttgtcaaaaacatctctattttgcttatcttcctgctctcttgctgccttagggggtagtaaactgaaacataaagtaaacatgcatacaaataaaaaacataaaacaaaaataagcaacctgatggtaataggtgaaagtggtaacctgttttaactttgaattcttgccgggcgcggtggctcacgcctgtaatcccagcactttgggaggctgaggcgggtggatcacgaggtcaggagttcaaaaccagcctggccaagatggtgaaatcccgtctctactaaaaatacaaaaattagccgggcgtggtggcgggcgcctgtaatcccagctacttgggaggctgaggcagagaattgcttgaacccaggaggcggaggttgcagtgagccaagatcgcgccactgcactccagcctgggtgacagagcgagactccgtctcaaataaaaaacaacaaaaaacaaaaaaaacttaaaattctttgcttgttagtgaccttgatcatggttctctttgtacgatagttgggcatctgtatttccacttgtgtgaatttgcctttaaattttggttatgggtttcaccttttaaaataatcaaacatatttatcttttcctgtgtgataggtttttttctgtatcttttcctgttaaacacacagacccctccccaatctggacattgaataaatattcattttcctttgca

SEQ ID NO: 374516 - DNA, 4752 bp, Homo sapiens
  misc_feature (138)..(138): n is a, c, g, or t
gcgatctagacctagttagccaagtctctaacgtgacatagggaaagcttgcaaggcaactggcccgcccccgctctgcgcctgtctctcggccacgcctattgctgcaggatgacgcgcacctctagaacccgcccnggagggtgagtgggacgcagggaagagtcgcacggacgcactcgcgctgcggccagcgcccgggcctgcgggcccgggcggcggctgtgttgcgcagtcttcatgggttcccgacgaggaggtctctgtggctgcggcggcggctgctaactgcgccacctgctgcagcctgtccccgccgctctgaagcggccgcgtcgaagccgaaatgccgccaccccggaccggccgaggccttctctggctgggtctggttctgagctccgtctgcgtcgccctcggatccgaaacgcaggccaactcgaccacagatgctctgaacgttcttctcatcatcgtggatgacctgcgcccctccctgggctgttatggggataagctggtgaggtccccaaatattgaccaactggcatcccacagcctcctcttccagaatgcctttgcgcagcaagcagtgtgcgccccgagccgcgtttctttcctcactggcaggagacctgacaccacccgcctgtacgacttcaactcctactggagggtgcacgctggaaacttctccaccatcccccagtacttcaaggagaatggctatgtgaccatgtcggtgggaaaagtctttcaccctgggatatcttctaaccataccgatgattctccgtatagctggtcttttccaccttatcatccttcctctgagaagtatgaaaacactaagacatgtcgagggccagatggagaactccatgccaacctgctttgccctgtggatgtgctggatgttcccgagggcaccttgcctgacaaacagagcactgagcaagccatacagttgttggaaaagatgaaaacgtcagccagtcctttcttcctggccgttgggtatcataagccacacatccccttcagataccccaaggaatttcagaagttgtatcccttggagaacatcaccctggcccccgatcccgaggtccctgatggcctaccccctgtggcctacaacccctggatggacatcaggcaacgggaagacgtccaagccttaaacatcagtgtgccgtatggtccaattcctgtggactttcagcggaaaatccgccagagctactttgcctctgtgtcatatttggatacacaggtcggccgcctcttgagtgctttggacgatcttcagctggccaacagcaccatcattgcatttacctcggatcatgggtgggctctaggtgaacatggagaatgggccaaatacagcaattttgatgttgctacccatgttcccctgatattctatgttcctggaaggacggcttcacttccggaggcaggcgagaagcttttcccttacctcgacccttttgattccgcctcacagttgatggagccaggcaggcaatccatggaccttgtggaacttgtgtctctttttcccacgctggctggacttgcaggactgcaggttccacctcgctgccccgttccttcatttcacgttgagctgtgcagagaaggcaagaaccttctgaagcattttcgattccgtgacttggaagaggatccgtacctccctggtaatccccgtgaactgattgcctatagccagtatccccggccttcagacatccctcagtggaattctgacaagccgagtttaaaagatataaagatcatgggctattccatacgcaccatagactataggtatactgtgtgggttggcttcaatcctgatgaatttctagctaacttttctgacatccatgcaggggaactgtattttgtggattctgacccattgcaggatcacaatatgtataatgattcccaaggtggagatcttttccagttgttgatgccttgagttttgccaaccatggatggcaaatgtgatgtgctcccttccagctggtgagaggaggagttagagctggtcgttttgtgattacccataatattggaagcagcctgagggctagttaatccaaacatgcatcaacaatttggcctgagaatatgtaacagccaaaccttttcgtttagtctttattaaaatttataattggtaattggaccagttttttttttaatttccctctttttaaaacagttacggcttatttactgaataaatacaaagcaaacaaactcaagttatgtcatacctttggatacgaagaccatacataataaccaaacataacattatacacaaagaatactttcattatttgtggaatttagtgcatttcaaaaagtaatcatatatcaaactaggcaccacactaagttcctgattattttgtttataatttaataatatatcttatgagccctatatattcaaaatattatgttaacatgtaatccatgtttctttttcaaatctaaagttaaaaaaaaatagcagaagccagtgtcttaaagtctatcttttgtttctaagaccatgggatttcataatctcaagataaaatatgtatgaagtaattaatgtagaatttttacaccaaataataaataatgcttaataaactagagatatgagatgtgtaggaaatttggttaaacttttttcagatactttctggcccaaataataatttgttagcaaataatatgacccttgaactcaatggccatctattaaaagactgttgttcacactggaaaacatttaaagatgtgactatatccatgggtggattgaatcactcaaaatatattagtatccttctttagggatggttggttacagacatgtatttattcaggaggcagaaaatattccattttaattgcttattaaagaaaacattaaattctaaattattttgaggactgtgaagacttttcattagtgtaatattaggtcattgtcaatctcccagaatgtagttctatattctctaaatatgaaagtatccagaaaggccagtggtagtaaaaagcttagtgtatataatctcaaaagggatggaatatttacagctcatatttataacatgttgaatcttctcagttatcagtagtcatcagaagtgtcaatagctttctaaataaatattaaatatctactgtcctgtagtgaaggagtaatttttagtaattttctctttacaaagtctccagtgtttccaggtaaatatttgtgaaacaaaatacagcaaactacattgttacttcagtgtattgttgccaaaaatgacaagatattatattaaaatcagtaaattttagacagattttaaaaattaattagcctacaatagaggttatatggtaacacggtgatcttctaagcagttaagtgactgactgttctggcaacaacgacttctccgtgactgaagggccctgttcatttcctgatcctgaagctcgtctctcttttgagcctccgcttgctttggtcgatggtttccctcagctttttctttgctgttcttcatcctcgttgttgctgtcatcatgttcactgtggcttttacaatacagcctgtaaattccttatgacatagttcagtgcatttggctttatcgcctgctccacagttctttacctttaatgaatattttaccacgaaattgccatataatatcttgtcttttttgggggtgtgaattttttgcattgttctgatcatattctttatcatgtaatttatgttcttttttactaagtattatgtgtggttattatagattttcacaaagatatattgctggtaatatattttattgtgtagtcttataatttacttaaccttctttcaattgttagaaatttaggctatttccagattttcagtattgtaaataatgctgtgatgaccaattttgtgaataaaatgtttttatgtatttcagattattcccttaggatagtctctcagtgccaagttgtcaaaaacatctctattttgcttatcttcctgctctcttgctgccttagggggtagtaaactgaaacataaagtaaacatgcatacaaataaaaaacataaaacaaaaataagcaacctgatggtaataggtgaaagtggtaacctgttttaactttgaattcttgccgggcgcggtggctcacgcctgtaatcccagcactttgggaggctgaggcgggtggatcacgaggtcaggagttcaaaaccagcctggccaagatggtgaaatcccgtctctactaaaaatacaaaaattagccgggcgtggtggcgggcgcctgtaatcccagctacttgggaggctgaggcagagaattgcttgaacccaggaggcggaggttgcagtgagccaagatcgcgccactgcactccagcctgggtgacagagcgagactccgtctcaaataaaaaacaacaaaaaacaaaaaaaacttaaaattctttgcttgttagtgaccttgatcatggttctctttgtacgatagttgggcatctgtatttccacttgtgtgaatttgcctttaaattttggttatgggtttcaccttttaaaataatcaaacatatttatcttttcctgtgtgataggtttttttctgtatcttttcctgttaaacacacagacccctccccaatctggacattgaataaatattcattttcctttgca

SEQ ID NO: 374517 - DNA, 6398 bp, Homo sapiens
ctgatgcgcgccagccaaccaggccaaggccaggggacctcgagaccggcagcctcgacgaagaaccggaaggaggaaaaggaacgggagggaggaagatctcccgcattgacttcataaccaagttctgggtccctgcctctggagtgcctgatgagacaaaacggctcctcgtcctgcatccccgctgctacttccagaattcaggcctcgtggtctggagcctgcactgttccatgagcctcctgagcaacctggagtcctctgtctttcttccctcagtgagatgcgcctacttctccctggagaagctcgaggaagcaggaatgctggagatgagacccagcacaccctgcctgcatggcgctgcgctgcaccttcactctggtcacgggtctggcagtcggctcaccaattcgtcctgcttccctgggactcgccggcttttagcactgcaattcactcagcaaactgggactgttggtcaccctacctggcagccagtgataagggctggtgtcattggcatgacagacctgccttggctgagcgttcacccgtcttcggagttcagccaccttagcaagtcctgggtttgttcttcagattttgctgctcgcccattgcctggatcgggggctactttgtaaaccaccaggaagactccagtgtttctgcttaatttttagatgtttgttaattgctcttggcctctcattaatcccctgtgggtcatccaggaaatatactcaccactgtctgttctctgagttttcatttccaggcatccgccctgcctggatctcctcacctgccaggaacttcctctccacaagccggccatcccagcaaaagttctaacaccaaagatgactgccaggggcatgaaggggatgtgcttccagggcatttgctggcagggcgtctcgtgatctcttggtattggtgtgagcacagcctggcaggagagggcagatctccatgcaaagtatgtcagaaagcagatggaagccaggccccctcctgaaagaggctccttgaagataattctaacatctttgtcatcagtgttgacatctcttgattgtatcctgtcattccatttgagatcttcctggttctggctggcatcctctgacatcactccagcagaagaaagggaaggaacacgctgcattactgcgtgggatatcttctaaccataccgatgattctccgtatagctggtcttttccaccttatcatccttcctctgagaagtatgaaaacactaagacatgtcgagggccagatggagaactccatgccaacctgctttgccctgtggatgtgctggatgttcccgagggcaccttgcctgacaaacagagcactgagcaagccatacagttgttggaaaagatgaaaacgtcagccagtcctttcttcctggccgttgggtatcataagccacacatccccttcagataccccaaggaatttcagaagttgtatcccttggagaacatcaccctggcccccgatcccgaggtccctgatggcctaccccctgtggcctacaacccctggatggacatcaggcaacgggaagacgtccaagccttaaacatcagtgtgccgtatggtccaattcctgtggactttcagcggaaaatccgccagagctactttgcctctgtgtcatatttggatacacaggtcggccgcctcttgagtgctttggacgatcttcagctggccaacagcaccatcattgcatttacctcggatcatgggtgggctctaggtgaacatggagaatgggccaaatacagcaattttgatgttgctacccatgttcccctgatattctatgttcctggaaggacggcttcacttccggaggcaggcgagaagcttttcccttacctcgacccttttgattccgcctcacagttgatggagccaggcaggcaatccatggaccttgtggaacttgtgtctctttttcccacgctggctggacttgcaggactgcaggttccacctcgctgccccgttccttcatttcacgttgagctgtgcagagaaggcaagaaccttctgaagcattttcgattccgtgacttggaagaggatccgtacctccctggtaatccccgtgaactgattgcctatagccagtatccccggccttcagacatccctcagtggaattctgacaagccgagtttaaaagatataaagatcatgggctattccatacgcaccatagactataggtatactgtgtgggttggcttcaatcctgatgaatttctagctaacttttctgacatccatgcaggggaactgtattttgtggattctgacccattgcaggatcacaatatgtataatgattcccaaggtggagatcttttccagttgttgatgccttgagttttgccaaccatggatggcaaatgtgatgtgctcccttccagctggtgagaggaggagttagagctggtcgttttgtgattacccataatattggaagcagcctgagggctagttaatccaaacatgcatcaacaatttggcctgagaatatgtaacagccaaaccttttcgtttagtctttattaaaatttataattggtaattggaccagttttttttttaatttccctctttttaaaacagttacggcttatttactgaataaatacaaagcaaacaaactcaagttatgtcatacctttggatacgaagaccatacataataaccaaacataacattatacacaaagaatactttcattatttgtggaatttagtgcatttcaaaaagtaatcatatatcaaactaggcaccacactaagttcctgattattttgtttataatttaataatatatcttatgagccctatatattcaaaatattatgttaacatgtaatccatgtttctttttcaaatctaaagttaaaaaaaaatagcagaagccagtgtcttaaagtctatcttttgtttctaagaccatgggatttcataatctcaagataaaatatgtatgaagtaattaatgtagaatttttacaccaaataataaataatgcttaataaactagagatatgagatgtgtaggaaatttggttaaacttttttcagatactttctggcccaaataataatttgttagcaaataatatgacccttgaactcaatggccatctattaaaagactgttgttcacactggaaaacatttaaagatgtgactatatccatgggtggattgaatcactcaaaatatattagtatccttctttagggatggttggttacagacatgtatttattcaggaggcagaaaatattccattttaattgcttattaaagaaaacattaaattctaaattattttgaggactgtgaagacttttcattagtgtaatattaggtcattgtcaatctcccagaatgtagttctatattctctaaatatgaaagtatccagaaaggccagtggtagtaaaaagcttagtgtatataatctcaaaagggatggaatatttacagctcatatttataacatgttgaatcttctcagttatcagtagtcatcagaagtgtcaatagctttctaaataaatattaaatatctactgtcctgtagtgaaggagtaatttttagtaattttctctttacaaagtctccagtgtttccaggtaaatatttgtgaaacaaaatacagcaaactacattgttacttcagtgtattgttgccaaaaatgacaagatattatattaaaatcagtaaattttagacagattttaaaaattaattagcctacaatagaggttatatggtaacacggtgatcttctaagcagttaagtgactgactgttctggcaacaacgacttctccgtgactgaagggccctgttcatttcctgatcctgaagctcgtctctcttttgagcctccgcttgctttggtcgatggtttccctcagctttttctttgctgttcttcatcctcgttgttgctgtcatcatgttcactgtggcttttacaatacagcctgtaaattccttatgacatagttcagtgcatttggctttatcgcctgctccacagttctttacctttacttggcttagagaaactgtatctttgttgcttcatataacctttccccaaccccactaagctggacataacttattagtggtcctcccgtcactttatttgtagaaatctctctttcacatgagcaggggttctttcatgtggtttagctgacagcagaactagtgattctagacattttgcatggccctcattcagtggctcacaaacatgagggagcatcagaactacttgaggggcttgttaaaacccagtgcgttagaagtcggatgcggtggctcacacctgtaatcccagcactttgggaggcccaggcaggcggatcacttgaggttaggagttcaagaccagcctggccaacatggtgaaaccccgtctctactaaaaatacaaaagttagccgggtgtggtggtgcatgcctgtaatcccagcttcttgggaggccaaggcacaagaatcgcttgaaccaggagacggaggtttcagtgaatgaagatcgtgccattgtattccagcctcggcaacacagcaggactgtgattttctttggagactcctagattttctgtggttttgaactgaatttgttggatgttggcaagtgcctcttatgagctgtttctttatcctgcatttgccccacaaagacttatctggaggtgagcaaagtatgtttggtagtgaggtcacaaaggcaatcagccccttcctccccactcccattgccatcttctcagtccttctccctttctttccaagtagtttacccacccctcctctttcctcccctgtccctaaaataatccacgtgtcttcctaaaatctctctttgatcctgtcctttgataacaccgtcagtgcctactactgggtctagacagacctctgttgagcagtcagagtcttccctgactccacaatgcccctttccttggctgaccagtatgactactggtccccacctttcccttgcctatccctacctccctcctactaggttgtcccatccctctcttcacccattcattcatgaccatttttcactaccaagctccccccctcccgaaggaggctgaggtttttgtgactctctagactctattgtgggatggaatgaacattgctaaagaatcttgtgttcgctttactttaaaaaggtatttttttcctaattataaaactgatgtgtcagttacggaaaaattagaaatgcagcacaaatacatgaatattttaccacgaaattgccatataatatcttgtcttttttgggggtgtgaattttttgcattgttctgatcatattctttatcatgtaatttatgttcttttttactaagtattatgtgtggttattatagattttcacaaagatatattgctggtaatatattttattgtgtagtcttataatttacttaaccttctttcaattgttagaaatttaggctatttccagattttcagtattgtaaataatgctgtgatgaccaattttgtgaataaaatgtttttatgtatttcagattattcccttaggatagtctctcagtgccaagttgtcaaaaacatctctattttgcttatcttcctgctctcttgctgccttagggggtagtaaactgaaacataaagtaaacatgcatacaaataaaaaacataaaacaaaaataagcaacctgatggtaataggtgaaagtggtaacctgttttaactttgaattcttgccgggcgcggtggctcacgcctgtaatcccagcactttgggaggctgaggcgggtggatcacgaggtcaggagttcaaaaccagcctggccaagatggtgaaatcccgtctctactaaaaatacaaaaattagccgggcgtggtggcgggcgcctgtaatcccagctacttgggaggctgaggcagagaattgcttgaacccaggaggcggaggttgcagtgagccaagatcgcgccactgcactccagcctgggtgacagagcgagactccgtctcaaataaaaaacaacaaaaaacaaaaaaaacttaaaattctttgcttgttagtgaccttgatcatggttctctttgtacgatagttgggcatctgtatttccacttgtgtgaatttgcctttaaattttggttatgggtttcaccttttaaaataatcaaacatatttatcttttcctgtgtgataggtttttttctgtatcttttcctgttaaacacacagacccctccccaatctggacattgaataaatattcattttcctttgca

SEQ ID NO: 374518 - DNA, 6202 bp, Homo sapiens
ctgatgcgcgccagccaaccaggccaaggccaggggacctcgagaccggcagcctcgacgaagaaccggaaggaggaaaaggaacgggagggaggaagatgagatgcgcctacttctccctggagaagctcgaggaagcaggaatgctggagatgagagacctcgtctgctcaggggcttgttcttacatcttttgcagggctgttttgaagtcagtattcacttaagcactccaaattacccagcacaccctgcctgcatggcgctgcgctgcaccttcactctggtcacgggtctggcagtcggctcaccaattcgtcctgcttccctgggactcgccggcttttagcactgcaattcactcagcaaactgggactgttggtcaccctacctggcagccagtgataagattttgctgctcgcccattgcctggatcgggggctactttgtaaaccaccaggaagactccagtgtttctgcttaatttttagatgtttgttaattgctcttggcctctcattaatcccctgtgggtcatccaggaaatatactcaccactgtctgttctctgagttttcatttccaggcatccgccctgcctggatctcctcacctgccaggaacttcctctccacaagccggccatcccagcaaaagttctaacaccaaagatgactgccaggggcatgaaggggatgtgcttccagggcatttgctggcagggcgtctcgtgatctcttggtattggtgtgagcacagcctggcaggagagggcagatctccatgcaaagtatgtcagaaagcagatggaagccaggccccctcctgaaagaggctccttgaagataattctaacatctttgtcatcagtgttgacatctcttgattgtatcctgtcattccatttgagatcttcctggttctggctggcatcctctgacatcactccagcagaagaaagggaaggaacacgctgcattactgcgtgggatatcttctaaccataccgatgattctccgtatagctggtcttttccaccttatcatccttcctctgagaagtatgaaaacactaagacatgtcgagggccagatggagaactccatgccaacctgctttgccctgtggatgtgctggatgttcccgagggcaccttgcctgacaaacagagcactgagcaagccatacagttgttggaaaagatgaaaacgtcagccagtcctttcttcctggccgttgggtatcataagccacacatccccttcagataccccaaggaatttcagaagttgtatcccttggagaacatcaccctggcccccgatcccgaggtccctgatggcctaccccctgtggcctacaacccctggatggacatcaggcaacgggaagacgtccaagccttaaacatcagtgtgccgtatggtccaattcctgtggactttcagcggaaaatccgccagagctactttgcctctgtgtcatatttggatacacaggtcggccgcctcttgagtgctttggacgatcttcagctggccaacagcaccatcattgcatttacctcggatcatgggtgggctctaggtgaacatggagaatgggccaaatacagcaattttgatgttgctacccatgttcccctgatattctatgttcctggaaggacggcttcacttccggaggcaggcgagaagcttttcccttacctcgacccttttgattccgcctcacagttgatggagccaggcaggcaatccatggaccttgtggaacttgtgtctctttttcccacgctggctggacttgcaggactgcaggttccacctcgctgccccgttccttcatttcacgttgagctgtgcagagaaggcaagaaccttctgaagcattttcgattccgtgacttggaagaggatccgtacctccctggtaatccccgtgaactgattgcctatagccagtatccccggccttcagacatccctcagtggaattctgacaagccgagtttaaaagatataaagatcatgggctattccatacgcaccatagactataggtatactgtgtgggttggcttcaatcctgatgaatttctagctaacttttctgacatccatgcaggggaactgtattttgtggattctgacccattgcaggatcacaatatgtataatgattcccaaggtggagatcttttccagttgttgatgccttgagttttgccaaccatggatggcaaatgtgatgtgctcccttccagctggtgagaggaggagttagagctggtcgttttgtgattacccataatattggaagcagcctgagggctagttaatccaaacatgcatcaacaatttggcctgagaatatgtaacagccaaaccttttcgtttagtctttattaaaatttataattggtaattggaccagttttttttttaatttccctctttttaaaacagttacggcttatttactgaataaatacaaagcaaacaaactcaagttatgtcatacctttggatacgaagaccatacataataaccaaacataacattatacacaaagaatactttcattatttgtggaatttagtgcatttcaaaaagtaatcatatatcaaactaggcaccacactaagttcctgattattttgtttataatttaataatatatcttatgagccctatatattcaaaatattatgttaacatgtaatccatgtttctttttcaaatctaaagttaaaaaaaaatagcagaagccagtgtcttaaagtctatcttttgtttctaagaccatgggatttcataatctcaagataaaatatgtatgaagtaattaatgtagaatttttacaccaaataataaataatgcttaataaactagagatatgagatgtgtaggaaatttggttaaacttttttcagatactttctggcccaaataataatttgttagcaaataatatgacccttgaactcaatggccatctattaaaagactgttgttcacactggaaaacatttaaagatgtgactatatccatgggtggattgaatcactcaaaatatattagtatccttctttagggatggttggttacagacatgtatttattcaggaggcagaaaatattccattttaattgcttattaaagaaaacattaaattctaaattattttgaggactgtgaagacttttcattagtgtaatattaggtcattgtcaatctcccagaatgtagttctatattctctaaatatgaaagtatccagaaaggccagtggtagtaaaaagcttagtgtatataatctcaaaagggatggaatatttacagctcatatttataacatgttgaatcttctcagttatcagtagtcatcagaagtgtcaatagctttctaaataaatattaaatatctactgtcctgtagtgaaggagtaatttttagtaattttctctttacaaagtctccagtgtttccaggtaaatatttgtgaaacaaaatacagcaaactacattgttacttcagtgtattgttgccaaaaatgacaagatattatattaaaatcagtaaattttagacagattttaaaaattaattagcctacaatagaggttatatggtaacacggtgatcttctaagcagttaagtgactgactgttctggcaacaacgacttctccgtgactgaagggccctgttcatttcctgatcctgaagctcgtctctcttttgagcctccgcttgctttggtcgatggtttccctcagctttttctttgctgttcttcatcctcgttgttgctgtcatcatgttcactgtggcttttacaatacagcctgtaaattccttatgacatagttcagtgcatttggctttatcgcctgctccacagttctttacctttacttggcttagagaaactgtatctttgttgcttcatataacctttccccaaccccactaagctggacataacttattagtggtcctcccgtcactttatttgtagaaatctctctttcacatgagcaggggttctttcatgtggtttagctgacagcagaactagtgattctagacattttgcatggccctcattcagtggctcacaaacatgagggagcatcagaactacttgaggggcttgttaaaacccagtgcgttagaagtcggatgcggtggctcacacctgtaatcccagcactttgggaggcccaggcaggcggatcacttgaggttaggagttcaagaccagcctggccaacatggtgaaaccccgtctctactaaaaatacaaaagttagccgggtgtggtggtgcatgcctgtaatcccagcttcttgggaggccaaggcacaagaatcgcttgaaccaggagacggaggtttcagtgaatgaagatcgtgccattgtattccagcctcggcaacacagcaggactgtgattttctttggagactcctagattttctgtggttttgaactgaatttgttggatgttggcaagtgcctcttatgagctgtttctttatcctgcatttgccccacaaagacttatctggaggtgagcaaagtatgtttggtagtgaggtcacaaaggcaatcagccccttcctccccactcccattgccatcttctcagtccttctccctttctttccaagtagtttacccacccctcctctttcctcccctgtccctaaaataatccacgtgtcttcctaaaatctctctttgatcctgtcctttgataacaccgtcagtgcctactactgggtctagacagacctctgttgagcagtcagagtcttccctgactccacaatgcccctttccttggctgaccagtatgactactggtccccacctttcccttgcctatccctacctccctcctactaggttgtcccatccctctcttcacccattcattcatgaccatttttcactaccaagctccccccctcccgaaggaggctgaggtttttgtgactctctagactctattgtgggatggaatgaacattgctaaagaatcttgtgttcgctttactttaaaaaggtatttttttcctaattataaaactgatgtgtcagttacggaaaaattagaaatgcagcacaaatacatgaatattttaccacgaaattgccatataatatcttgtcttttttgggggtgtgaattttttgcattgttctgatcatattctttatcatgtaatttatgttcttttttactaagtattatgtgtggttattatagattttcacaaagatatattgctggtaatatattttattgtgtagtcttataatttacttaaccttctttcaattgttagaaatttaggctatttccagattttcagtattgtaaataatgctgtgatgaccaattttgtgaataaaatgtttttatgtatttcagattattcccttaggatagtctctcagtgccaagttgtcaaaaacatctctattttgcttatcttcctgctctcttgctgccttagggggtagtaaactgaaacataaagtaaacatgcatacaaataaaaaacataaaacaaaaataagcaacctgatggtaataggtgaaagtggtaacctgttttaactttgaattcttgccgggcgcggtggctcacgcctgtaatcccagcactttgggaggctgaggcgggtggatcacgaggtcaggagttcaaaaccagcctggccaagatggtgaaatcccgtctctactaaaaatacaaaaattagccgggcgtggtggcgggcgcctgtaatcccagctacttgggaggctgaggcagagaattgcttgaacccaggaggcggaggttgcagtgagccaagatcgcgccactgcactccagcctgggtgacagagcgagactccgtctcaaataaaaaacaacaaaaaacaaaaaaaacttaaaattctttgcttgttagtgaccttgatcatggttctctttgtacgatagttgggcatctgtatttccacttgtgtgaatttgcctttaaattttggttatgggtttcaccttttaaaataatcaaacatatttatcttttcctgtgtgataggtttttttctgtatcttttcctgttaaacacacagacccctccccaatctggacattgaataaatattcattttcctttgca

SEQ ID NO: 374519 - DNA, 4510 bp, Homo sapiens
ctcgcgggctgtaccaattcggctcgagtcctgattccgcctcacagttgatggagccaggcaggcaatccatggaccttgtggaacttgtgtctctttttcccacgctggctggacttgcaggactgcaggttccacctcgctgccccgttccttcatttcacgttgagctgtgcagagaaggcaagaaccttctgaagcattttcgattccgtgacttggaagaggatccgtacctccctggtaatccccgtgaactgattgcctatagccagtatccccggccttcagacatccctcagtggaattctgacaagccgagtttaaaagatataaagatcatgggctattccatacgcaccatagactataggtatactgtgtgggttggcttcaatcctgatgaatttctagctaacttttctgacatccatgcaggggaactgtattttgtggattctgacccattgcaggatcacaatatgtataatgattcccaaggtggagatcttttccagttgttgatgccttgagttttgccaaccatggatggcaaatgtgatgtgctcccttccagctggtgagaggaggagttagagctggtcgttttgtgattacccataatattggaagcagcctgagggctagttaatccaaacatgcatcaacaatttggcctgagaatatgtaacagccaaaccttttcgtttagtctttattaaaatttataattggtaattggaccagttttttttttaatttccctctttttaaaacagttacggcttatttactgaataaatacaaagcaaacaaactcaagttatgtcatacctttggatacgaagaccatacataataaccaaacataacattatacacaaagaatactttcattatttgtggaatttagtgcatttcaaaaagtaatcatatatcaaactaggcaccacactaagttcctgattattttgtttataatttaataatatatcttatgagccctatatattcaaaatattatgttaacatgtaatccatgtttctttttcaaatctaaagttaaaaaaaaatagcagaagccagtgtcttaaagtctatcttttgtttctaagaccatgggatttcataatctcaagataaaatatgtatgaagtaattaatgtagaatttttacaccaaataataaataatgcttaataaactagagatatgagatgtgtaggaaatttggttaaacttttttcagatactttctggcccaaataataatttgttagcaaataatatgacccttgaactcaatggccatctattaaaagactgttgttcacactggaaaacatttaaagatgtgactatatccatgggtggattgaatcactcaaaatatattagtatccttctttagggatggttggttacagacatgtatttattcaggaggcagaaaatattccattttaattgcttattaaagaaaacattaaattctaaattattttgaggactgtgaagacttttcattagtgtaatattaggtcattgtcaatctcccagaatgtagttctatattctctaaatatgaaagtatccagaaaggccagtggtagtaaaaagcttagtgtatataatctcaaaagggatggaatatttacagctcatatttataacatgttgaatcttctcagttatcagtagtcatcagaagtgtcaatagctttctaaataaatattaaatatctactgtcctgtagtgaaggagtaatttttagtaattttctctttacaaagtctccagtgtttccaggtaaatatttgtgaaacaaaatacagcaaactacattgttacttcagtgtattgttgccaaaaatgacaagatattatattaaaatcagtaaattttagacagattttaaaaattaattagcctacaatagaggttatatggtaacacggtgatcttctaagcagttaagtgactgactgttctggcaacaacgacttctccgtgactgaagggccctgttcatttcctgatcctgaagctcgtctctcttttgagcctccgcttgctttggtcgatggtttccctcagctttttctttgctgttcttcatcctcgttgttgctgtcatcatgttcactgtggcttttacaatacagcctgtaaattccttatgacatagttcagtgcatttggctttatcgcctgctccacagttctttacctttacttggcttagagaaactgtatctttgttgcttcatataacctttccccaaccccactaagctggacataacttattagtggtcctcccgtcactttatttgtagaaatctctctttcacatgagcaggggttctttcatgtggtttagctgacagcagaactagtgattctagacattttgcatggccctcattcagtggctcacaaacatgagggagcatcagaactacttgaggggcttgttaaaacccagtgcgttagaagtcggatgcggtggctcacacctgtaatcccagcactttgggaggcccaggcaggcggatcacttgaggttaggagttcaagaccagcctggccaacatggtgaaaccccgtctctactaaaaatacaaaagttagccgggtgtggtggtgcatgcctgtaatcccagcttcttgggaggccaaggcacaagaatcgcttgaaccaggagacggaggtttcagtgaatgaagatcgtgccattgtattccagcctcggcaacacagcaggactgtgattttctttggagactcctagattttctgtggttttgaactgaatttgttggatgttggcaagtgcctcttatgagctgtttctttatcctgcatttgccccacaaagacttatctggaggtgagcaaagtatgtttggtagtgaggtcacaaaggcaatcagccccttcctccccactcccattgccatcttctcagtccttctccctttctttccaagtagtttacccacccctcctctttcctcccctgtccctaaaataatccacgtgtcttcctaaaatctctctttgatcctgtcctttgataacaccgtcagtgcctactactgggtctagacagacctctgttgagcagtcagagtcttccctgactccacaatgcccctttccttggctgaccagtatgactactggtccccacctttcccttgcctatccctacctccctcctactaggttgtcccatccctctcttcacccattcattcatgaccatttttcactaccaagctccccccctcccgaaggaggctgaggtttttgtgactctctagactctattgtgggatggaatgaacattgctaaagaatcttgtgttcgctttactttaaaaaggtatttttttcctaattataaaactgatgtgtcagttacggaaaaattagaaatgcagcacaaatacatgaatattttaccacgaaattgccatataatatcttgtcttttttgggggtgtgaattttttgcattgttctgatcatattctttatcatgtaatttatgttcttttttactaagtattatgtgtggttattatagattttcacaaagatatattgctggtaatatattttattgtgtagtcttataatttacttaaccttctttcaattgttagaaatttaggctatttccagattttcagtattgtaaataatgctgtgatgaccaattttgtgaataaaatgtttttatgtatttcagattattcccttaggatagtctctcagtgccaagttgtcaaaaacatctctattttgcttatcttcctgctctcttgctgccttagggggtagtaaactgaaacataaagtaaacatgcatacaaataaaaaacataaaacaaaaataagcaacctgatggtaataggtgaaagtggtaacctgttttaactttgaattcttgccgggcgcggtggctcacgcctgtaatcccagcactttgggaggctgaggcgggtggatcacgaggtcaggagttcaaaaccagcctggccaagatggtgaaatcccgtctctactaaaaatacaaaaattagccgggcgtggtggcgggcgcctgtaatcccagctacttgggaggctgaggcagagaattgcttgaacccaggaggcggaggttgcagtgagccaagatcgcgccactgcactccagcctgggtgacagagcgagactccgtctcaaataaaaaacaacaaaaaacaaaaaaaacttaaaattctttgcttgttagtgaccttgatcatggttctctttgtacgatagttgggcatctgtatttccacttgtgtgaatttgcctttaaattttggttatgggtttcaccttttaaaataatcaaacatatttatcttttcctgtgtgataggtttttttctgtatcttttcctgttaaacacacagacccctccccaatctggacattgaataaatattcattttcctttgca

SEQ ID NO: 374520 - DNA, 3256 bp, Homo sapiens
gacaggccaagtgcacaagcattgcagtgcactgcatggtcagactagaagaggatcaccacataaagactgttgttcacactggaaaacatttaaagatgtgactatatccatgggtggattgaatcactcaaaatatattagtatccttctttagggatggttggttacagacatgtatttattcaggaggcagaaaatattccattttaattgcttattaaagaaaacattaaattctaaattattttgaggactgtgaagacttttcattagtgtaatattaggtcattgtcaatctcccagaatgtagttctatattctctaaatatgaaagtatccagaaaggccagtggtagtaaaaagcttagtgtatataatctcaaaagggatggaatatttacagctcatatttataacatgttgaatcttctcagttatcagtagtcatcagaagtgtcaatagctttctaaataaatattaaatatctactgtcctgtagtgaaggagtaatttttagtaattttctctttacaaagtctccagtgtttccaggtaaatatttgtgaaacaaaatacagcaaactacattgttacttcagtgtattgttgccaaaaatgacaagatattatattaaaatcagtaaattttagacagattttaaaaattaattagcctacaatagaggttatatggtaacacggtgatcttctaagcagttaagtgactgactgttctggcaacaacgacttctccgtgactgaagggccctgttcatttcctgatcctgaagctcgtctctcttttgagcctccgcttgctttggtcgatggtttccctcagctttttctttgctgttcttcatcctcgttgttgctgtcatcatgttcactgtggcttttacaatacagcctgtaaattccttatgacatagttcagtgcatttggctttatcgcctgctccacagttctttacctttacttggcttagagaaactgtatctttgttgcttcatataacctttccccaaccccactaagctggacataacttattagtggtcctcccgtcactttatttgtagaaatctctctttcacatgagcaggggttctttcatgtggtttagctgacagcagaactagtgattctagacattttgcatggccctcattcagtggctcacaaacatgagggagcatcagaactacttgaggggcttgttaaaacccagtgcgttagaagtcggatgcggtggctcacacctgtaatcccagcactttgggaggcccaggcaggcggatcacttgaggttaggagttcaagaccagcctggccaacatggtgaaaccccgtctctactaaaaatacaaaagttagccgggtgtggtggtgcatgcctgtaatcccagcttcttgggaggccaaggcacaagaatcgcttgaaccaggagacggaggtttcagtgaatgaagatcgtgccattgtattccagcctcggcaacacagcaggactgtgattttctttggagactcctagattttctgtggttttgaactgaatttgttggatgttggcaagtgcctcttatgagctgtttctttatcctgcatttgccccacaaagacttatctggaggtgagcaaagtatgtttggtagtgaggtcacaaaggcaatcagccccttcctccccactcccattgccatcttctcagtccttctccctttctttccaagtagtttacccacccctcctctttcctcccctgtccctaaaataatccacgtgtcttcctaaaatctctctttgatcctgtcctttgataacaccgtcagtgcctactactgggtctagacagacctctgttgagcagtcagagtcttccctgactccacaatgcccctttccttggctgaccagtatgactactggtccccacctttcccttgcctatccctacctccctcctactaggttgtcccatccctctcttcacccattcattcatgaccatttttcactaccaagctccccccctcccgaaggaggctgaggtttttgtgactctctagactctattgtgggatggaatgaacattgctaaagaatcttgtgttcgctttactttaaaaaggtatttttttcctaattataaaactgatgtgtcagttacggaaaaattagaaatgcagcacaaatacatgaatattttaccacgaaattgccatataatatcttgtcttttttgggggtgtgaattttttgcattgttctgatcatattctttatcatgtaatttatgttcttttttactaagtattatgtgtggttattatagattttcacaaagatatattgctggtaatatattttattgtgtagtcttataatttacttaaccttctttcaattgttagaaatttaggctatttccagattttcagtattgtaaataatgctgtgatgaccaattttgtgaataaaatgtttttatgtatttcagattattcccttaggatagtctctcagtgccaagttgtcaaaaacatctctattttgcttatcttcctgctctcttgctgccttagggggtagtaaactgaaacataaagtaaacatgcatacaaataaaaaacataaaacaaaaataagcaacctgatggtaataggtgaaagtggtaacctgttttaactttgaattcttgccgggcgcggtggctcacgcctgtaatcccagcactttgggaggctgaggcgggtggatcacgaggtcaggagttcaaaaccagcctggccaagatggtgaaatcccgtctctactaaaaatacaaaaattagccgggcgtggtggcgggcgcctgtaatcccagctacttgggaggctgaggcagagaattgcttgaacccaggaggcggaggttgcagtgagccaagatcgcgccactgcactccagcctgggtgacagagcgagactccgtctcaaataaaaaacaacaaaaaacaaaaaaaacttaaaattctttgcttgttagtgaccttgatcatggttctctttgtacgatagttgggcatctgtatttccacttgtgtgaatttgcctttaaattttggttatgggtttcaccttttaaaataatcaaacatatttatcttttcctgtgtgataggtttttttctgtatcttttcctgttaaacacacagacccctccccaatctggacattgaataaatattcattttcctttgca

SEQ ID NO: 374521 - DNA, 2313 bp, Homo sapiens
  misc_feature (248)..(248): n is a, c, g, or t
ttataaaaagaaggaagggcagggcttccaggtgaaaggcatagcacaagcaaaggcaaaaagacgggtaactgctagttgttaagggcagtggctgaatcgctatacccctagcagttctacacctaggggcctgcgggccgctgggtctgcgaagcttgcaaggcaactggcccgcccccgctctgcgcctgtctctcggccacgcctattgctgcaggatgacgcgcacctctagaacccgcccnggagggtgagtgggacgcagggaagagtcgcacggacgcactcgcgctgcggccagcgcccgggcctgcgggcccgggcggcggctgtgttgcgcagtcttcatgggttcccgacgaggaggtctctgtggctgcggcggcggctgctaactgcgccacctgctgcagcctgtccccgccgctctgaagcggccgcgtcgaagccgaaatgccgccaccccggaccggccgaggccttctctggctgggtctggttctgagctccgtctgcgtcgccctcggatccgaaacgcaggccaactcgaccacagatgctctgaacgttcttctcatcatcgtggatgacctgcgcccctccctgggctgttatggggataagctggtgaggtccccaaatattgaccaactggcatcccacagcctcctcttccagaatgcctttgcgcagcaagcagtgtgcgccccgagccgcgtttctttcctcactggcaggagacctgacaccacccgcctgtacgacttcaactcctactggagggtgcacgctggaaacttctccaccatcccccagtacttcaaggagaatggctatgtgaccatgtcggtgggaaaagtctttcaccctgggatatcttctaaccataccgatgattctccgtatagctggtcttttccaccttatcatccttcctctgagaagtatgaaaacactaagacatgtcgagggccagatggagaactccatgccaacctgctttgccctgtggatgtgctggatgttcccgagggcaccttgcctgacaaacagagcactgagcaagccatacagttgttggaaaagatgaaaacgtcagccagtcctttcttcctggccgttgggtatcataagccacacatccccttcagataccccaaggaatttcagaagttgtatcccttggagaacatcaccctggcccccgatcccgaggtccctgatggcctaccccctgtggcctacaacccctggatggacatcaggcaacgggaagacgtccaagccttaaacatcagtgtgccgtatggtccaattcctgtggactttcagcggaaaatccgccagagctactttgcctctgtgtcatatttggatacacaggtcggccgcctcttgagtgctttggacgatcttcagctggccaacagcaccatcattgcatttacctcggatcatgggtgggctctaggtgaacatggagaatgggccaaatacagcaattttgatgttgctacccatgttcccctgatattctatgttcctggaaggacggcttcacttccggaggcaggcgagaagcttttcccttacctcgacccttttgattccgcctcacagttgatggagccaggcaggcaatccatggaccttgtggaacttgtgtctctttttcccacgctggctggacttgcaggactgcaggttccacctcgctgccccgttccttcatttcacgttgagctgtgcagagaaggcaagaaccttctgaagcattttcgattccgtgacttggaagaggatccgtacctccctggtaatccccgtgaactgattgcctatagccagtatccccggccttcagacatccctcagtggaattctgacaagccgagtttaaaagatataaagatcatgggctattccatacgcaccatagactataggtatactgtgtgggttggcttcaatcctgatgaatttctagctaacttttctgacatccatgcaggggaactgtattttgtggattctgacccattgcaggatcacaatatgtataatgattcccaaggtggagatcttttccagttgttgatgccttgagttttgccaaccatggatggcaaatgtgatgtgctcccttccagctggtgagaggaggagttagagctggtcgttttgtgattacccataatattggaagcagcctgagggctagttaatccaaacatgcatcaacaatttggcctgagaatatgtaacagccaaaccttttcgtttagtctttattaaaatttataattggta

SEQ ID NO: 374522 - DNA, 2388 bp, Homo sapiens
  misc_feature (248)..(248): n is a, c, g, or t
ttataaaaagaaggaagggcagggcttccaggtgaaaggcatagcacaagcaaaggcaaaaagacgggtaactgctagttgttaagggcagtggctgaatcgctatacccctagcagttctacacctaggggcctgcgggccgctgggtctgcgaagcttgcaaggcaactggcccgcccccgctctgcgcctgtctctcggccacgcctattgctgcaggatgacgcgcacctctagaacccgcccnggagggtgagtgggacgcagggaagagtcgcacggacgcactcgcgctgcggccagcgcccgggcctgcgggcccgggcggcggctgtgttgcgcagtcttcatgggttcccgacgaggaggtctctgtggctgcggcggcggctgctaactgcgccacctgctgcagcctgtccccgccgctctgaagcggccgcgtcgaagccgaaatgccgccaccccggaccggccgaggccttctctggctgggtctggttctgagctccgtctgcgtcgccctcggatccgaaacgcaggccaactcgaccacagatgctctgaacgttcttctcatcatcgtggatgacctgcgcccctccctgggctgttatggggataagctggtgaggtccccaaatattgaccaactggcatcccacagcctcctcttccagaatgcctttgcgcagcaagcagtgtgcgccccgagccgcgtttctttcctcactggcaggagacctgacaccacccgcctgtacgacttcaactcctactggagggtgcacgctggaaacttctccaccatcccccagtacttcaaggagaatggctatgtgaccatgtcggtgggaaaagtctttcaccctgggatatcttctaaccataccgatgattctccgtatagctggtcttttccaccttatcatccttcctctgagaagtatgaaaacactaagacatgtcgagggccagatggagaactccatgccaacctgctttgccctgtggatgtgctggatgttcccgagggcaccttgcctgacaaacagagcactgagcaagccatacagttgttggaaaagatgaaaacgtcagccagtcctttcttcctggccgttgggtatcataagccacacatccccttcagataccccaaggaatttcagaagttgtatcccttggagaacatcaccctggcccccgatcccgaggtccctgatggcctaccccctgtggcctacaacccctggatggacatcaggcaacgggaagacgtccaagccttaaacatcagtgtgccgtatggtccaattcctgtggactttcagcggaaaatccgccagagctactttgcctctgtgtcatatttggatacacaggtcggccgcctcttgagtgctttggacgatcttcagctggccaacagcaccatcattgcatttacctcggatcatgggtgggctctaggtgaacatggagaatgggccaaatacagcaattttgatgttgctacccatgttcccctgatattctatgttcctggaaggacggcttcacttccggaggcaggcgagaagcttttcccttacctcgacccttttgattccgcctcacagttgatggagccaggcaggcaatccatggaccttgtggaacttgtgtctctttttcccacgctggctggacttgcaggactgcaggttccacctcgctgccccgttccttcatttcacgttgagctgtgcagagaaggcaagaaccttctgaagcattttcgattccgtgacttggaagaggatccgtacctccctggtaatccccgtgaactgattgcctatagccagtatccccggccttcagacatccctcagtggaattctgacaagccgagtttaaaagatataaagatcatgggctattccatacgcaccatagactataggtatactgtgtgggttggcttcaatcctgatgaatttctagctaacttttctgacatccatgcaggggaactgtattttgtggattctgacccattgcaggatcacaatatgtataatgattcccaaggtggagatcttttccagttgttgatgccttgagttttgccaaccatggatggcaaatgtgatgtgctcccttccagctggtgagaggaggagttagagctggtcgttttgtgattacccataatattggaagcagcctgagggctagttaatccaaacatgcatcaacaatttggcctgagaatatgtaacagccaaaccttttcgtttagtctttattaaaatttataattggtaattggaccagttttttttttaatttccctctttttaaaacagttacggcttatttactgaataaatacaaagcaa

SEQ ID NO: 374523 - DNA, 1781 bp, Homo sapiens
  misc_feature (248)..(248): n is a, c, g, or t
ttataaaaagaaggaagggcagggcttccaggtgaaaggcatagcacaagcaaaggcaaaaagacgggtaactgctagttgttaagggcagtggctgaatcgctatacccctagcagttctacacctaggggcctgcgggccgctgggtctgcgaagcttgcaaggcaactggcccgcccccgctctgcgcctgtctctcggccacgcctattgctgcaggatgacgcgcacctctagaacccgcccnggagggtgagtgggacgcagggaagagtcgcacggacgcactcgcgctgcggccagcgcccgggcctgcgggcccgggcggcggctgtgttgcgcagtcttcatgggttcccgacgaggaggtctctgtggctgcggcggcggctgctaactgcgccacctgctgcagcctgtccccgccgctctgaagcggccgcgtcgaagccgaaatgccgccaccccggaccggccgaggccttctctggctgggtctggttctgagctccgtctgcgtcgccctcggatccgaaacgcaggccaactcgaccacagatgctctgaacgttcttctcatcatcgtggatgacctgcgcccctccctgggctgttatggggataagctggtgaggtccccaaatattgaccaactggcatcccacagcctcctcttccagaatgcctttgcgcagcaagcagtgtgcgccccgagccgcgtttctttcctcactggcaggagacctgacaccacccgcctgtacgacttcaactcctactggagggtgcacgctggaaacttctccaccatcccccagtacttcaaggagaatggctatgtgaccatgtcggtgggaaaagtctttcaccctgggatatcttctaaccataccgatgattctccgtatagctggtcttttccaccttatcatccttcctctgagaagtatgaaaacactaagacatgtcgagggccagatggagaactccatgccaacctgctttgccctgtggatgtgctggatgttcccgagggcaccttgcctgacaaacagagcactgagcaagccatacagttgttggaaaagatgaaaacgtcagccagtcctttcttcctggccgttgggtatcataagccacacatccccttcagataccccaaggaatttcagaagttgtatcccttggagaacatcaccctggcccccgatcccgaggtccctgatggcctaccccctgtggcctacaacccctggatggacatcaggcaacgggaagacgtccaagccttaaacatcagtgtgccgtatggtccaattcctgtggactttcaggaggaccaaagttccacaggtttcagactgaagacttcatctaccagaaagtataagtaggccagggctcagcataatcctgctggaaggctagatgtatatcttttctcttgactgcaagtgagaacggcggaaaatccgccagagctactttgcctctgtgtcatatttggatacacaggtcggccgcctcttgagtgctttggacgatcttcagctggccaacagcaccatcattgcatttacctcggatcatggtttcctcatgaggacaaatacctgattttgaataaagcagcattcagttgaaataaccctttctgtggtaattccaagtgaatatttttcttctaggtgatgagtttctacttcctctggtttttacaacaggaaatgaaatggtatctaaaataaacaagctgtggtatgatgattattcaaaaaac

SEQ ID NO: 374524 - DNA, 1541 bp, Homo sapiens
  misc_feature (248)..(248): n is a, c, g, or t
ttataaaaagaaggaagggcagggcttccaggtgaaaggcatagcacaagcaaaggcaaaaagacgggtaactgctagttgttaagggcagtggctgaatcgctatacccctagcagttctacacctaggggcctgcgggccgctgggtctgcgaagcttgcaaggcaactggcccgcccccgctctgcgcctgtctctcggccacgcctattgctgcaggatgacgcgcacctctagaacccgcccnggagggtgagtgggacgcagggaagagtcgcacggacgcactcgcgctgcggccagcgcccgggcctgcgggcccgggcggcggctgtgttgcgcagtcttcatgggttcccgacgaggaggtctctgtggctgcggcggcggctgctaactgcgccacctgctgcagcctgtccccgccgctctgaagcggccgcgtcgaagccgaaatgccgccaccccggaccggccgaggccttctctggctgggtctggttctgagctccgtctgcgtcgccctcggatccgaaacgcaggccaactcgaccacagatgctctgaacgttcttctcatcatcgtggatgacctgcgcccctccctgggctgttatggggataagctggtgaggtccccaaatattgaccaactggcatcccacagcctcctcttccagaatgcctttgcgcagcaagcagtgtgcgccccgagccgcgtttctttcctcactggcaggagacctgacaccacccgcctgtacgacttcaactcctactggagggtgcacgctggaaacttctccaccatcccccagtacttcaaggagaatggctatgtgaccatgtcggtgggaaaagtctttcaccctgggatatcttctaaccataccgatgattctccgtatagctggtcttttccaccttatcatccttcctctgagaagtatgaaaacactaagacatgtcgagggccagatggagaactccatgccaacctgctttgccctgtggatgtgctggatgttcccgagggcaccttgcctgacaaacagagcactgagcaagccatacagttgttggaaaagatgaaaacgtcagccagtcctttcttcctggccgttgggtatcataagccacacatccccttcagataccccaaggaatttcagaagttgtatcccttggagaacatcaccctggcccccgatcccgaggtccctgatggcctaccccctgtggcctacaacccctggatggacatcaggcaacgggaagacgtccaagccttaaacatcagtgtgccgtatggtccaattcctgtggactttcagaaccctgcccttctcttaccacatgaatgctgtggcaggcaagctatagcggatggaagatggcagtgttttcaaagtgtgcatcctggactacctgccttagaatttctgggagggcttgttggaaatgcaaagtcttggcccactcagatttacacaattggaagctggaggtggaacttgacctgacaaccgacatttcttaa

SEQ ID NO: 374525 - DNA, 3966 bp, Homo sapiens
tcggccgccaactcctaaaggaccactgaaggagtgtgggctgcacgctgggtgcagcaggtgagtttcctcacttgggtttcactgtcagcattttaaaaaggcaaactggttttcttcctgagaagaattcattgattcacttgtggccagtaagtcatctgggccagaggttggtggggagatgataggggtgcaagtgtcatcttcaatcacagcataactgcccttgctttcttacctctcgtttagatatttcaatgcttgctcaggtcccctgcgccctccttccttctcccttcccagccatactacttatgggatgactttctctttgtaaaatgaccgttagtcttatcaaattaatcccaaagtaataccatcaatttccccctaaaataccaacaagacccctgcttgaaactgcttgtacattagagacagagaagagtccatgagaatcaacattttctgaggactccaactgtgtgccaagagagttcccctgctggtgcctcctctgtagtaaaggaaaggctcctgggaccacattatcattctcttcactcgagagatgaggacactgaaattcagagaggggaagtgatttgcctcagcttgtactaaagaaacatttcaacagagaacccagtggaaattatgacatgttatcttctcagagtcctgaactcccatccctacctcagaagagactcctctgttcacagaagctaaaggcagttccttcccaatggcaactatgtttggatgttggatctacactttctcaagcactgtgatcttcaaatgtaagtttagtaacataaatatctttttgcagcctgaaagaattttatgtctctgtgttatcaggtaatgtttcagtatctcatattttgctggtaacatttagaatgttaatctcataaggagattttagagttatagttaaatttctttatctgggttagatgggaatcctttattctggggaaagcaaagttctttctataagcctgggttctcataatatacagactgggaaacttgggaaagagtaggagcatcattagtttcattttataggtgggaataacaaagcatggagagacaaacatatttgccaaaatagttattctcaactccttgttttgggaattctagagtgtttcataggatttcaaagtacctcacaaaattgttctaaatttctcaaagccaaattcattttaattaactttaattttttttgaaaagttatagcattcttgggggtaggataggtacattttataaaaacaatacaaacaattgttttgcttagaaccagtgaaatgtcaaaactccaaaaatgtttgggaagcactggattagtcagtagcataacaagcaataaaacaacccaggtcaggtgcagagagatataaactcttgtctcatcctccatagatctgtattttcaaaggcagagtcttgtgtgactgcatgtctgaggatatgtctcttctggacagggtttttacagtacttgagaatgatcctaacaaccttttggggtgactcaatttttttcactgctagagaggtaaaacaaatattgatacagttgaacagtgagaaattgagtttggctggagcacaggcacataatggtagaattatgagcctgtgctaggctgtgtgggtttggccaaattgggtcaagtgaaaacagaaagatcagttagaaacttgcaatagtttcgataaaagatgttatggcggttgtccaactttattgtgaactctcttattgtactagtgtttaaaagcagataagctgttacctcttgaatcccacaggctgtctagttatactggtcaggatctcttccagctcaattttttaaaaaatcctttgccttgacttccaaaggcacctgttaagagtggacttctcaagctgtgtaaagtacttttggcataatcaagtctatgttgttccatgaagctctaagtccagagtaactgtctttagttgatcatattgaaagcaagaacatcatttcaaacaaaccaagtctgagatatttaacccacatgtgctttcagacctggtatgtatgagcttgagcaatgaagccttattccattttgatgttataaaaaatggagggatttccctgcagtcagtttcacagccactatttgacttatatttgaagggggaaagataagggctgtgttcttttgatctgaatttttctgttcttaaaagttttcttttctaagaacactagtcagtacctggagacactccgacatatttaaagaattaatttgctttattgaaaaaagttgtttctttaaacatttaaataattactttttcttcagtgacaaattagtttgctttaatgaaaaaaaaggtttttttcataactttcattacatgaacctttagcaaaggagatttctcccattatatacttcttatgatcaacaaattccatcatctccccactaagagaaagtactccaagatgatagaatgattttaaagttatgggactacaacagcagccacaggaaccttgagtaagtaccatgaaccctgaccctcagcgttaatttgtaagcctttggcagtgagatggaatgtcttccttcagtttgaaacaaaggaaacctattgcatcgcacgtaaatttgtatattgatgctatattgactttgtagctgccatgccttcatacagacacctcatccagcccccactgttccacttattgtgatggtttgtatatctttatttcaaagaagatctgtttgaaccgtgtttaatttcttctttgacctgctttcatcactgcccatgcctaccctggtggcattctcatccacgagactaccacatccatgccactaggtggcattctcatccatgagactactgcacccgtgcgcacgtcaagaagtagccaagccatgggctggattgtgcttttcctgagaggatgaaaggcttcatggatacatgctagtatccatgttcctctattctcaagtcaggcaccaagatgatgtttcatacctgcctgcctttcaaagtctcataaatgttcattgaatatccactctatgcaaggcactagggtagtcacagaggcaaggtttgagctaaactacaggccctgccctccaggagctcccggtctcatggcagggtgcagaagccagaatagagggccatggcatgggagagaactctgctgaccgggagctctgaagggttaggggtccatgagcctgatttatggggtcgttgccataggattaggggctccctggcatacagtgaatggagagactagcattgctgtgttatttcactgagagggcaccaatgttcagcctctgagaccaggggaggaaagcagtggccatgaatgttccctcccatcccggggactgactgggctcctcccacagtctcagacacagaggaagaagtgtactcacactgccccaacaccagtgagtggaaatatttataggtctctcatttggttttaatttttatttttttatttttcagaaattaaaaaaaaaatcacactcacaaaattaaccattacccacattcctaccaacaagaagtaaccattcttaaccttgtaatatgttggtttccagatttatgtttatgctttaaaaaattatgcagacaacatattagcacattgccccttttctcatttgttttaatccatgttcttcccatttatacaggagcaattcttgcattcagttatgggatactataaatgcctagtataatggcagcagagagaattactatggttgtataccttttctcgctccttgctcctcaaatgccttagagtttaaaatctattgtggaaagtttgtgaaatgcagaacggtgaaaataaacaaattaccagtggttctttggcttcggga

SEQ ID NO: 374526 - DNA, 3771 bp, Homo sapiens
  misc_feature (23)..(24): n is a, c, g, or t
  misc_feature (29)..(29): n is a, c, g, or t
  misc_feature (37)..(37): n is a, c, g, or t
aaagtatagccagttccttcccnntggcnactatgtntggatgttggatctacactttctcaagcactgtgatcttcaatcaaaggagatttctcccattatatacttcttatgatcaacaaattccatcatctccccactaagagaaagtactccaagatgatagaatgattttaaagttatgggactacaacagcagccacaggaaccttgaacccctgcttgaaactgcttgtacattagagacagagaagagtccatgagaatcaacattttctgaggactccaactgtgtgccaagagagttcccctgctggtgcctcctctgtagtaaaggaaaggctcctgggaccacattatcattctcttcactcgagagatgaggacactgaaattcagagaggggaagtgatttgcctcagcttgtactaaagaaacatttcaacagagaacccagtggaaattatgacatgttatcttctcagagtcctgaactcccatccctacctcagaagagactcctctgttcacagaagctaaaggcagttccttcccaatggcaactatgtttggatgttggatctacactttctcaagcactgtgatcttcaaatgtaagtttagtaacataaatatctttttgcagcctgaaagaattttatgtctctgtgttatcaggtaatgtttcagtatctcatattttgctggtaacatttagaatgttaatctcataaggagattttagagttatagttaaatttctttatctgggttagatgggaatcctttattctggggaaagcaaagttctttctataagcctgggttctcataatatacagactgggaaacttgggaaagagtaggagcatcattagtttcattttataggtgggaataacaaagcatggagagacaaacatatttgccaaaatagttattctcaactccttgttttgggaattctagagtgtttcataggatttcaaagtacctcacaaaattgttctaaatttctcaaagccaaattcattttaattaactttaattttttttgaaaagttatagcattcttgggggtaggataggtacattttataaaaacaatacaaacaattgttttgcttagaaccagtgaaatgtcaaaactccaaaaatgtttgggaagcactggattagtcagtagcataacaagcaataaaacaacccaggtcaggtgcagagagatataaactcttgtctcatcctccatagatctgtattttcaaaggcagagtcttgtgtgactgcatgtctgaggatatgtctcttctggacagggtttttacagtacttgagaatgatcctaacaaccttttggggtgactcaatttttttcactgctagagaggtaaaacaaatattgatacagttgaacagtgagaaattgagtttggctggagcacaggcacataatggtagaattatgagcctgtgctaggctgtgtgggtttggccaaattgggtcaagtgaaaacagaaagatcagttagaaacttgcaatagtttcgataaaagatgttatggcggttgtccaactttattgtgaactctcttattgtactagtgtttaaaagcagataagctgttacctcttgaatcccacaggctgtctagttatactggtcaggatctcttccagctcaattttttaaaaaatcctttgccttgacttccaaaggcacctgttaagagtggacttctcaagctgtgtaaagtacttttggcataatcaagtctatgttgttccatgaagctctaagtccagagtaactgtctttagttgatcatattgaaagcaagaacatcatttcaaacaaaccaagtctgagatatttaacccacatgtgctttcagacctggtatgtatgagcttgagcaatgaagccttattccattttgatgttataaaaaatggagggatttccctgcagtcagtttcacagccactatttgacttatatttgaagggggaaagataagggctgtgttcttttgatctgaatttttctgttcttaaaagttttcttttctaagaacactagtcagtacctggagacactccgacatatttaaagaattaatttgctttattgaaaaaagttgtttctttaaacatttaaataattactttttcttcagtgacaaattagtttgctttaatgaaaaaaaaggtttttttcataactttcattacatgaacctttagcaaaggagatttctcccattatatacttcttatgatcaacaaattccatcatctccccactaagagaaagtactccaagatgatagaatgattttaaagttatgggactacaacagcagccacaggaaccttgagtaagtaccatgaaccctgaccctcagcgttaatttgtaagcctttggcagtgagatggaatgtcttccttcagtttgaaacaaaggaaacctattgcatcgcacgtaaatttgtatattgatgctatattgactttgtagctgccatgccttcatacagacacctcatccagcccccactgttccacttattgtgatggtttgtatatctttatttcaaagaagatctgtttgaaccgtgtttaatttcttctttgacctgctttcatcactgcccatgcctaccctggtggcattctcatccacgagactaccacatccatgccactaggtggcattctcatccatgagactactgcacccgtgcgcacgtcaagaagtagccaagccatgggctggattgtgcttttcctgagaggatgaaaggcttcatggatacatgctagtatccatgttcctctattctcaagtcaggcaccaagatgatgtttcatacctgcctgcctttcaaagtctcataaatgttcattgaatatccactctatgcaaggcactagggtagtcacagaggcaaggtttgagctaaactacaggccctgccctccaggagctcccggtctcatggcagggtgcagaagccagaatagagggccatggcatgggagagaactctgctgaccgggagctctgaagggttaggggtccatgagcctgatttatggggtcgttgccataggattaggggctccctggcatacagtgaatggagagactagcattgctgtgttatttcactgagagggcaccaatgttcagcctctgagaccaggggaggaaagcagtggccatgaatgttccctcccatcccggggactgactgggctcctcccacagtctcagacacagaggaagaagtgtactcacactgccccaacaccagtgagtggaaatatttataggtctctcatttggttttaatttttatttttttatttttcagaaattaaaaaaaaaatcacactcacaaaattaaccattacccacattcctaccaacaagaagtaaccattcttaaccttgtaatatgttggtttccagatttatgtttatgctttaaaaaattatgcagacaacatattagcacattgccccttttctcatttgttttaatccatgttcttcccatttatacaggagcaattcttgcattcagttatgggatactataaatgcctagtataatggcagcagagagaattactatggttgtataccttttctcgctccttgctcctcaaatgccttagagtttaaaatctattgtggaaagtttgtgaaatgcagaacggtgaaaataaacaaattaccagtggttctttggcttcggga

SEQ ID NO: 374527 - DNA, 3076 bp, Homo sapiens
  misc_feature (988)..(988): n is a, c, g, or t
  misc_feature (2867)..(2867): n is a, c, g, or t
acttgccacaaggagacgctgttcagtttaccggatcctgtcccgcgccagccaaccaggacaaggccggggagctcgagacaggcagcctagaccaagaaccggaaggaggaaaaggaaccggagggaggaagaggaggggcgggacgagaccaccaggcaagagtccaaactttcccgcggcgacctaactgcacctccagtgtcttcccccagagggcacagaagcagcaagaagggcgggaacacttgactggggtccatgcagctctaggctgagtcttgcagggctgagccccccaggcctgctctcctgtgtcctggccgctccgtcagtgcctgccagtggggtccagagggaccgtttttttaacgcctcttttgcagtgagatgcgcctacttctccctggagaagcttgaggaagcagaaatgctggagatgagctgctcctcactctcactcctgggtgtgctgggcagtggggtgcaatgtgcacgtaggtgcacactctccctgggcggcagcgagcagcagaggtctgatctgtggtcggatgacgagaggaagtgcaagtaaagcagctgcagcgagacctcgtccgcacaggggcttgttcttctgtgtctttgcagggctgttttggactcagtattcacctaagcactccaaattacccagcacaccctgcctgcatggcgctgcgctgcaccttcactctggtcacgggtctggcagtcagctcaccaattcctcctgcttccctgggacttgccggcttttagcactgcaattcactcagcaaactgggactgttggtcaccctacctggcagccagtgataaggtgagggccactcctgggagggaggacacctgtggggaaaattcttgtgttatttatttctccttcgggatagggtgcctgcagcgcttcatgggagggggtgggctgatgctgcgggctcagaagtttcaagggcatctggngagaccagatattcagagaccttctagatgtgcctgttccatgtatcagggacgcaggttttcccaacagggctggtgtcattggcatgacagacctgccttggctgagcgttcacctgtctttggagttcagccaccttagcaagtcctgggtttgttcttcagactttgctgctcgcccattgcctggatcgggggctactttgtaaaccaccaggaagactccagtgtttctggttaatttttagatgtttgttaattgctcttggtctctcattaatcccctgtgggtcatccaggaaacatactcaccactgtctgttctctgagttttcatttccaggcatccgccctgcctggatctcctcacctgccaggaacttcctctccacaagccggccatcccagcaaaagttctaacaccaaaggtctggcaactagcctgccatcttgtgcctggagccgcctgcgtgccacctactcccgaagatgggaaccttgttgccagttgggcagatgcggggcaatcctgtaccaagaccccattttaccacctgctttctcagaccactctggaacccactgtctcagattgtgtcctccaggaagcagaccatgagagggagttggcagggccaaagatttactggggctaactaacactcaggaaagggataggaaggaaacagggctggagagcaggttgagcccgacctgacagtctcgagcagcccaacagggaggtgtggagcaagggttgcccactagaggggcctgcattgggtacgggtgatggggtccacatggtacctggcatatagcaggctgtgcaatccatattaactgactggataaattaatgcccagaaaaggtgccctggagaatgggtgtgtgctgaacacaatagggaagggcccagcatctgccttggcataggcagaactgtgctgtgccctgcaacaggccacctgagagctgctttgatcttgtgtgtacattagatgactgccaggggcatgaaggggatgtgcttccagggcatttgctggcagggcgtctcgtgatctcttggtattggtgtgagcacagcctggcaggagagggcagatctccatgcaaagtatgtcagaaagcagatggaagccaggccccctcctgaaagaggctccttgaagataattctaacatctttgtcatcagtgttgacatctcttgattgtatcctgtcattccatttgagatcttcctggttctggctggcatcctctgacatcactccagcagaagaaagggaaggaacacgctgcattactgcgtggtcacaaggtccccgtctgatctgccttcactccacctttcagagtcttatgtttgttttgtgtatattatcaaggggttttaggtcacttagtcggaagaatagggaaaagtatgtctactccagcttaatggaagtggaattctcctgagaacctttttttgatacaaaatatgtacttgtgcatattttgtatcaaaatatataatgtacatgtcccttttgtacatgtatataaattgtatataaatatttagggttataaaaataaccaaagacaccaaaaactgccacaggtggatttgagaagatgtggaaatgcctcactgctaagacatgctcattcttgacaggctgggaaccctgaatgctgtagtgtcaccactgccctgtcctgtacctacctatcttttcactcatttcctccaagctcaggttttcagtttggggtatgtgccacctaacagtgagctgtggaactgcagcacaatcatcaaattcaaaaaaggcaaggacatcttgctcagtttttaagatacgccatagatggagtaaaccanaacctttgattccagatccttaaccctgattaaaaacaacacaacccttcatgttgatttaaaacatcccttgcaaaagatggtttgaatattccaagttggaaatacccagtcttttaaagttacagcaccctttttgatacaaaaaatgtgcatgacagaaattgtacagtgagtagtgttataaaaataaccaaacacaccaaaag

SEQ ID NO: 374528 - DNA, 999 bp, Homo sapiens
  misc_feature (790)..(790): n is a, c, g, or t
gctgagactttctatttttagtttgtttcaaatgcgttcttaattgcttaatgaagcatataatggtggctttcaatttttttacagataattctaacatctttgtcatcagtgttgacatctcttgattgtatcctgtcattccatttgagatcttcctggttctggctggcatcctctgacatcactccagcagaagaaagggaaggaacacgctgcattactgcgtggtcacaaggtccccgtctgatctgccttcactccacctttcagagtcttatgtttgttttgtgtatattatcaaggggttttaggtcacttagtcggaagaatagggaaaagtatgtctactccagcttaatggaagtggaattctcctgagaacctttttttgatacaaaatatgtacttgtgcatattttgtatcaaaatatataatgtacatgtcccttttgtacatgtatataaattgtatataaatatttagggttataaaaataaccaaagacaccaaaaactgccacaggtggatttgagaagatgtggaaatgcctcactgctaagacatgctcattcttgacaggctgggaaccctgaatgctgtagtgtcaccactgccctgtcctgtacctacctatcttttcactcatttcctccaagctcaggttttcagtttggggtatgtgccacctaacagtgagctgtggaactgcagcacaatcatcaaattcaaaaaaggcaaggacatcttgctcagtttttaagatacgccatagatggagtaaaccanaacctttgattccagatccttaaccctgattaaaaacaacacaacccttcatgttgatttaaaacatcccttgcaaaagatggtttgaatattccaagttggaaatacccagtcttttaaagttacagcaccctttttgatacaaaaaatgtgcatgacagaaattgtacagtgagtagtgttataaaaataaccaaacacaccaaaag

SEQ ID NO: 374529 - DNA, 4058 bp, Homo sapiens
  misc_feature (988)..(988): n is a, c, g, or t
acttgccacaaggagacgctgttcagtttaccggatcctgtcccgcgccagccaaccaggacaaggccggggagctcgagacaggcagcctagaccaagaaccggaaggaggaaaaggaaccggagggaggaagaggaggggcgggacgagaccaccaggcaagagtccaaactttcccgcggcgacctaactgcacctccagtgtcttcccccagagggcacagaagcagcaagaagggcgggaacacttgactggggtccatgcagctctaggctgagtcttgcagggctgagccccccaggcctgctctcctgtgtcctggccgctccgtcagtgcctgccagtggggtccagagggaccgtttttttaacgcctcttttgcagtgagatgcgcctacttctccctggagaagcttgaggaagcagaaatgctggagatgagctgctcctcactctcactcctgggtgtgctgggcagtggggtgcaatgtgcacgtaggtgcacactctccctgggcggcagcgagcagcagaggtctgatctgtggtcggatgacgagaggaagtgcaagtaaagcagctgcagcgagacctcgtccgcacaggggcttgttcttctgtgtctttgcagggctgttttggactcagtattcacctaagcactccaaattacccagcacaccctgcctgcatggcgctgcgctgcaccttcactctggtcacgggtctggcagtcagctcaccaattcctcctgcttccctgggacttgccggcttttagcactgcaattcactcagcaaactgggactgttggtcaccctacctggcagccagtgataaggtgagggccactcctgggagggaggacacctgtggggaaaattcttgtgttatttatttctccttcgggatagggtgcctgcagcgcttcatgggagggggtgggctgatgctgcgggctcagaagtttcaagggcatctggngagaccagatattcagagaccttctagatgtgcctgttccatgtatcagggacgcaggttttcccaacagggctggtgtcattggcatgacagacctgccttggctgagcgttcacctgtctttggagttcagccaccttagcaagtcctgggtttgttcttcagactttgctgctcgcccattgcctggatcgggggctactttgtaaaccaccaggaagactccagtgtttctggttaatttttagatgtttgttaattgctcttggtctctcattaatcccctgtgggtcatccaggaaacatactcaccactgtctgttctctgagttttcatttccaggcatccgccctgcctggatctcctcacctgccaggaacttcctctccacaagccggccatcccagcaaaagttctaacaccaaaggtctggcaactagcctgccatcttgtgcctggagccgcctgcgtgccacctactcccgaagatgggaaccttgttgccagttgggcagatgcggggcaatcctgtaccaagaccccattttaccacctgctttctcagaccactctggaacccactgtctcagattgtgtcctccaggaagcagaccatgagagggagttggcagggccaaagatttactggggctaactaacactcaggaaagggataggaaggaaacagggctggagagcaggttgagcccgacctgacagtctcgagcagcccaacagggaggtgtggagcaagggttgcccactagaggggcctgcattgggtacgggtgatggggtccacatggtacctggcatatagcaggctgtgcaatccatattaactgactggataaattaatgcccagaaaaggtgccctggagaatgggtgtgtgctgaacacaatagggaagggcccagcatctgccttggcataggcagaactgtgctgtgccctgcaacaggccacctgagagctgctttgatcttgtgtgtacattagatgactgccaggggcatgaaggggatgtgcttccagggcatttgctggcagggcgtctcgtgatctcttggtattggtgtgagcacagcctggcaggagagggcagatctccatgcaaagtatgtcagaaagcagatggaagccaggccccctcctgaaagaggctccttgaagagacagagaagagtccatgagaatcaacattttctgaggactccaactgtgtgccaagagagttcccctgctggtgcctcctctgtagtaaaggaaaggctcctgggaccacattatcattctcttcactcgagagatgaggacactgaaattcagagaggggaagtgatttgcctcagcttgtactaaagaaacatttcaacagagaacccagtggaaattatgacatgttatcttctcagagtcctgaactcccatccctacctcagaagagactcctctgttcacagaagctaaaggcagttccttcccaatggcaactatgtttggatgttggatctacactttctcaagcactgtgatcttcaaatcaaaggagatttctcccattatatacttcttatgatcaacaaattccatcatctccccactaagagaaagtactccaagatgatagaatgattttaaagttatgggactacaacagcagccacaggaaccttgagtaagtaccatgaaccctgaccctcagcgttaatttgtaagcctttggcagtgagatggaatgtcttccttcagtttgaaacaaaggaaacctattgcatcgcacgtaaatttgtatattgatgctatattgactttgtagctgccatgccttcatacagacacctcatccagcccccactgttccacttattgtgatggtttgtatatctttatttcaaagaagatctgtttgaaccgtgtttaatttcttctttgacctgctttcatcactgcccatgcctaccctggtggcattctcatccacgagactaccacatccatgccactaggtggcattctcatccatgagactactgcacccgtgcgcacgtcaagaagtagccaagccatgggctggattgtgcttttcctgagaggatgaaaggcttcatggatacatgctagtatccatgttcctctattctcaagtcaggcaccaagatgatgtttcatacctgcctgcctttcaaagtctcataaatgttcattgaatatccactctatgcaaggcactagggtagtcacagaggcaaggtttgagctaaactacaggccctgccctccaggagctcccggtctcatggcagggtgcagaagccagaatagagggccatggcatgggagagaactctgctgaccgggagctctgaagggttaggggtccatgagcctgatttatggggtcgttgccataggattaggggctccctggcatacagtgaatggagagactagcattgctgtgttatttcactgagagggcaccaatgttcagcctctgagaccaggggaggaaagcagtggccatgaatgttccctcccatcccggggactgactgggctcctcccacagtctcagacacagaggaagaagtgtactcacactgccccaacaccagtgagtggaaatatttataggtctctcatttggttttaatttttatttttttatttttcagaaattaaaaaaaaaatcacactcacaaaattaaccattacccacattcctaccaacaagaagtaaccattcttaaccttgtaatatgttggtttccagatttatgtttatgctttaaaaaattatgcagacaacatattagcacattgccccttttctcatttgttttaatccatgttcttcccatttatacaggagcaattcttgcattcagttatgggatactataaatgcctagtataatggcagcagagagaattactatggttgtataccttttctcgctccttgctcctcaaatgccttagagtttaaaatctattgtggaaagtttgtgaaatgcagaacggtgaaaataaacaaattaccagtggttctttggcttcggga

SEQ ID NO: 374530 - DNA, 2723 bp, Homo sapiens
  misc_feature (988)..(988): n is a, c, g, or t
  misc_feature (2514)..(2514): n is a, c, g, or t
acttgccacaaggagacgctgttcagtttaccggatcctgtcccgcgccagccaaccaggacaaggccggggagctcgagacaggcagcctagaccaagaaccggaaggaggaaaaggaaccggagggaggaagaggaggggcgggacgagaccaccaggcaagagtccaaactttcccgcggcgacctaactgcacctccagtgtcttcccccagagggcacagaagcagcaagaagggcgggaacacttgactggggtccatgcagctctaggctgagtcttgcagggctgagccccccaggcctgctctcctgtgtcctggccgctccgtcagtgcctgccagtggggtccagagggaccgtttttttaacgcctcttttgcagtgagatgcgcctacttctccctggagaagcttgaggaagcagaaatgctggagatgagctgctcctcactctcactcctgggtgtgctgggcagtggggtgcaatgtgcacgtaggtgcacactctccctgggcggcagcgagcagcagaggtctgatctgtggtcggatgacgagaggaagtgcaagtaaagcagctgcagcgagacctcgtccgcacaggggcttgttcttctgtgtctttgcagggctgttttggactcagtattcacctaagcactccaaattacccagcacaccctgcctgcatggcgctgcgctgcaccttcactctggtcacgggtctggcagtcagctcaccaattcctcctgcttccctgggacttgccggcttttagcactgcaattcactcagcaaactgggactgttggtcaccctacctggcagccagtgataaggtgagggccactcctgggagggaggacacctgtggggaaaattcttgtgttatttatttctccttcgggatagggtgcctgcagcgcttcatgggagggggtgggctgatgctgcgggctcagaagtttcaagggcatctggngagaccagatattcagagaccttctagatgtgcctgttccatgtatcagggacgcaggttttcccaacagggctggtgtcattggcatgacagacctgccttggctgagcgttcacctgtctttggagttcagccaccttagcaagtcctgggtttgttcttcagactttgctgctcgcccattgcctggatcgggggctactttgtaaaccaccaggaagactccagtgtttctggttaatttttagatgtttgttaattgctcttggtctctcattaatcccctgtgggtcatccaggaaacatactcaccactgtctgttctctgagttttcatttccaggcatccgccctgcctggatctcctcacctgccaggaacttcctctccacaagccggccatcccagcaaaagttctaacaccaaaggtctggcaactagcctgccatcttgtgcctggagccgcctgcgtgccacctactcccgaagatgggaaccttgttgccagttgggcagatgcggggcaatcctgtaccaagaccccattttaccacctgctttctcagaccactctggaacccactgtctcagattgtgtcctccaggaagcagaccatgagagggagttggcagggccaaagatttactggggctaactaacactcaggaaagggataggaaggaaacagggctggagagcaggttgagcccgacctgacagtctcgagcagcccaacagggaggtgtggagcaagggttgcccactagaggggcctgcattgggtacgggtgatggggtccacatggtacctggcatatagcaggctgtgcaatccatattaactgactggataaattaatgcccagaaaaggtgccctggagaatgggtgtgtgctgaacacaatagggaagggcccagcatctgccttggcataggcagaactgtgctgtgccctgcaacaggccacctgagagctgctttgatcttgtgtgtacattagatgactgccaggggcatgaaggggatgtgcttccagggcatttgctggcagggcgtctcgtgatctcttggtattggtgtgagcacagcctggcaggagagggcagatctccatgcaaagtatgtcagaaagcagatggaagccaggccccctcctgaaagaggctccttgaagataattctaacatctttgtcatcagtgttgacatctcttgattgtatcctgtcattccatttgagatcttcctggttctggctggcatcctctgacatcactccagcagaagaaagggaaggaacacgctgcattactgcgtggctgggaaccctgaatgctgtagtgtcaccactgccctgtcctgtacctacctatcttttcactcatttcctccaagctcaggttttcagtttggggtatgtgccacctaacagtgagctgtggaactgcagcacaatcatcaaattcaaaaaaggcaaggacatcttgctcagtttttaagatacgccatagatggagtaaaccanaacctttgattccagatccttaaccctgattaaaaacaacacaacccttcatgttgatttaaaacatcccttgcaaaagatggtttgaatattccaagttggaaatacccagtcttttaaagttacagcaccctttttgatacaaaaaatgtgcatgacagaaattgtacagtgagtagtgttataaaaataaccaaacacaccaaaag

SEQ ID NO: 374531 - DNA, 1444 bp, Homo sapiens
ctccaacatgatagagtgattcgagagagttatgggatctatagacacatggccactaggcaagctctttgcatatagagtatccattgggataccctcgtagcatacctgcatgtgggtattaacttctagctcaaagtcacatttatgagcgacgctcgaggagtgggaaactcgtacgtctgctcctctcgaagatttagatacaccagaatggaagatcctaggttgctactcttgcacctgtaaatttgtatattgatgctatattgactttgtagctgccatgccttcatacagacacctcatccagcccccactgttccacttattgtgatggtttgtatatctttatttcaaagaagatctgtttgaaccgtgtttaatttcttctttgacctgctttcatcactgcccatgcctaccctggtggcattctcatccacgagactaccacatccatgccactaggtggcattctcatccatgagactactgcacccgtgcgcacgtcaagaagtagccaagccatgggctggattgtgcttttcctgagaggatgaaaggcttcatggatacatgctagtatccatgttcctctattctcaagtcaggcaccaagatgatgtttcatacctgcctgcctttcaaagtctcataaatgttcattgaatatccactctatgcaaggcactagggtagtcacagaggcaaggtttgagctaaactacaggccctgcctctgaagggttaggggtccatgagcctgatttatggggtcgttgccataggattaggggctccctggcatacagtgaatggagagactagcattgctgtgttatttcactgagagggcaccaatgttcagcctctgagaccaggggaggaaagcagtggccatgaatgttccctcccatcccggggactgactgggctcctcccacagtctcagacacagaggaagaagtgtactcacactgccccaacaccagtgagtggaaatatttataggtctctcatttggttttaatttttatttttttatttttcagaaattaaaaaaaaaatcacactcacaaaattaaccattacccacattcctaccaacaagaagtaaccattcttaaccttgtaatatgttggtttccagatttatgtttatgctttaaaaaattatgcagacaacatattagcacattgccccttttctcatttgttttaatccatgttcttcccatttatacaggagcaattcttgcattcagttatgggatactataaatgcctagtataatggcagcagagagaattactatggttgtataccttttctcgctccttgctcctcaaatgccttagagtttaaaatctattgtggaaagtttgtgaaatgcagaacggtgaaaataaacaaattaccagtggttctttggcttcggga

SEQ ID NO: 374532 - DNA, 439 bp, Homo sapiens
  misc_feature (59)..(59): n is a, c, g, or t
aaaaaaagaaaggaaactgggaagaagtagtaaaccatctacctttccaactctatttntcaatacggcccttcatttgtacattacaacccatgtaggcttctccctgttcttcacatataacccactggttaccactccagcctgggtgacagagcgagactccgtctcaaataaaaaacaacaaaaaacaaaaaaaacttaaaattctttgcttgttagtgaccttgatcatggttctctttgtacgatagttgggcatctgtatttccacttgtgtgaatttgcctttaaattttggttatgggtttcaccttttaaaataatcaaacatatttatcttttcctgtgtgataggtttttttctgtatcttttcctgttaaacacacagacccctccccaatctggacattgaataaatattcattttcctttgca

SEQ ID NO: 374533 - DNA, 1374 bp, Homo sapiens
ctgatgcgcgccagccaaccaggccaaggccaggggacctcgagaccggcagcctcgacgaagaaccggaaggaggaaaaggaacgggagggaggaagatctcccgcattgacttcataaccaagttctgggtccctgcctctggagtgcctgatgagacaaaacggctcctcgtcctgcatccccgctgctacttccagaattcaggcctcgtggtctggagcctgcactgttccatgagcctcctgagcaacctggagtcctctgtctttcttccctcagtgagatgcgcctacttctccctggagaagctcgaggaagcaggaatgctggagatgagacccagcacaccctgcctgcatggcgctgcgctgcaccttcactctggtcacgggtctggcagtcggctcaccaattcgtcctgcttccctgggactcgccggcttttagcactgcaattcactcagcaaactgggactgttggtcaccctacctggcagccagtgataagggctggtgtcattggcatgacagacctgccttggctgagcgttcacccgtcttcggagttcagccaccttagcaagtcctgggtttgttcttcagattttgctgctcgcccattgcctggatcgggggctactttgtaaaccaccaggaagactccagtgtttctgcttaatttttagatgtttgttaattgctcttggcctctcattaatcccctgtgggtcatccaggaaatatactcaccactgtctgttctctgagttttcatttccaggcatccgccctgcctggatctcctcacctgccaggaacttcctctccacaagccggccatcccagcaaaagttctaacaccaaaggtctggcaactagcctgccatcttgtgcctggagccgcctgcgtgccacctactcccgaagatgggaaccttgttgccagttgggcagatgcggggcaatcctgtaccaagaccccattttaccacctgctttctcagaccactctggaacccactgtctcagattgtgtcctccaggaagcagaccatgagagggagttggcagggccaaagatttactggggctaactaacactcaggaaagggataggaaggaaacagggctggagagcaggttgagcccgacctgacagtctcgagcagcccaacagggaggtgtggagcaagggttgccactagaggggcctgcattgggtacgggtgatggggtccacatggtacctggcatatagcaggctgtgcaatccatattaactgactggataaattaatgctcagaaaaggtgccctggagaatgggtgcgtgctgaacacaatagggaagggcccagcatctgccttggca

SEQ ID NO: 374534 - DNA, 808 bp, Homo sapiens
  misc_feature (248)..(248): n is a, c, g, or t
ttataaaaagaaggaagggcagggcttccaggtgaaaggcatagcacaagcaaaggcaaaaagacgggtaactgctagttgttaagggcagtggctgaatcgctatacccctagcagttctacacctaggggcctgcgggccgctgggtctgcgaagcttgcaaggcaactggcccgcccccgctctgcgcctgtctctcggccacgcctattgctgcaggatgacgcgcacctctagaacccgcccnggagggtgagtgggacgcagggaagagtcgcacggacgcactcgcgctgcggccagcgcccgggcctgcgggcccgggcggcggctgtgttgcgcagtcttcatgggttcccgacgaggaggtctctgtggctgcggcggcggctgctaactgcgccacctgctgcagcctgtccccgccgctctgaagcggccgcgtcgaagccgaaatgccgccaccccggaccggccgaggccttctctggctgggtctggttctgagctccgtctgcgtcgccctcggatccgaaacgcaggccaactcgaccacaggtgccgcccacgccctccctgccatctcttctcccttcctccctcccttccttcctccttccttctttccttccttctttgtttatatccattctttttacccttcctctctcctaccattccttctttcatccatcattcgttccctccctccatttttcactccttcctaccgtcccttcatccctcccttccctctttccatctattcatccatccatctcctatccctccgtgcttcccttcctc

SEQ ID NO: 374535 - DNA, 503 bp, Homo sapiens
gcagcccagaatgcttggtttgctggtacttgcaggttccctctgtgggaaagcccatcctggctagctgtcactctcagggggtggcttggtgaacaggcccttggtgcagagggaactgggacaccatcatggccagtgccacccagctgtgatgtccggcattcctttgccatgatttaggggcggagcaaccacacaattagaatcctcacactgactcatcagtcaccctttctccctggagagcagaatacacattgactaatgctctttctggaatattccacacagaaccctgcccttctcttaccacatgaatgctgtggcaggcaagctatagcggatggaagatggcagtgttttcaaagtgtgcatcctggactacctgccttagaatttctgggagggcttgttggaaatgcaaagtcttggcccactcagatttacacaattggaagctggaggtggaacttgacctgacaaccgacatttcttaaaaa

SEQ ID NO: 374536 - DNA, 382 bp, Homo sapiens
atagccaccgtgtggctgctagcagggaagcccttggtggccacataagggctcccttttccaactctctcagctgctcctcactctcactcctgggtgtgctgggcagtggggtgcaatgtgcacgtaggtgcacactctccctgggcggcagcgagcagcagaggtctgatctgtggtcggatgacgagaggaagtgcaagtaaagcagctgcagcggtgagtgggcctaggaagaatggcatcaacaggccaggcagggatgcgggtggtgttcggctaaccctgagaaagggaccagaatgcacctgagtcttgattttcattcccaatagcaggtcagcacgaaacccaaaaacgctctgatttctgccttccatgc

SEQ ID NO: 374537 - DNA, 284 bp, Homo sapiens
cctgcttgaaactgcttgtacattagagacagagaagagtccatgagaatcaacattttctgaggactccaactgtgtgccaagagagttcccctgctggtgcctcctctgtagtaaaggaaaggtaacattcctgcaaggctttgaagcttacagcgtgcttgcccttagattcttgtgttgtgttctgggtcagcaggaatgcctcgccaggtcctttttctcatcctaatgtgacactgaattcttcacaggctcctgggaccacattatcattctcttca

SEQ ID NO: 374538 - DNA, 3268 bp, Homo sapiens
  misc_feature (1137)..(1137): n is a, c, g, or t
acttgccacaaggagacgctgttcagtttaccggatcctgtcccgcgccagccaaccaggacaaggccggggagctcgagacaggcagcctagaccaagaaccggaaggaggaaaaggaaccggagggaggaagaggaggggcgggacgagaccaccaggcaagagtccaaactttcccgcggcgacctaactgcacctccagtgtcttcccccagagggcacagaagcagcaagaagggcgggaacacttgactggggtccatgcagctctaggctgagtcttgcagggctgagccccccaggcctgctctcctgtgtcctggccgctccgtcagtgcctgccagtggggtccagagggaccgtttttttaacgcctcttttgcagtctcccgcattgacttcataaccaagttctgggtccctgcctctggagtgcctgatgagacaaaacggctcctcgtcctgcatccccgctgctacttccagaattcaggcctcgtggtctggagcctgcactgttccatgagcctcctgagcaacctggagtcctctgtctttcttccctcagtgagatgcgcctacttctccctggagaagcttgaggaagcagaaatgctggagatgagacggagttttgctcttgttgcccaggctggtgcaatctcggctcaccactacctctgccttctgggctcaagcgattctccttcctcagcctcctgagtgctgggattacagagacctcgtccgcacaggggcttgttcttctgtgtctttgcagggctgttttggactcagtattcacctaagcactccaaattacccagcacaccctgcctgcatggcgctgcgctgcaccttcactctggtcacgggtctggcagtcagctcaccaattcctcctgcttccctgggacttgccggcttttagcactgcaattcactcagcaaactgggactgttggtcaccctacctggcagccagtgataaggtgagggccactcctgggagggaggacacctgtggggaaaattcttgtgttatttatttctccttcgggatagggtgcctgcagcgcttcatgggagggggtgggctgatgctgcgggctcagaagtttcaagggcatctggngagaccagatattcagagaccttctagatgtgcctgttccatgtatcagggacgcaggttttcccaacagggctggtgtcattggcatgacagacctgccttggctgagcgttcacctgtctttggagttcagccaccttagcaagtcctgggtttgttcttcagactttgctgctcgcccattgcctggatcgggggctactttgtaaaccaccaggaagactccagtgtttctggttaatttttagatgtttgttaattgctcttggtctctcattaatcccctgtgggtcatccaggaaacatactcaccactgtctgttctctgagttttcatttccaggcatccgccctgcctggatctcctcacctgccaggaacttcctctccacaagccggccatcccagcaaaagttctaacaccaaaggtctggcaactagcctgccatcttgtgcctggagccgcctgcgtgccacctactcccgaagatgggaaccttgttgccagttgggcagatgcggggcaatcctgtaccaagaccccattttaccacctgctttctcagaccactctggaacccactgtctcagattgtgtcctccaggaagcagaccatgagagggagttggcagggccaaagatttactggggctaactaacactcaggaaagggataggaaggaaacagggctggagagcaggttgagcccgacctgacagtctcgagcagcccaacagggaggtgtggagcaagggttgcccactagaggggcctgcattgggtacgggtgatggggtccacatggtacctggcatatagcaggctgtgcaatccatattaactgactggataaattaatgcccagaaaaggtgccctggagaatgggtgtgtgctgaacacaatagggaagggcccagcatctgccttggcataggcagaactgtgctgtgccctgcaacaggccacctgagagctgctttgatcttgtgtgtacattagatgactgccaggggcatgaaggggatgtgcttccagggcatttgctggcagggcgtctcgtgatctcttggtattggtgtgagcacagcctggcaggagagggcagatctccatgcaaagtatgtcagaaagcagatggaagccaggccccctcctgaaagaggctccttgaagagacagagaagagtccatgagaatcaacattttctgaggactccaactgtgtgccaagagagttcccctgctggtgcctcctctgtagtaaaggaaaggctcctgggaccacattatcattctcttcactcgagagatgaggacactgaaattcagagaggggaagtgatttgcctcagcttgtactaaagaaacatttcaacagagaacccagtggaaattatgacatgttatcttctcagagtcctgaactcccatccctacctcagaagagactcctctgttcacagaagctaaaggcagttccttcccaatggcaactatgtttggatgttggatctacactttctcaagcactgtgatcttcaaattttttcaggaagaaagagagaatcagcaacatggcattgaaggtacccgttgacagtgacgtgcatcacagcattaacaggagaaatgcttgtgtgtgcaaatgggagacaaaggaaagggaccaccacatccatggagtgcaccgcgtgagagaaatgctcaggaagggaattgaccagattggctgtggagagaaaagagaaggaacatgggaggcagagctgagcaaccaggctttcactgctgaatgtctgagccagctccatcgtacaacaggagtgagggaagtacctgcttcacaaggttgtcatagccatcaaatgggatcacactctaaaggcagttctggaggccagaaatcagaaatcaaggtgtcagcagttccaagctccctgcgaaggctctaggggataatccttccttgcttcttccagcttctggtggatccaggtgttcctttggcttgtggccgtatcactccaacctctggctccatcttcacccttacctacttccctgtgtatcttgaatctcctgccactctcttataatgacacgtcattggatttagtgcctatttgga

SEQ ID NO: 374539 - DNA, 5976 bp, Homo sapiens
  misc_feature (138)..(138): n is a, c, g, or t
gcgatctagacctagttagccaagtctctaacgtgacatagggaaagcttgcaaggcaactggcccgcccccgctctgcgcctgtctctcggccacgcctattgctgcaggatgacgcgcacctctagaacccgcccnggagggtgagtgggacgcagggaagagtcgcacggacgcactcgcgctgcggccagcgcccgggcctgcgggcccgggcggcggctgtgttgcgcagtcttcatgggttcccgacgaggaggtctctgtggctgcggcggcggctgctaactgcgccacctgctgcagcctgtccccgccgctctgaagcggccgcgtcgaagccgaaatgccgccaccccggaccggccgaggccttctctggctgggtctggttctgagctccgtctgcgtcgccctcggatccgaaacgcaggccaactcgaccacagatgctctgaacgttcttctcatcatcgtggatgacctgcgcccctccctgggctgttatggggataagctggtgaggtccccaaatattgaccaactggcatcccacagcctcctcttccagaatgcctttgcgcagcaagcagtgtgcgccccgagccgcgtttctttcctcactggcaggagacctgacaccacccgcctgtacgacttcaactcctactggagggtgcacgctggaaacttctccaccatcccccagtacttcaaggagaatggctatgtgaccatgtcggtgggaaaagtctttcaccctgggatatcttctaaccataccgatgattctccgtatagctggtcttttccaccttatcatccttcctctgagaagtatgaaaacactaagacatgtcgagggccagatggagaactccatgccaacctgctttgccctgtggatgtgctggatgttcccgagggcaccttgcctgacaaacagagcactgagcaagccatacagttgttggaaaagatgaaaacgtcagccagtcctttcttcctggccgttgggtatcataagccacacatccccttcagataccccaaggaatttcagaagttgtatcccttggagaacatcaccctggcccccgatcccgaggtccctgatggcctaccccctgtggcctacaacccctggatggacatcaggcaacgggaagacgtccaagccttaaacatcagtgtgccgtatggtccaattcctgtggactttcagcggaaaatccgccagagctactttgcctctgtgtcatatttggatacacaggtcggccgcctcttgagtgctttggacgatcttcagctggccaacagcaccatcattgcatttacctcggatcatgggtgggctctaggtgaacatggagaatgggccaaatacagcaattttgatgttgctacccatgttcccctgatattctatgttcctggaaggacggcttcacttccggaggcaggcgagaagcttttcccttacctcgacccttttgattccgcctcacagttgatggagccaggcaggcaatccatggaccttgtggaacttgtgtctctttttcccacgctggctggacttgcaggactgcaggttccacctcgctgccccgttccttcatttcacgttgagctgtgcagagaaggcaagaaccttctgaagcattttcgattccgtgacttggaagaggatccgtacctccctggtaatccccgtgaactgattgcctatagccagtatccccggccttcagacatccctcagtggaattctgacaagccgagtttaaaagatataaagatcatgggctattccatacgcaccatagactataggtatactgtgtgggttggcttcaatcctgatgaatttctagctaacttttctgacatccatgcaggggaactgtattttgtggattctgacccattgcaggatcacaatatgtataatgattcccaaggtggagatcttttccagttgttgatgccttgagttttgccaaccatggatggcaaatgtgatgtgctcccttccagctggtgagaggaggagttagagctggtcgttttgtgattacccataatattggaagcagcctgagggctagttaatccaaacatgcatcaacaatttggcctgagaatatgtaacagccaaaccttttcgtttagtctttattaaaatttataattggtaattggaccagttttttttttaatttccctctttttaaaacagttacggcttatttactgaataaatacaaagcaaacaaactcaagttatgtcatacctttggatacgaagaccatacataataaccaaacataacattatacacaaagaatactttcattatttgtggaatttagtgcatttcaaaaagtaatcatatatcaaactaggcaccacactaagttcctgattattttgtttataatttaataatatatcttatgagccctatatattcaaaatattatgttaacatgtaatccatgtttctttttcaaatctaaagttaaaaaaaaatagcagaagccagtgtcttaaagtctatcttttgtttctaagaccatgggatttcataatctcaagataaaatatgtatgaagtaattaatgtagaatttttacaccaaataataaataatgcttaataaactagagatatgagatgtgtaggaaatttggttaaacttttttcagatactttctggcccaaataataatttgttagcaaataatatgacccttgaactcaatggccatctattaaaagactgttgttcacactggaaaacatttaaagatgtgactatatccatgggtggattgaatcactcaaaatatattagtatccttctttagggatggttggttacagacatgtatttattcaggaggcagaaaatattccattttaattgcttattaaagaaaacattaaattctaaattattttgaggactgtgaagacttttcattagtgtaatattaggtcattgtcaatctcccagaatgtagttctatattctctaaatatgaaagtatccagaaaggccagtggtagtaaaaagcttagtgtatataatctcaaaagggatggaatatttacagctcatatttataacatgttgaatcttctcagttatcagtagtcatcagaagtgtcaatagctttctaaataaatattaaatatctactgtcctgtagtgaaggagtaatttttagtaattttctctttacaaagtctccagtgtttccaggtaaatatttgtgaaacaaaatacagcaaactacattgttacttcagtgtattgttgccaaaaatgacaagatattatattaaaatcagtaaattttagacagattttaaaaattaattagcctacaatagaggttatatggtaacacggtgatcttctaagcagttaagtgactgactgttctggcaacaacgacttctccgtgactgaagggccctgttcatttcctgatcctgaagctcgtctctcttttgagcctccgcttgctttggtcgatggtttccctcagctttttctttgctgttcttcatcctcgttgttgctgtcatcatgttcactgtggcttttacaatacagcctgtaaattccttatgacatagttcagtgcatttggctttatcgcctgctccacagttctttacctttacttggcttagagaaactgtatctttgttgcttcatataacctttccccaaccccactaagctggacataacttattagtggtcctcccgtcactttatttgtagaaatctctctttcacatgagcaggggttctttcatgtggtttagctgacagcagaactagtgattctagacattttgcatggccctcattcagtggctcacaaacatgagggagcatcagaactacttgaggggcttgttaaaacccagtgcgttagaagtcggatgcggtggctcacacctgtaatcccagcactttgggaggcccaggcaggcggatcacttgaggttaggagttcaagaccagcctggccaacatggtgaaaccccgtctctactaaaaatacaaaagttagccgggtgtggtggtgcatgcctgtaatcccagcttcttgggaggccaaggcacaagaatcgcttgaaccaggagacggaggtttcagtgaatgaagatcgtgccattgtattccagcctcggcaacacagcaggactgtgattttctttggagactcctagattttctgtggttttgaactgaatttgttggatgttggcaagtgcctcttatgagctgtttctttatcctgcatttgccccacaaagacttatctggaggtgagcaaagtatgtttggtagtgaggtcacaaaggcaatcagccccttcctccccactcccattgccatcttctcagtccttctccctttctttccaagtagtttacccacccctcctctttcctcccctgtccctaaaataatccacgtgtcttcctaaaatctctctttgatcctgtcctttgataacaccgtcagtgcctactactgggtctagacagacctctgttgagcagtcagagtcttccctgactccacaatgcccctttccttggctgaccagtatgactactggtccccacctttcccttgcctatccctacctccctcctactaggttgtcccatccctctcttcacccattcattcatgaccatttttcactaccaagctccccccctcccgaaggaggctgaggtttttgtgactctctagactctattgtgggatggaatgaacattgctaaagaatcttgtgttcgctttactttaaaaaggtatttttttcctaattataaaactgatgtgtcagttacggaaaaattagaaatgcagcacaaatacatgaatattttaccacgaaattgccatataatatcttgtcttttttgggggtgtgaattttttgcattgttctgatcatattctttatcatgtaatttatgttcttttttactaagtattatgtgtggttattatagattttcacaaagatatattgctggtaatatattttattgtgtagtcttataatttacttaaccttctttcaattgttagaaatttaggctatttccagattttcagtattgtaaataatgctgtgatgaccaattttgtgaataaaatgtttttatgtatttcagattattcccttaggatagtctctcagtgccaagttgtcaaaaacatctctattttgcttatcttcctgctctcttgctgccttagggggtagtaaactgaaacataaagtaaacatgcatacaaataaaaaacataaaacaaaaataagcaacctgatggtaataggtgaaagtggtaacctgttttaactttgaattcttgccgggcgcggtggctcacgcctgtaatcccagcactttgggaggctgaggcgggtggatcacgaggtcaggagttcaaaaccagcctggccaagatggtgaaatcccgtctctactaaaaatacaaaaattagccgggcgtggtggcgggcgcctgtaatcccagctacttgggaggctgaggcagagaattgcttgaacccaggaggcggaggttgcagtgagccaagatcgcgccactgcactccagcctgggtgacagagcgagactccgtctcaaataaaaaacaacaaaaaacaaaaaaaacttaaaattctttgcttgttagtgaccttgatcatggttctctttgtacgatagttgggcatctgtatttccacttgtgtgaatttgcctttaaattttggttatgggtttcaccttttaaaataatcaaacatatttatcttttcctgtgtgataggtttttttctgtatcttttcctgttaaacacacagacccctccccaatctggacattgaataaatattcattttcctttgca

SEQ ID NO: 374540 - DNA, 5538 bp, Homo sapiens
  misc_feature (138)..(138): n is a, c, g, or t
  misc_feature (5500)..(5500): n is a, c, g, or t
gcgatctagacctagttagccaagtctctaacgtgacatagggaaagcttgcaaggcaactggcccgcccccgctctgcgcctgtctctcggccacgcctattgctgcaggatgacgcgcacctctagaacccgcccnggagggtgagtgggacgcagggaagagtcgcacggacgcactcgcgctgcggccagcgcccgggcctgcgggcccgggcggcggctgtgttgcgcagtcttcatgggttcccgacgaggaggtctctgtggctgcggcggcggctgctaactgcgccacctgctgcagcctgtccccgccgctctgaagcggccgcgtcgaagccgaaatgccgccaccccggaccggccgaggccttctctggctgggtctggttctgagctccgtctgcgtcgccctcggatccgaaacgcaggccaactcgaccacagatgctctgaacgttcttctcatcatcgtggatgacctgcgcccctccctgggctgttatggggataagctggtgaggtccccaaatattgaccaactggcatcccacagcctcctcttccagaatgcctttgcgcagcaagcagtgtgcgccccgagccgcgtttctttcctcactggcaggagacctgacaccacccgcctgtacgacttcaactcctactggagggtgcacgctggaaacttctccaccatcccccagtacttcaaggagaatggctatgtgaccatgtcggtgggaaaagtctttcaccctgggatatcttctaaccataccgatgattctccgtatagctggtcttttccaccttatcatccttcctctgagaagtatgaaaacactaagacatgtcgagggccagatggagaactccatgccaacctgctttgccctgtggatgtgctggatgttcccgagggcaccttgcctgacaaacagagcactgagcaagccatacagttgttggaaaagatgaaaacgtcagccagtcctttcttcctggccgttgggtatcataagccacacatccccttcagataccccaaggaatttcagaagttgtatcccttggagaacatcaccctggcccccgatcccgaggtccctgatggcctaccccctgtggcctacaacccctggatggacatcaggcaacgggaagacgtccaagccttaaacatcagtgtgccgtatggtccaattcctgtggactttcagcggaaaatccgccagagctactttgcctctgtgtcatatttggatacacaggtcggccgcctcttgagtgctttggacgatcttcagctggccaacagcaccatcattgcatttacctcggatcatgggtgggctctaggtgaacatggagaatgggccaaatacagcaattttgatgttgctacccatgttcccctgatattctatgttcctggaaggacggcttcacttccggaggcaggcgagaagcttttcccttacctcgacccttttgattccgcctcacagttgatggagccaggcaggcaatccatggaccttgtggaacttgtgtctctttttcccacgctggctggacttgcaggactgcaggttccacctcgctgccccgttccttcatttcacgttgagctgtgcagagaaggcaagaaccttctgaagcattttcgattccgtgacttggaagaggatccgtacctccctggtaatccccgtgaactgattgcctatagccagtatccccggccttcagacatccctcagtggaattctgacaagccgagtttaaaagatataaagatcatgggctattccatacgcaccatagactataggtatactgtgtgggttggcttcaatcctgatgaatttctagctaacttttctgacatccatgcaggggaactgtattttgtggattctgacccattgcaggatcacaatatgtataatgattcccaaggtggagatcttttccagttgttgatgccttgagttttgccaaccatggatggcaaatgtgatgtgctcccttccagctggtgagaggaggagttagagctggtcgttttgtgattacccataatattggaagcagcctgagggctagttaatccaaacatgcatcaacaatttggcctgagaatatgtaacagccaaaccttttcgtttagtctttattaaaatttataattggtaattggaccagttttttttttaatttccctctttttaaaacagttacggcttatttactgaataaatacaaagcaaacaaactcaagttatgtcatacctttggatacgaagaccatacataataaccaaacataacattatacacaaagaatactttcattatttgtggaatttagtgcatttcaaaaagtaatcatatatcaaactaggcaccacactaagttcctgattattttgtttataatttaataatatatcttatgagccctatatattcaaaatattatgttaacatgtaatccatgtttctttttcaaatctaaagttaaaaaaaaatagcagaagccagtgtcttaaagtctatcttttgtttctaagaccatgggatttcataatctcaagataaaatatgtatgaagtaattaatgtagaatttttacaccaaataataaataatgcttaataaactagagatatgagatgtgtaggaaatttggttaaacttttttcagatactttctggcccaaataataatttgttagcaaataatatgacccttgaactcaatggccatctattaaaagactgttgttcacactggaaaacatttaaagatgtgactatatccatgggtggattgaatcactcaaaatatattagtatccttctttagggatggttggttacagacatgtatttattcaggaggcagaaaatattccattttaattgcttattaaagaaaacattaaattctaaattattttgaggactgtgaagacttttcattagtgtaatattaggtcattgtcaatctcccagaatgtagttctatattctctaaatatgaaagtatccagaaaggccagtggtagtaaaaagcttagtgtatataatctcaaaagggatggaatatttacagctcatatttataacatgttgaatcttctcagttatcagtagtcatcagaagtgtcaatagctttctaaataaatattaaatatctactgtcctgtagtgaaggagtaatttttagtaattttctctttacaaagtctccagtgtttccaggtaaatatttgtgaaacaaaatacagcaaactacattgttacttcagtgtattgttgccaaaaatgacaagatattatattaaaatcagtaaattttagacagattttaaaaattaattagcctacaatagaggttatatggtaacacggtgatcttctaagcagttaagtgactgactgttctggcaacaacgacttctccgtgactgaagggccctgttcatttcctgatcctgaagctcgtctctcttttgagcctccgcttgctttggtcgatggtttccctcagctttttctttgctgttcttcatcctcgttgttgctgtcatcatgttcactgtggcttttacaatacagcctgtaaattccttatgacatagttcagtgcatttggctttatcgcctgctccacagttctttacctttacttggcttagagaaactgtatctttgttgcttcatataacctttccccaaccccactaagctggacataacttattagtggtcctcccgtcactttatttgtagaaatctctctttcacatgagcaggggttctttcatgtggtttagctgacagcagaactagtgattctagacattttgcatggccctcattcagtggctcacaaacatgagggagcatcagaactacttgaggggcttgttaaaacccagtgcgttagaagtcggatgcggtggctcacacctgtaatcccagcactttgggaggcccaggcaggcggatcacttgaggttaggagttcaagaccagcctggccaacatggtgaaaccccgtctctactaaaaatacaaaagttagccgggtgtggtggtgcatgcctgtaatcccagcttcttgggaggccaaggcacaagaatcgcttgaaccaggagacggaggtttcagtgaatgaagatcgtgccattgtattccagcctcggcaacacagcaggactgtgattttctttggagactcctagattttctgtggttttgaactgaatttgttggatgttggcaagtgcctcttatgagctgtttctttatcctgcatttgccccacaaagacttatctggaggtgagcaaagtatgtttggtagtgaggtcacaaaggcaatcagccccttcctccccactcccattgccatcttctcagtccttctccctttctttccaagtagtttacccacccctcctctttcctcccctgtccctaaaataatccacgtgtcttcctaaaatctctctttgatcctgtcctttgataacaccgtcagtgcctactactgggtctagacagacctctgttgagcagtcagagtcttccctgactccacaatgcccctttccttggctgaccagtatgactactggtccccacctttcccttgcctatccctacctccctcctactaggttgtcccatccctctcttcacccattcattcatgaccatttttcactaccaagctccccccctcccgaaggaggctgaggtttttgtgactctctagactctattgtgggatggaatgaacattgctaaagaatcttgtgttcgctttactttaaaaaggtatttttttcctaattataaaactgatgtgtcagttacggaaaaattagaaatgcagcacaaatacatgaatattttaccacgaaattgccatataatatcttgtcttttttgggggtgtgaattttttgcattgttctgatcatattctttatcatgtaatttatgttcttttttactaagtattatgtgtggttattatagattttcacaaagatatattgctggtaatatattttattgtgtagtcttataatttacttaaccttctttcaattgttagaaatttaggctatttccagattttcagtattgtaaataatgctgtgatgaccaattttgtgaataaaatgtttttatgtatttcagattattcccttaggatagtctctcagtgccaagttgtcaaaaacatctctattttgcttatcttcctgctctcttgctgccttagggggtagtaaactgaaacataaagtaaacatgcatacaaataaaaaacataaaacaaaaataagcaacctgatggtaataggtgaaagtggtaacctgttttaactttgaattcttgccgggcgcggtggctcacgcctgtaatcccaaacaggtgggattacagacacacaaaattttcaagttnggggatatttaacttcagttcgtggtaaaaatcacatg

SEQ ID NO: 374541 - DNA, 5922 bp, Homo sapiens
  misc_feature (138)..(138): n is a, c, g, or t
gcgatctagacctagttagccaagtctctaacgtgacatagggaaagcttgcaaggcaactggcccgcccccgctctgcgcctgtctctcggccacgcctattgctgcaggatgacgcgcacctctagaacccgcccnggagggtgagtgggacgcagggaagagtcgcacggacgcactcgcgctgcggccagcgcccgggcctgcgggcccgggcggcggctgtgttgcgcagtcttcatgggttcccgacgaggaggtctctgtggctgcggcggcggctgctaactgcgccacctgctgcagcctgtccccgccgctctgaagcggccgcgtcgaagccgaaatgccgccaccccggaccggccgaggccttctctggctgggtctggttctgagctccgtctgcgtcgccctcggatccgaaacgcaggccaactcgaccacagatgctctgaacgttcttctcatcatcgtggatgacctgcgcccctccctgggctgttatggggataagctggtgaggtccccaaatattgaccaactggcatcccacagcctcctcttccagaatgcctttgcgcagcaagcagtgtgcgccccgagccgcgtttctttcctcactggcaggagacctgacaccacccgcctgtacgacttcaactcctactggagggtgcacgctggaaacttctccaccatcccccagtacttcaaggagaatggctatgtgaccatgtcggtgggaaaagtctttcaccctgggatatcttctaaccataccgatgattctccgtatagctggtcttttccaccttatcatccttcctctgagaagtatgaaaacactaagacatgtcgagggccagatggagaactccatgccaacctgctttgccctgtggatgtgctggatgttcccgagggcaccttgcctgacaaacagagcactgagcaagccatacagttgttggaaaagatgaaaacgtcagccagtcctttcttcctggccgttgggtatcataagccacacatccccttcagataccccaaggaatttcagaagttgtatcccttggagaacatcaccctggcccccgatcccgaggtccctgatggcctaccccctgtggcctacaacccctggatggacatcaggcaacgggaagacgtccaagccttaaacatcagtgtgccgtatggtccaattcctgtggactttcagcggaaaatccgccagagctactttgcctctgtgtcatatttggatacacaggtcggccgcctcttgagtgctttggacgatcttcagctggccaacagcaccatcattgcatttacctcggatcatgggtgggctctaggtgaacatggagaatgggccaaatacagcaattttgatgttgctacccatgttcccctgatattctatgttcctggaaggacggcttcacttccggaggcaggcgagaagcttttcccttacctcgacccttttgattccgcctcacagttgatggagccaggcaggcaatccatggaccttgtggaacttgtgtctctttttcccacgctggctggacttgcaggactgcaggttccacctcgctgccccgttccttcatttcacgttgagctgtgcagagaaggcaagaaccttctgaagcattttcgattccgtgacttggaagaggatccgtacctccctggtaatccccgtgaactgattgcctatagccagtatccccggccttcagacatccctcagtggaattctgacaagccgagtttaaaagatataaagatcatgggctattccatacgcaccatagactataggtatactgtgtgggttggcttcaatcctgatgaatttctagctaacttttctgacatccatgcaggggaactgtattttgtggattctgacccattgcaggatcacaatatgtataatgattcccaaggtggagatcttttccagttgttgatgccttgagttttgccaaccatggatggcaaatgtgatgtgctcccttccagctggtgagaggaggagttagagctggtcgttttgtgattacccataatattggaagcagcctgagggctagttaatccaaacatgcatcaacaatttggcctgagaatatgtaacagccaaaccttttcgtttagtctttattaaaatttataattggtaattggaccagttttttttttaatttccctctttttaaaacagttacggcttatttactgaataaatacaaagcaaacaaactcaagttatgtcatacctttggatacgaagaccatacataataaccaaacataacattatacacaaagaatactttcattatttgtggaatttagtgcatttcaaaaagtaatcatatatcaaactaggcaccacactaagttcctgattattttgtttataatttaataatatatcttatgagccctatatattcaaaatattatgttaacatgtaatccatgtttctttttcaaatctaaagttaaaaaaaaatagcagaagccagtgtcttaaagtctatcttttgtttctaagaccatgggatttcataatctcaagataaaatatgtatgaagtaattaatgtagaatttttacaccaaataataaataatgcttaataaactagagatatgagatgtgtaggaaatttggttaaacttttttcagatactttctggcccaaataataatttgttagcaaataatatgacccttgaactcaatggccatctattaaaagactgttgttcacactggaaaacatttaaagatgtgactatatccatgggtggattgaatcactcaaaatatattagtatccttctttagggatggttggttacagacatgtatttattcaggaggcagaaaatattccattttaattgcttattaaagaaaacattaaattctaaattattttgaggactgtgaagacttttcattagtgtaatattaggtcattgtcaatctcccagaatgtagttctatattctctaaatatgaaagtatccagaaaggccagtggtagtaaaaagcttagtgtatataatctcaaaagggatggaatatttacagctcatatttataacatgttgaatcttctcagttatcagtagtcatcagaagtgtcaatagctttctaaataaatattaaatatctactgtcctgtagtgaaggagtaatttttagtaattttctctttacaaagtctccagtgtttccaggtaaatatttgtgaaacaaaatacagcaaactacattgttacttcagtgtattgttgccaaaaatgacaagatattatattaaaatcagtaaattttagacagattttaaaaattaattagcctacaatagaggttatatggtaacacggtgatcttctaagcagttaagtgactgactgttctggcaacaacgacttctccgtgactgaagggccctgttcatttcctgatcctgaagctcgtctctcttttgagcctccgcttgctttggtcgatggtttccctcagctttttctttgctgttcttcatcctcgttgttgctgtcatcatgttcactgtggcttttacaatacagcctgtaaattccttatgacatagttcagtgcatttggctttatcgcctgctccacagttctttacctttacttggcttagagaaactgtatctttgttgcttcatataacctttccccaaccccactaagctggacataacttattagtggtcctcccgtcactttatttgtagaaatctctctttcacatgagcaggggttctttcatgtggtttagctgacagcagaactagtgattctagacattttgcatggccctcattcagtggctcacaaacatgagggagcatcagaactacttgaggggcttgttaaaacccagtgcgttagaagtcggatgcggtggctcacacctgtaatcccagcactttgggaggcccaggcaggcggatcacttgaggttaggagttcaagaccagcctggccaacatggtgaaaccccgtctctactaaaaatacaaaagttagccgggtgtggtggtgcatgcctgtaatcccagcttcttgggaggccaaggcacaagaatcgcttgaaccaggagacggaggtttcagtgaatgaagatcgtgccattgtattccagcctcggcaacacagcaggactgtgattttctttggagactcctagattttctgtggttttgaactgaatttgttggatgttggcaagtgcctcttatgagctgtttctttatcctgcatttgccccacaaagacttatctggaggtgagcaaagtatgtttggtagtgaggtcacaaaggcaatcagccccttcctccccactcccattgccatcttctcagtccttctccctttctttccaagtagtttacccacccctcctctttcctcccctgtccctaaaataatccacgtgtcttccttctagacagacctctgttgagcagtcagagtcttccctgactccacaatgcccctttccttggctgaccagtatgactactggtccccacctttcccttgcctatccctacctccctcctactaggttgtcccatccctctcttcacccattcattcatgaccatttttcactaccaagctccccccctcccgaaggaggctgaggtttttgtgactctctagactctattgtgggatggaatgaacattgctaaagaatcttgtgttcgctttactttaaaaaggtatttttttcctaattataaaactgatgtgtcagttacggaaaaattagaaatgcagcacaaatacatgaatattttaccacgaaattgccatataatatcttgtcttttttgggggtgtgaattttttgcattgttctgatcatattctttatcatgtaatttatgttcttttttactaagtattatgtgtggttattatagattttcacaaagatatattgctggtaatatattttattgtgtagtcttataatttacttaaccttctttcaattgttagaaatttaggctatttccagattttcagtattgtaaataatgctgtgatgaccaattttgtgaataaaatgtttttatgtatttcagattattcccttaggatagtctctcagtgccaagttgtcaaaaacatctctattttgcttatcttcctgctctcttgctgccttagggggtagtaaactgaaacataaagtaaacatgcatacaaataaaaaacataaaacaaaaataagcaacctgatggtaataggtgaaagtggtaacctgttttaactttgaattcttgccgggcgcggtggctcacgcctgtaatcccagcactttgggaggctgaggcgggtggatcacgaggtcaggagttcaaaaccagcctggccaagatggtgaaatcccgtctctactaaaaatacaaaaattagccgggcgtggtggcgggcgcctgtaatcccagctacttgggaggctgaggcagagaattgcttgaacccaggaggcggaggttgcagtgagccaagatcgcgccactgcactccagcctgggtgacagagcgagactccgtctcaaataaaaaacaacaaaaaacaaaaaaaacttaaaattctttgcttgttagtgaccttgatcatggttctctttgtacgatagttgggcatctgtatttccacttgtgtgaatttgcctttaaattttggttatgggtttcaccttttaaaataatcaaacatatttatcttttcctgtgtgataggtttttttctgtatcttttcctgttaaacacacagacccctccccaatctggacattgaataaatattcattttcctttgca

SEQ ID NO: 374542 - DNA, 6033 bp, Homo sapiens
  misc_feature (248)..(248): n is a, c, g, or t
ttataaaaagaaggaagggcagggcttccaggtgaaaggcatagcacaagcaaaggcaaaaagacgggtaactgctagttgttaagggcagtggctgaatcgctatacccctagcagttctacacctaggggcctgcgggccgctgggtctgcgaagcttgcaaggcaactggcccgcccccgctctgcgcctgtctctcggccacgcctattgctgcaggatgacgcgcacctctagaacccgcccnggagggtgagtgggacgcagggaagagtcgcacggacgcactcgcgctgcggccagcgcccgggcctgcgggcccgggcggcggctgtgttgcgcagtcttcatgggttcccgacgaggaggtctctgtggctgcggcggcggctgctaactgcgccacctgctgcagcctgtccccgccgctctgaagcggccgcgtcgaagccgaaatgccgccaccccggaccggccgaggccttctctggctgggtctggttctgagctccgtctgcgtcgccctcggatccgaaacgcaggccaactcgaccacagatgctctgaacgttcttctcatcatcgtggatgacctgcgcccctccctgggctgttatggggataagctggtgaggtccccaaatattgaccaactggcatcccacagcctcctcttccagaatgcctttgcgcagcaagcagtgtgcgccccgagccgcgtttctttcctcactggcaggagacctgacaccacccgcctgtacgacttcaactcctactggagggtgcacgctggaaacttctccaccatcccccagtacttcaaggagaatggctatgtgaccatgtcggtgggaaaagtctttcaccctgggatatcttctaaccataccgatgattctccgtatagctggtcttttccaccttatcatccttcctctgagaagtatgaaaacactaagacatgtcgagggccagatggagaactccatgccaacctgctttgccctgtggatgtgctggatgttcccgagggcaccttgcctgacaaacagagcactgagcaagccatacagttgttggaaaagatgaaaacgtcagccagtcctttcttcctggccgttgggtatcataagccacacatccccttcagataccccaaggaatttcagaagttgtatcccttggagaacatcaccctggcccccgatcccgaggtccctgatggcctaccccctgtggcctacaacccctggatggacatcaggcaacgggaagacgtccaagccttaaacatcagtgtgccgtatggtccaattcctgtggactttcagcggaaaatccgccagagctactttgcctctgtgtcatatttggatacacaggtcggccgcctcttgagtgctttggacgatcttcagctggccaacagcaccatcattgcatttacctcggatcatgggtgggctctaggtgaacatggagaatgggccaaatacagcaattttgatgttgctacccatgttcccctgatattctatgttcctggaaggacggcttcacttccggaggcaggcgagaagcttttcccttacctcgacccttttgattccgcctcacagttgatggagccaggcaggcaatccatggaccttgtggaacttgtgtctctttttcccacgctggctggacttgcaggactgcaggttccacctcgctgccccgttccttcatttcacgttgagctgtgcagagaaggcaagaaccttctgaagcattttcgattccgtgacttggaagaggatccgtacctccctggtaatccccgtgaactgattgcctatagccagtatccccggccttcagacatccctcagtggaattctgacaagccgagtttaaaagatataaagatcatgggctattccatacgcaccatagactataggtatactgtgtgggttggcttcaatcctgatgaatttctagctaacttttctgacatccatgcaggggaactgtattttgtggattctgacccattgcaggatcacaatatgtataatgattcccaaggtggagatcttttccagttgttgatgccttgagttttgccaaccatggatggcaaatgtgatgtgctcccttccagctggtgagaggaggagttagagctggtccatgcatcaacaatttggcctgagaatatgtaacagccaaaccttttcgtttagtctttattaaaatttataattggtaattggaccagttttttttttaatttccctctttttaaaacagttacggcttatttactgaataaatacaaagcaaacaaactcaagttatgtcatacctttggatacgaagaccatacataataaccaaacataacattatacacaaagaatactttcattatttgtggaatttagtgcatttcaaaaagtaatcatatatcaaactaggcaccacactaagttcctgattattttgtttataatttaataatatatcttatgagccctatatattcaaaatattatgttaacatgtaatccatgtttctttttcaaatctaaagttaaaaaaaaatagcagaagccagtgtcttaaagtctatcttttgtttctaagaccatgggatttcataatctcaagataaaatatgtatgaagtaattaatgtagaatttttacaccaaataataaataatgcttaataaactagagatatgagatgtgtaggaaatttggttaaacttttttcagatactttctggcccaaataataatttgttagcaaataatatgacccttgaactcaatggccatctattaaaagactgttgttcacactggaaaacatttaaagatgtgactatatccatgggtggattgaatcactcaaaatatattagtatccttctttagggatggttggttacagacatgtatttattcaggaggcagaaaatattccattttaattgcttattaaagaaaacattaaattctaaattattttgaggactgtgaagacttttcattagtgtaatattaggtcattgtcaatctcccagaatgtagttctatattctctaaatatgaaagtatccagaaaggccagtggtagtaaaaagcttagtgtatataatctcaaaagggatggaatatttacagctcatatttataacatgttgaatcttctcagttatcagtagtcatcagaagtgtcaatagctttctaaataaatattaaatatctactgtcctgtagtgaaggagtaatttttagtaattttctctttacaaagtctccagtgtttccaggtaaatatttgtgaaacaaaatacagcaaactacattgttacttcagtgtattgttgccaaaaatgacaagatattatattaaaatcagtaaattttagacagattttaaaaattaattagcctacaatagaggttatatggtaacacggtgatcttctaagcagttaagtgactgactgttctggcaacaacgacttctccgtgactgaagggccctgttcatttcctgatcctgaagctcgtctctcttttgagcctccgcttgctttggtcgatggtttccctcagctttttctttgctgttcttcatcctcgttgttgctgtcatcatgttcactgtggcttttacaatacagcctgtaaattccttatgacatagttcagtgcatttggctttatcgcctgctccacagttctttacctttacttggcttagagaaactgtatctttgttgcttcatataacctttccccaaccccactaagctggacataacttattagtggtcctcccgtcactttatttgtagaaatctctctttcacatgagcaggggttctttcatgtggtttagctgacagcagaactagtgattctagacattttgcatggccctcattcagtggctcacaaacatgagggagcatcagaactacttgaggggcttgttaaaacccagtgcgttagaagtcggatgcggtggctcacacctgtaatcccagcactttgggaggcccaggcaggcggatcacttgaggttaggagttcaagaccagcctggccaacatggtgaaaccccgtctctactaaaaatacaaaagttagccgggtgtggtggtgcatgcctgtaatcccagcttcttgggaggccaaggcacaagaatcgcttgaaccaggagacggaggtttcagtgaatgaagatcgtgccattgtattccagcctcggcaacacagcaggactgtgattttctttggagactcctagattttctgtggttttgaactgaatttgttggatgttggcaagtgcctcttatgagctgtttctttatcctgcatttgccccacaaagacttatctggaggtgagcaaagtatgtttggtagtgaggtcacaaaggcaatcagccccttcctccccactcccattgccatcttctcagtccttctccctttctttccaagtagtttacccacccctcctctttcctcccctgtccctaaaataatccacgtgtcttcctaaaatctctctttgatcctgtcctttgataacaccgtcagtgcctactactgggtctagacagacctctgttgagcagtcagagtcttccctgactccacaatgcccctttccttggctgaccagtatgactactggtccccacctttcccttgcctatccctacctccctcctactaggttgtcccatccctctcttcacccattcattcatgaccatttttcactaccaagctccccccctcccgaaggaggctgaggtttttgtgactctctagactctattgtgggatggaatgaacattgctaaagaatcttgtgttcgctttactttaaaaaggtatttttttcctaattataaaactgatgtgtcagttacggaaaaattagaaatgcagcacaaatacatgaatattttaccacgaaattgccatataatatcttgtcttttttgggggtgtgaattttttgcattgttctgatcatattctttatcatgtaatttatgttcttttttactaagtattatgtgtggttattatagattttcacaaagatatattgctggtaatatattttattgtgtagtcttataatttacttaaccttctttcaattgttagaaatttaggctatttccagattttcagtattgtaaataatgctgtgatgaccaattttgtgaataaaatgtttttatgtatttcagattattcccttaggatagtctctcagtgccaagttgtcaaaaacatctctattttgcttatcttcctgctctcttgctgccttagggggtagtaaactgaaacataaagtaaacatgcatacaaataaaaaacataaaacaaaaataagcaacctgatggtaataggtgaaagtggtaacctgttttaactttgaattcttgccgggcgcggtggctcacgcctgtaatcccagcactttgggaggctgaggcgggtggatcacgaggtcaggagttcaaaaccagcctggccaagatggtgaaatcccgtctctactaaaaatacaaaaattagccgggcgtggtggcgggcgcctgtaatcccagctacttgggaggctgaggcagagaattgcttgaacccaggaggcggaggttgcagtgagccaagatcgcgccactgcactccagcctgggtgacagagcgagactccgtctcaaataaaaaacaacaaaaaacaaaaaaaacttaaaattctttgcttgttagtgaccttgatcatggttctctttgtacgatagttgggcatctgtatttccacttgtgtgaatttgcctttaaattttggttatgggtttcaccttttaaaataatcaaacatatttatcttttcctgtgtgataggtttttttctgtatcttttcctgttaaacacacagacccctccccaatctggacattgaataaatattcattttcctttgca

SEQ ID NO: 374543 - DNA, 6189 bp, Homo sapiens
  misc_feature (248)..(248): n is a, c, g, or t
ttataaaaagaaggaagggcagggcttccaggtgaaaggcatagcacaagcaaaggcaaaaagacgggtaactgctagttgttaagggcagtggctgaatcgctatacccctagcagttctacacctaggggcctgcgggccgctgggtctgcgaagcttgcaaggcaactggcccgcccccgctctgcgcctgtctctcggccacgcctattgctgcaggatgacgcgcacctctagaacccgcccnggagggtgagtgggacgcagggaagagtcgcacggacgcactcgcgctgcggccagcgcccgggcctgcgggcccgggcggcggctgtgttgcgcagtcttcatgggttcccgacgaggaggtctctgtggctgcggcggcggctgctaactgcgccacctgctgcagcctgtccccgccgctctgaagcggccgcgtcgaagccgaaatgccgccaccccggaccggccgaggccttctctggctgggtctggttctgagctccgtctgcgtcgccctcggatccgaaacgcaggccaactcgaccacagatgctctgaacgttcttctcatcatcgtggatgacctgcgcccctccctgggctgttatggggataagctggtgaggtccccaaatattgaccaactggcatcccacagcctcctcttccagaatgcctttgcgcagcaagcagtgtgcgccccgagccgcgtttctttcctcactggcaggagacctgacaccacccgcctgtacgacttcaactcctactggagggtgcacgctggaaacttctccaccatcccccagtacttcaaggagaatggctatgtgaccatgtcggtgggaaaagtctttcaccctgcccttgtgggaacacatttttcagctgaatctttgttctcaagacctttttctgttagcattgggcctgcttcaagatgacagtagccaccactgtgtgccagggatatcttctaaccataccgatgattctccgtatagctggtcttttccaccttatcatccttcctctgagaagtatgaaaacactaagacatgtcgagggccagatggagaactccatgccaacctgctttgccctgtggatgtgctggatgttcccgagggcaccttgcctgacaaacagagcactgagcaagccatacagttgttggaaaagatgaaaacgtcagccagtcctttcttcctggccgttgggtatcataagccacacatccccttcagataccccaaggaatttcagaagttgtatcccttggagaacatcaccctggcccccgatcccgaggtccctgatggcctaccccctgtggcctacaacccctggatggacatcaggcaacgggaagacgtccaagccttaaacatcagtgtgccgtatggtccaattcctgtggactttcagcggaaaatccgccagagctactttgcctctgtgtcatatttggatacacaggtcggccgcctcttgagtgctttggacgatcttcagctggccaacagcaccatcattgcatttacctcggatcatgggtgggctctaggtgaacatggagaatgggccaaatacagcaattttgatgttgctacccatgttcccctgatattctatgttcctggaaggacggcttcacttccggaggcaggcgagaagcttttcccttacctcgacccttttgattccgcctcacagttgatggagccaggcaggcaatccatggaccttgtggaacttgtgtctctttttcccacgctggctggacttgcaggactgcaggttccacctcgctgccccgttccttcatttcacgttgagctgtgcagagaaggcaagaaccttctgaagcattttcgattccgtgacttggaagaggatccgtacctccctggtaatccccgtgaactgattgcctatagccagtatccccggccttcagacatccctcagtggaattctgacaagccgagtttaaaagatataaagatcatgggctattccatacgcaccatagactataggtatactgtgtgggttggcttcaatcctgatgaatttctagctaacttttctgacatccatgcaggggaactgtattttgtggattctgacccattgcaggatcacaatatgtataatgattcccaaggtggagatcttttccagttgttgatgccttgagttttgccaaccatggatggcaaatgtgatgtgctcccttccagctggtgagaggaggagttagagctggtcgttttgtgattacccataatattggaagcagcctgagggctagttaatccaaacatgcatcaacaatttggcctgagaatatgtaacagccaaaccttttcgtttagtctttattaaaatttataattggtaattggaccagttttttttttaatttccctctttttaaaacagttacggcttatttactgaataaatacaaagcaaacaaactcaagttatgtcatacctttggatacgaagaccatacataataaccaaacataacattatacacaaagaatactttcattatttgtggaatttagtgcatttcaaaaagtaatcatatatcaaactaggcaccacactaagttcctgattattttgtttataatttaataatatatcttatgagccctatatattcaaaatattatgttaacatgtaatccatgtttctttttcaaatctaaagttaaaaaaaaatagcagaagccagtgtcttaaagtctatcttttgtttctaagaccatgggatttcataatctcaagataaaatatgtatgaagtaattaatgtagaatttttacaccaaataataaataatgcttaataaactagagatatgagatgtgtaggaaatttggttaaacttttttcagatactttctggcccaaataataatttgttagcaaataatatgacccttgaactcaatggccatctattaaaagactgttgttcacactggaaaacatttaaagatgtgactatatccatgggtggattgaatcactcaaaatatattagtatccttctttagggatggttggttacagacatgtatttattcaggaggcagaaaatattccattttaattgcttattaaagaaaacattaaattctaaattattttgaggactgtgaagacttttcattagtgtaatattaggtcattgtcaatctcccagaatgtagttctatattctctaaatatgaaagtatccagaaaggccagtggtagtaaaaagcttagtgtatataatctcaaaagggatggaatatttacagctcatatttataacatgttgaatcttctcagttatcagtagtcatcagaagtgtcaatagctttctaaataaatattaaatatctactgtcctgtagtgaaggagtaatttttagtaattttctctttacaaagtctccagtgtttccaggtaaatatttgtgaaacaaaatacagcaaactacattgttacttcagtgtattgttgccaaaaatgacaagatattatattaaaatcagtaaattttagacagattttaaaaattaattagcctacaatagaggttatatggtaacacggtgatcttctaagcagttaagtgactgactgttctggcaacaacgacttctccgtgactgaagggccctgttcatttcctgatcctgaagctcgtctctcttttgagcctccgcttgctttggtcgatggtttccctcagctttttctttgctgttcttcatcctcgttgttgctgtcatcatgttcactgtggcttttacaatacagcctgtaaattccttatgacatagttcagtgcatttggctttatcgcctgctccacagttctttacctttacttggcttagagaaactgtatctttgttgcttcatataacctttccccaaccccactaagctggacataacttattagtggtcctcccgtcactttatttgtagaaatctctctttcacatgagcaggggttctttcatgtggtttagctgacagcagaactagtgattctagacattttgcatggccctcattcagtggctcacaaacatgagggagcatcagaactacttgaggggcttgttaaaacccagtgcgttagaagtcggatgcggtggctcacacctgtaatcccagcactttgggaggcccaggcaggcggatcacttgaggttaggagttcaagaccagcctggccaacatggtgaaaccccgtctctactaaaaatacaaaagttagccgggtgtggtggtgcatgcctgtaatcccagcttcttgggaggccaaggcacaagaatcgcttgaaccaggagacggaggtttcagtgaatgaagatcgtgccattgtattccagcctcggcaacacagcaggactgtgattttctttggagactcctagattttctgtggttttgaactgaatttgttggatgttggcaagtgcctcttatgagctgtttctttatcctgcatttgccccacaaagacttatctggaggtgagcaaagtatgtttggtagtgaggtcacaaaggcaatcagccccttcctccccactcccattgccatcttctcagtccttctccctttctttccaagtagtttacccacccctcctctttcctcccctgtccctaaaataatccacgtgtcttcctaaaatctctctttgatcctgtcctttgataacaccgtcagtgcctactactgggtctagacagacctctgttgagcagtcagagtcttccctgactccacaatgcccctttccttggctgaccagtatgactactggtccccacctttcccttgcctatccctacctccctcctactaggttgtcccatccctctcttcacccattcattcatgaccatttttcactaccaagctccccccctcccgaaggaggctgaggtttttgtgactctctagactctattgtgggatggaatgaacattgctaaagaatcttgtgttcgctttactttaaaaaggtatttttttcctaattataaaactgatgtgtcagttacggaaaaattagaaatgcagcacaaatacatgaatattttaccacgaaattgccatataatatcttgtcttttttgggggtgtgaattttttgcattgttctgatcatattctttatcatgtaatttatgttcttttttactaagtattatgtgtggttattatagattttcacaaagatatattgctggtaatatattttattgtgtagtcttataatttacttaaccttctttcaattgttagaaatttaggctatttccagattttcagtattgtaaataatgctgtgatgaccaattttgtgaataaaatgtttttatgtatttcagattattcccttaggatagtctctcagtgccaagttgtcaaaaacatctctattttgcttatcttcctgctctcttgctgccttagggggtagtaaactgaaacataaagtaaacatgcatacaaataaaaaacataaaacaaaaataagcaacctgatggtaataggtgaaagtggtaacctgttttaactttgaattcttgccgggcgcggtggctcacgcctgtaatcccagcactttgggaggctgaggcgggtggatcacgaggtcaggagttcaaaaccagcctggccaagatggtgaaatcccgtctctactaaaaatacaaaaattagccgggcgtggtggcgggcgcctgtaatcccagctacttgggaggctgaggcagagaattgcttgaacccaggaggcggaggttgcagtgagccaagatcgcgccactgcactccagcctgggtgacagagcgagactccgtctcaaataaaaaacaacaaaaaacaaaaaaaacttaaaattctttgcttgttagtgaccttgatcatggttctctttgtacgatagttgggcatctgtatttccacttgtgtgaatttgcctttaaattttggttatgggtttcaccttttaaaataatcaaacatatttatcttttcctgtgtgataggtttttttctgtatcttttcctgttaaacacacagacccctccccaatctggacattgaataaatattcattttcctttgca

SEQ ID NO: 374544 - DNA, 6042 bp, Homo sapiens
  misc_feature (248)..(248): n is a, c, g, or t
ttataaaaagaaggaagggcagggcttccaggtgaaaggcatagcacaagcaaaggcaaaaagacgggtaactgctagttgttaagggcagtggctgaatcgctatacccctagcagttctacacctaggggcctgcgggccgctgggtctgcgaagcttgcaaggcaactggcccgcccccgctctgcgcctgtctctcggccacgcctattgctgcaggatgacgcgcacctctagaacccgcccnggagggtgagtgggacgcagggaagagtcgcacggacgcactcgcgctgcggccagcgcccgggcctgcgggcccgggcggcggctgtgttgcgcagtcttcatgggttcccgacgaggaggtctctgtggctgcggcggcggctgctaactgcgccacctgctgcagcctgtccccgccgctctgaagcggccgcgtcgaagccgaaatgccgccaccccggaccggccgaggccttctctggctgggtctggttctgagctccgtctgcgtcgccctcggatccgaaacgcaggccaactcgaccacagatgctctgaacgttcttctcatcatcgtggatgacctgcgcccctccctgggctgttatggggataagctggtgaggtccccaaatattgaccaactggcatcccacagcctcctcttccagaatgcctttgcgcaggagacctgacaccacccgcctgtacgacttcaactcctactggagggtgcacgctggaaacttctccaccatcccccagtacttcaaggagaatggctatgtgaccatgtcggtgggaaaagtctttcaccctgggatatcttctaaccataccgatgattctccgtatagctggtcttttccaccttatcatccttcctctgagaagtatgaaaacactaagacatgtcgagggccagatggagaactccatgccaacctgctttgccctgtggatgtgctggatgttcccgagggcaccttgcctgacaaacagagcactgagcaagccatacagttgttggaaaagatgaaaacgtcagccagtcctttcttcctggccgttgggtatcataagccacacatccccttcagataccccaaggaatttcagaagttgtatcccttggagaacatcaccctggcccccgatcccgaggtccctgatggcctaccccctgtggcctacaacccctggatggacatcaggcaacgggaagacgtccaagccttaaacatcagtgtgccgtatggtccaattcctgtggactttcagcggaaaatccgccagagctactttgcctctgtgtcatatttggatacacaggtcggccgcctcttgagtgctttggacgatcttcagctggccaacagcaccatcattgcatttacctcggatcatgggtgggctctaggtgaacatggagaatgggccaaatacagcaattttgatgttgctacccatgttcccctgatattctatgttcctggaaggacggcttcacttccggaggcaggcgagaagcttttcccttacctcgacccttttgattccgcctcacagttgatggagccaggcaggcaatccatggaccttgtggaacttgtgtctctttttcccacgctggctggacttgcaggactgcaggttccacctcgctgccccgttccttcatttcacgttgagctgtgcagagaaggcaagaaccttctgaagcattttcgattccgtgacttggaagaggatccgtacctccctggtaatccccgtgaactgattgcctatagccagtatccccggccttcagacatccctcagtggaattctgacaagccgagtttaaaagatataaagatcatgggctattccatacgcaccatagactataggtatactgtgtgggttggcttcaatcctgatgaatttctagctaacttttctgacatccatgcaggggaactgtattttgtggattctgacccattgcaggatcacaatatgtataatgattcccaaggtggagatcttttccagttgttgatgccttgagttttgccaaccatggatggcaaatgtgatgtgctcccttccagctggtgagaggaggagttagagctggtcgttttgtgattacccataatattggaagcagcctgagggctagttaatccaaacatgcatcaacaatttggcctgagaatatgtaacagccaaaccttttcgtttagtctttattaaaatttataattggtaattggaccagttttttttttaatttccctctttttaaaacagttacggcttatttactgaataaatacaaagcaaacaaactcaagttatgtcatacctttggatacgaagaccatacataataaccaaacataacattatacacaaagaatactttcattatttgtggaatttagtgcatttcaaaaagtaatcatatatcaaactaggcaccacactaagttcctgattattttgtttataatttaataatatatcttatgagccctatatattcaaaatattatgttaacatgtaatccatgtttctttttcaaatctaaagttaaaaaaaaatagcagaagccagtgtcttaaagtctatcttttgtttctaagaccatgggatttcataatctcaagataaaatatgtatgaagtaattaatgtagaatttttacaccaaataataaataatgcttaataaactagagatatgagatgtgtaggaaatttggttaaacttttttcagatactttctggcccaaataataatttgttagcaaataatatgacccttgaactcaatggccatctattaaaagactgttgttcacactggaaaacatttaaagatgtgactatatccatgggtggattgaatcactcaaaatatattagtatccttctttagggatggttggttacagacatgtatttattcaggaggcagaaaatattccattttaattgcttattaaagaaaacattaaattctaaattattttgaggactgtgaagacttttcattagtgtaatattaggtcattgtcaatctcccagaatgtagttctatattctctaaatatgaaagtatccagaaaggccagtggtagtaaaaagcttagtgtatataatctcaaaagggatggaatatttacagctcatatttataacatgttgaatcttctcagttatcagtagtcatcagaagtgtcaatagctttctaaataaatattaaatatctactgtcctgtagtgaaggagtaatttttagtaattttctctttacaaagtctccagtgtttccaggtaaatatttgtgaaacaaaatacagcaaactacattgttacttcagtgtattgttgccaaaaatgacaagatattatattaaaatcagtaaattttagacagattttaaaaattaattagcctacaatagaggttatatggtaacacggtgatcttctaagcagttaagtgactgactgttctggcaacaacgacttctccgtgactgaagggccctgttcatttcctgatcctgaagctcgtctctcttttgagcctccgcttgctttggtcgatggtttccctcagctttttctttgctgttcttcatcctcgttgttgctgtcatcatgttcactgtggcttttacaatacagcctgtaaattccttatgacatagttcagtgcatttggctttatcgcctgctccacagttctttacctttacttggcttagagaaactgtatctttgttgcttcatataacctttccccaaccccactaagctggacataacttattagtggtcctcccgtcactttatttgtagaaatctctctttcacatgagcaggggttctttcatgtggtttagctgacagcagaactagtgattctagacattttgcatggccctcattcagtggctcacaaacatgagggagcatcagaactacttgaggggcttgttaaaacccagtgcgttagaagtcggatgcggtggctcacacctgtaatcccagcactttgggaggcccaggcaggcggatcacttgaggttaggagttcaagaccagcctggccaacatggtgaaaccccgtctctactaaaaatacaaaagttagccgggtgtggtggtgcatgcctgtaatcccagcttcttgggaggccaaggcacaagaatcgcttgaaccaggagacggaggtttcagtgaatgaagatcgtgccattgtattccagcctcggcaacacagcaggactgtgattttctttggagactcctagattttctgtggttttgaactgaatttgttggatgttggcaagtgcctcttatgagctgtttctttatcctgcatttgccccacaaagacttatctggaggtgagcaaagtatgtttggtagtgaggtcacaaaggcaatcagccccttcctccccactcccattgccatcttctcagtccttctccctttctttccaagtagtttacccacccctcctctttcctcccctgtccctaaaataatccacgtgtcttcctaaaatctctctttgatcctgtcctttgataacaccgtcagtgcctactactgggtctagacagacctctgttgagcagtcagagtcttccctgactccacaatgcccctttccttggctgaccagtatgactactggtccccacctttcccttgcctatccctacctccctcctactaggttgtcccatccctctcttcacccattcattcatgaccatttttcactaccaagctccccccctcccgaaggaggctgaggtttttgtgactctctagactctattgtgggatggaatgaacattgctaaagaatcttgtgttcgctttactttaaaaaggtatttttttcctaattataaaactgatgtgtcagttacggaaaaattagaaatgcagcacaaatacatgaatattttaccacgaaattgccatataatatcttgtcttttttgggggtgtgaattttttgcattgttctgatcatattctttatcatgtaatttatgttcttttttactaagtattatgtgtggttattatagattttcacaaagatatattgctggtaatatattttattgtgtagtcttataatttacttaaccttctttcaattgttagaaatttaggctatttccagattttcagtattgtaaataatgctgtgatgaccaattttgtgaataaaatgtttttatgtatttcagattattcccttaggatagtctctcagtgccaagttgtcaaaaacatctctattttgcttatcttcctgctctcttgctgccttagggggtagtaaactgaaacataaagtaaacatgcatacaaataaaaaacataaaacaaaaataagcaacctgatggtaataggtgaaagtggtaacctgttttaactttgaattcttgccgggcgcggtggctcacgcctgtaatcccagcactttgggaggctgaggcgggtggatcacgaggtcaggagttcaaaaccagcctggccaagatggtgaaatcccgtctctactaaaaatacaaaaattagccgggcgtggtggcgggcgcctgtaatcccagctacttgggaggctgaggcagagaattgcttgaacccaggaggcggaggttgcagtgagccaagatcgcgccactgcactccagcctgggtgacagagcgagactccgtctcaaataaaaaacaacaaaaaacaaaaaaaacttaaaattctttgcttgttagtgaccttgatcatggttctctttgtacgatagttgggcatctgtatttccacttgtgtgaatttgcctttaaattttggttatgggtttcaccttttaaaataatcaaacatatttatcttttcctgtgtgataggtttttttctgtatcttttcctgttaaacacacagacccctccccaatctggacattgaataaatattcattttcctttgca

SEQ ID NO: 374545 - DNA, 6788 bp, Homo sapiens
  misc_feature (988)..(988): n is a, c, g, or t
acttgccacaaggagacgctgttcagtttaccggatcctgtcccgcgccagccaaccaggacaaggccggggagctcgagacaggcagcctagaccaagaaccggaaggaggaaaaggaaccggagggaggaagaggaggggcgggacgagaccaccaggcaagagtccaaactttcccgcggcgacctaactgcacctccagtgtcttcccccagagggcacagaagcagcaagaagggcgggaacacttgactggggtccatgcagctctaggctgagtcttgcagggctgagccccccaggcctgctctcctgtgtcctggccgctccgtcagtgcctgccagtggggtccagagggaccgtttttttaacgcctcttttgcagtgagatgcgcctacttctccctggagaagcttgaggaagcagaaatgctggagatgagctgctcctcactctcactcctgggtgtgctgggcagtggggtgcaatgtgcacgtaggtgcacactctccctgggcggcagcgagcagcagaggtctgatctgtggtcggatgacgagaggaagtgcaagtaaagcagctgcagcgagacctcgtccgcacaggggcttgttcttctgtgtctttgcagggctgttttggactcagtattcacctaagcactccaaattacccagcacaccctgcctgcatggcgctgcgctgcaccttcactctggtcacgggtctggcagtcagctcaccaattcctcctgcttccctgggacttgccggcttttagcactgcaattcactcagcaaactgggactgttggtcaccctacctggcagccagtgataaggtgagggccactcctgggagggaggacacctgtggggaaaattcttgtgttatttatttctccttcgggatagggtgcctgcagcgcttcatgggagggggtgggctgatgctgcgggctcagaagtttcaagggcatctggngagaccagatattcagagaccttctagatgtgcctgttccatgtatcagggacgcaggttttcccaacagggctggtgtcattggcatgacagacctgccttggctgagcgttcacctgtctttggagttcagccaccttagcaagtcctgggtttgttcttcagactttgctgctcgcccattgcctggatcgggggctactttgtaaaccaccaggaagactccagtgtttctggttaatttttagatgtttgttaattgctcttggtctctcattaatcccctgtgggtcatccaggaaacatactcaccactgtctgttctctgagttttcatttccaggcatccgccctgcctggatctcctcacctgccaggaacttcctctccacaagccggccatcccagcaaaagttctaacaccaaaggtctggcaactagcctgccatcttgtgcctggagccgcctgcgtgccacctactcccgaagatgggaaccttgttgccagttgggcagatgcggggcaatcctgtaccaagaccccattttaccacctgctttctcagaccactctggaacccactgtctcagattgtgtcctccaggaagcagaccatgagagggagttggcagggccaaagatttactggggctaactaacactcaggaaagggataggaaggaaacagggctggagagcaggttgagcccgacctgacagtctcgagcagcccaacagggaggtgtggagcaagggttgcccactagaggggcctgcattgggtacgggtgatggggtccacatggtacctggcatatagcaggctgtgcaatccatattaactgactggataaattaatgcccagaaaaggtgccctggagaatgggtgtgtgctgaacacaatagggaagggcccagcatctgccttggcataggcagaactgtgctgtgccctgcaacaggccacctgagagctgctttgatcttgtgtgtacattagatgactgccaggggcatgaaggggatgtgcttccagggcatttgctggcagggcgtctcgtgatctcttggtattggtgtgagcacagcctggcaggagagggcagatctccatgcaaagtatgtcagaaagcagatggaagccaggccccctcctgaaagaggctccttgaagggtgggctctaggtgaacatggagaatgggccaaatacagcaattttgatgttgctacccatgttcccctgatattctatgttcctggaaggacggcttcacttccggaggcaggcgagaagcttttcccttacctcgacccttttgattccgcctcacagttgatggagccaggcaggcaatccatggaccttgtggaacttgtgtctctttttcccacgctggctggacttgcaggactgcaggttccacctcgctgccccgttccttcatttcacgttgagctgtgcagagaaggcaagaaccttctgaagcattttcgattccgtgacttggaagaggatccgtacctccctggtaatccccgtgaactgattgcctatagccagtatccccggccttcagacatccctcagtggaattctgacaagccgagtttaaaagatataaagatcatgggctattccatacgcaccatagactataggtatactgtgtgggttggcttcaatcctgatgaatttctagctaacttttctgacatccatgcaggggaactgtattttgtggattctgacccattgcaggatcacaatatgtataatgattcccaaggtggagatcttttccagttgttgatgccttgagttttgccaaccatggatggcaaatgtgatgtgctcccttccagctggtgagaggaggagttagagctggtcgttttgtgattacccataatattggaagcagcctgagggctagttaatccaaacatgcatcaacaatttggcctgagaatatgtaacagccaaaccttttcgtttagtctttattaaaatttataattggtaattggaccagttttttttttaatttccctctttttaaaacagttacggcttatttactgaataaatacaaagcaaacaaactcaagttatgtcatacctttggatacgaagaccatacataataaccaaacataacattatacacaaagaatactttcattatttgtggaatttagtgcatttcaaaaagtaatcatatatcaaactaggcaccacactaagttcctgattattttgtttataatttaataatatatcttatgagccctatatattcaaaatattatgttaacatgtaatccatgtttctttttcaaatctaaagttaaaaaaaaatagcagaagccagtgtcttaaagtctatcttttgtttctaagaccatgggatttcataatctcaagataaaatatgtatgaagtaattaatgtagaatttttacaccaaataataaataatgcttaataaactagagatatgagatgtgtaggaaatttggttaaacttttttcagatactttctggcccaaataataatttgttagcaaataatatgacccttgaactcaatggccatctattaaaagactgttgttcacactggaaaacatttaaagatgtgactatatccatgggtggattgaatcactcaaaatatattagtatccttctttagggatggttggttacagacatgtatttattcaggaggcagaaaatattccattttaattgcttattaaagaaaacattaaattctaaattattttgaggactgtgaagacttttcattagtgtaatattaggtcattgtcaatctcccagaatgtagttctatattctctaaatatgaaagtatccagaaaggccagtggtagtaaaaagcttagtgtatataatctcaaaagggatggaatatttacagctcatatttataacatgttgaatcttctcagttatcagtagtcatcagaagtgtcaatagctttctaaataaatattaaatatctactgtcctgtagtgaaggagtaatttttagtaattttctctttacaaagtctccagtgtttccaggtaaatatttgtgaaacaaaatacagcaaactacattgttacttcagtgtattgttgccaaaaatgacaagatattatattaaaatcagtaaattttagacagattttaaaaattaattagcctacaatagaggttatatggtaacacggtgatcttctaagcagttaagtgactgactgttctggcaacaacgacttctccgtgactgaagggccctgttcatttcctgatcctgaagctcgtctctcttttgagcctccgcttgctttggtcgatggtttccctcagctttttctttgctgttcttcatcctcgttgttgctgtcatcatgttcactgtggcttttacaatacagcctgtaaattccttatgacatagttcagtgcatttggctttatcgcctgctccacagttctttacctttacttggcttagagaaactgtatctttgttgcttcatataacctttccccaaccccactaagctggacataacttattagtggtcctcccgtcactttatttgtagaaatctctctttcacatgagcaggggttctttcatgtggtttagctgacagcagaactagtgattctagacattttgcatggccctcattcagtggctcacaaacatgagggagcatcagaactacttgaggggcttgttaaaacccagtgcgttagaagtcggatgcggtggctcacacctgtaatcccagcactttgggaggcccaggcaggcggatcacttgaggttaggagttcaagaccagcctggccaacatggtgaaaccccgtctctactaaaaatacaaaagttagccgggtgtggtggtgcatgcctgtaatcccagcttcttgggaggccaaggcacaagaatcgcttgaaccaggagacggaggtttcagtgaatgaagatcgtgccattgtattccagcctcggcaacacagcaggactgtgattttctttggagactcctagattttctgtggttttgaactgaatttgttggatgttggcaagtgcctcttatgagctgtttctttatcctgcatttgccccacaaagacttatctggaggtgagcaaagtatgtttggtagtgaggtcacaaaggcaatcagccccttcctccccactcccattgccatcttctcagtccttctccctttctttccaagtagtttacccacccctcctctttcctcccctgtccctaaaataatccacgtgtcttcctaaaatctctctttgatcctgtcctttgataacaccgtcagtgcctactactgggtctagacagacctctgttgagcagtcagagtcttccctgactccacaatgcccctttccttggctgaccagtatgactactggtccccacctttcccttgcctatccctacctccctcctactaggttgtcccatccctctcttcacccattcattcatgaccatttttcactaccaagctccccccctcccgaaggaggctgaggtttttgtgactctctagactctattgtgggatggaatgaacattgctaaagaatcttgtgttcgctttactttaaaaaggtatttttttcctaattataaaactgatgtgtcagttacggaaaaattagaaatgcagcacaaatacatgaatattttaccacgaaattgccatataatatcttgtcttttttgggggtgtgaattttttgcattgttctgatcatattctttatcatgtaatttatgttcttttttactaagtattatgtgtggttattatagattttcacaaagatatattgctggtaatatattttattgtgtagtcttataatttacttaaccttctttcaattgttagaaatttaggctatttccagattttcagtattgtaaataatgctgtgatgaccaattttgtgaataaaatgtttttatgtatttcagattattcccttaggatagtctctcagtgccaagttgtcaaaaacatctctattttgcttatcttcctgctctcttgctgccttagggggtagtaaactgaaacataaagtaaacatgcatacaaataaaaaacataaaacaaaaataagcaacctgatggtaataggtgaaagtggtaacctgttttaactttgaattcttgccgggcgcggtggctcacgcctgtaatcccagcactttgggaggctgaggcgggtggatcacgaggtcaggagttcaaaaccagcctggccaagatggtgaaatcccgtctctactaaaaatacaaaaattagccgggcgtggtggcgggcgcctgtaatcccagctacttgggaggctgaggcagagaattgcttgaacccaggaggcggaggttgcagtgagccaagatcgcgccactgcactccagcctgggtgacagagcgagactccgtctcaaataaaaaacaacaaaaaacaaaaaaaacttaaaattctttgcttgttagtgaccttgatcatggttctctttgtacgatagttgggcatctgtatttccacttgtgtgaatttgcctttaaattttggttatgggtttcaccttttaaaataatcaaacatatttatcttttcctgtgtgataggtttttttctgtatcttttcctgttaaacacacagacccctccccaatctggacattgaataaatattcattttcctttgca

SEQ ID NO: 374546 - DNA, 3855 bp, Homo sapiens
  misc_feature (138)..(138): n is a, c, g, or t
gcgatctagacctagttagccaagtctctaacgtgacatagggaaagcttgcaaggcaactggcccgcccccgctctgcgcctgtctctcggccacgcctattgctgcaggatgacgcgcacctctagaacccgcccnggagggtgagtgggacgcagggaagagtcgcacggacgcactcgcgctgcggccagcgcccgggcctgcgggcccgggcggcggctgtgttgcgcagtcttcatgggttcccgacgaggaggtctctgtggctgcggcggcggctgctaactgcgccacctgctgcagcctgtccccgccgctctgaagcggccgcgtcgaagccgaaatgccgccaccccggaccggccgaggccttctctggctgggtctggttctgagctccgtctgcgtcgccctcggatccgaaacgcaggccaactcgaccacagatgctctgaacgttcttctcatcatcgtggatgacctgcgcccctccctgggctgttatggggataagctggtgaggtccccaaatattgaccaactggcatcccacagcctcctcttccagaatgcctttgcgcagcaagcagtgtgcgccccgagccgcgtttctttcctcactggcaggagacctgacaccacccgcctgtacgacttcaactcctactggagggtgcacgctggaaacttctccaccatcccccagtacttcaaggagaatggctatgtgaccatgtcggtgggaaaagtctttcaccctgggatatcttctaaccataccgatgattctccgtatagctggtcttttccaccttatcatccttcctctgagaagtatgaaaacactaagacatgtcgagggccagatggagaactccatgccaacctgctttgccctgtggatgtgctggatgttcccgagggcaccttgcctgacaaacagagcactgagcaagccatacagttgttggaaaagatgaaaacgtcagccagtcctttcttcctggccgttgggtatcataagccacacatccccttcagataccccaaggaatttcagaagttgtatcccttggagaacatcaccctggcccccgatcccgaggtccctgatggcctaccccctgtggcctacaacccctggatggacatcaggcaacgggaagacgtccaagccttaaacatcagtgtgccgtatggtccaattcctgtggactttcagcggaaaatccgccagagctactttgcctctgtgtcatatttggatacacaggtcggccgcctcttgagtgctttggacgatcttcagctggccaacagcaccatcattgcatttacctcggatcatgggtgggctctaggtgaacatggagaatgggccaaatacagcaattttgatgttgctacccatgttcccctgatattctatgttcctggaaggacggcttcacttccggaggcaggcgagaagcttttcccttacctcgacccttttgattccgcctcacagttgatggagccaggcaggcaatccatggaccttgtggaacttgtgtctctttttcccacgctggctggacttgcaggactgcaggttccacctcgctgccccgttccttcatttcacgttgagctgtgcagagaaggcaagaaccttctgaagcattttcgattccgtgacttggaagaggatccgtacctccctggtaatccccgtgaactgattgcctatagccagtatccccggccttcagacatccctcagtggaattctgacaagccgagtttaaaagatataaagatcatgggctattccatacgcaccatagactataggtatactgtgtgggttggcttcaatcctgatgaatttctagctaacttttctgacatccatgcaggggaactgtattttgtggattctgacccattgcaggatcacaatatgtataatgattcccaaggtggagatcttttccagttgttgatgccttgagttttgccaaccatggatggcaaatgtgatgtgctcccttccagctggtgagaggaggagttagagctggtcgttttgtgattacccataatattggaagcagcctgagggctagttaatccaaacatgcatcaacaatttggcctgagaatatgtaacagccaaaccttttcgtttagtctttattaaaatttataattggtaattggaccagttttttttttaatttccctctttttaaaacagttacggcttatttactgaataaatacaaagcaaacaaactcaagttatgtcatacctttggatacgaagaccatacataataaccaaacataacattatacacaaagaatactttcattatttgtggaatttagtgcatttcaaaaagtaatcatatatcaaactaggcaccacactaagttcctgattattttgtttataatttaataatatatcttatgagccctatatattcaaaatattatgttaacatgtaatccatgtttctttttcaaatctaaagttaaaaaaaaatagcagaagccagtgtcttaaagtctatcttttgtttctaagaccatgggatttcataatctcaagataaaatatgtatgaagtaattaatgtagaatttttacaccaaataataaataatgcttaataaactagagatatgagatgtgtaggaaatttggttaaacttttttcagatactttctggcccaaataataatttgttagcaaataatatgacccttgaactcaatggccatctattaaaagactgttgttcacactggaaaacatttaaagatgtgactatatccatgggtggattgaatcactcaaaatatattagtatccttctttagggatggttggttacagacatgtatttattcaggaggcagaaaatattccattttaattgcttattaaagaaaacattaaattctaaattattttgaggactgtgaagacttttcattagtgtaatattaggtcattgtcaatctcccagaatgtagttctatattctctaaatatgaaagtatccagaaaggccagtggtagtaaaaagcttagtgtatataatctcaaaagggatggaatatttacagctcatatttataacatgttgaatcttctcagttatcagtagtcatcagaagtgtcaatagctttctaaataaatattaaatatctactgtcctgtagtgaaggagtaatttttagtaattttctctttacaaagtctccagtgtttccaggtaaatatttgtgaaacaaaatacagcaaactacattgttacttcagtgtattgttgccaaaaatgacaagatattatattaaaatcagtaaattttagacagattttaaaaattaattagcctacaatagaggttatatggtaacacggtgatcttctaagcagttaagtgactgactgttctggcaacaacgacttctccgtgactgaagggccctgttcatttcctgatcctgaagctcgtctctcttttgagcctccgcttgctttggtcgatggtttccctcagctttttctttgctgttcttcatcctcgttgttgctgtcatcatgttcactgtggcttttacaatacagcctgtaaattccttatgacatagttcagtgcatttggctttatcgcctgctccacagttctttacctttacttggcttagagaaactgtatctttgttgcttcatataacctttccccaaccccactaagctggacataacttattagtggtcctcccgtcactttatttgtagaaatattttgttttgctaggagtggtgctcatgcctgtcatcccagca

SEQ ID NO: 374547 - DNA, 1651 bp, Homo sapiens
  misc_feature (248)..(248): n is a, c, g, or t
ttataaaaagaaggaagggcagggcttccaggtgaaaggcatagcacaagcaaaggcaaaaagacgggtaactgctagttgttaagggcagtggctgaatcgctatacccctagcagttctacacctaggggcctgcgggccgctgggtctgcgaagcttgcaaggcaactggcccgcccccgctctgcgcctgtctctcggccacgcctattgctgcaggatgacgcgcacctctagaacccgcccnggagggtgagtgggacgcagggaagagtcgcacggacgcactcgcgctgcggccagcgcccgggcctgcgggcccgggcggcggctgtgttgcgcagtcttcatgggttcccgacgaggaggtctctgtggctgcggcggcggctgctaactgcgccacctgctgcagcctgtccccgccgctctgaagcggccgcgtcgaagccgaaatgccgccaccccggaccggccgaggccttctctggctgggtctggttctgagctccgtctgcgtcgccctcggatccgaaacgcaggccaactcgaccacagatgctctgaacgttcttctcatcatcgtggatgacctgcgcccctccctgggctgttatggggataagctggtgaggtccccaaatattgaccaactggcatcccacagcctcctcttccagaatgcctttgcgcagcaagcagtgtgcgccccgagccgcgtttctttcctcactggcaggagacctgacaccacccgcctgtacgacttcaactcctactggagggtgcacgctggaaacttctccaccatcccccagtacttcaaggagaatggctatgtgaccatgtcggtgggaaaagtctttcaccctgggatatcttctaaccataccgatgattctccgtatagctggtcttttccaccttatcatccttcctctgagaagtatgaaaacactaagacatgtcgagggccagatggagaactccatgccaacctgctttgccctgtggatgtgctggatgttcccgagggcaccttgcctgacaaacagagcactgagcaagccatacagttgttggaaaagatgaaaacgtcagccagtcctttcttcctggccgttgggtatcataagccacacatccccttcagataccccaaggaatttcagaagttgtatcccttggagaacatcaccctggcccccgatcccgaggtccctgatggcctaccccctgtggcctacaacccctggatggacatcaggcaacgggaagacgtccaagccttaaacatcagtgtgccgtatggtccaattcctgtggactttcagcggaaaatccgccagagctactttgcctctgtgtcatatttggatacacaggtcggccgcctcttgagtgctttggacgatcttcagctggccaacagcaccatcattgcatttacctcggatcatggtttcctcatgaggacaaatacctgattttgaataaagcagcattcagttgaaataaccctttctgtggtaattccaagtgaatatttttcttctaggtgatgagtttctacttcctctggtttttacaacaggaaatgaaatggtatctaaaataaacaagctgtggtatgatgattattcaaaaaac

SEQ ID NO: 374548 - DNA, 1603 bp, Homo sapiens
  misc_feature (248)..(248): n is a, c, g, or t
ttataaaaagaaggaagggcagggcttccaggtgaaaggcatagcacaagcaaaggcaaaaagacgggtaactgctagttgttaagggcagtggctgaatcgctatacccctagcagttctacacctaggggcctgcgggccgctgggtctgcgaagcttgcaaggcaactggcccgcccccgctctgcgcctgtctctcggccacgcctattgctgcaggatgacgcgcacctctagaacccgcccnggagggtgagtgggacgcagggaagagtcgcacggacgcactcgcgctgcggccagcgcccgggcctgcgggcccgggcggcggctgtgttgcgcagtcttcatgggttcccgacgaggaggtctctgtggctgcggcggcggctgctaactgcgccacctgctgcagcctgtccccgccgctctgaagcggccgcgtcgaagccgaaatgccgccaccccggaccggccgaggccttctctggctgggtctggttctgagctccgtctgcgtcgccctcggatccgaaacgcaggccaactcgaccacagatgctctgaacgttcttctcatcatcgtggatgacctgcgcccctccctgggctgttatggggataagctggtgaggtccccaaatattgaccaactggcatcccacagcctcctcttccagaatgcctttgcgcagcaagcagtgtgcgccccgagccgcgtttctttcctcactggcaggagacctgacaccacccgcctgtacgacttcaactcctactggagggtgcacgctggaaacttctccaccatcccccagtacttcaaggagaatggctatgtgaccatgtcggtgggaaaagtctttcaccctgggatatcttctaaccataccgatgattctccgtatagctggtcttttccaccttatcatccttcctctgagaagtatgaaaacactaagacatgtcgagggccagatggagaactccatgccaacctgctttgccctgtggatgtgctggatgttcccgagggcaccttgcctgacaaacagagcactgagcaagccatacagttgttggaaaagatgaaaacgtcagccagtcctttcttcctggccgttgggtatcataagccacacatccccttcagataccccaaggaatttcagaagttgtatcccttggagaacatcaccctggcccccgatcccgaggtccctgatggcctaccccctgtggcctacaacccctggatggacatcaggcaacgggaagacgtccaagccttaaacatcagtgtgccgtatggtccaattcctgtggactttcagcggaaaatccgccagagctactttgcctctgtgtcatatttggatacacaggtcggccgcctcttgagtgctttggacgatcttcagctggccaacagcaccatcattgcatttacctcggatcatgggtgggctctaggtgaacatggagaatgggccaaatacagcaattttgatgttgctacccatgttcccctgatattctatgttcctggaaggacggcttcacttccggaggcagggactggtcgacgcggccgccatttag

SEQ ID NO: 374549 - DNA, 1570 bp, Homo sapiens
  misc_feature (248)..(248): n is a, c, g, or t
ttataaaaagaaggaagggcagggcttccaggtgaaaggcatagcacaagcaaaggcaaaaagacgggtaactgctagttgttaagggcagtggctgaatcgctatacccctagcagttctacacctaggggcctgcgggccgctgggtctgcgaagcttgcaaggcaactggcccgcccccgctctgcgcctgtctctcggccacgcctattgctgcaggatgacgcgcacctctagaacccgcccnggagggtgagtgggacgcagggaagagtcgcacggacgcactcgcgctgcggccagcgcccgggcctgcgggcccgggcggcggctgtgttgcgcagtcttcatgggttcccgacgaggaggtctctgtggctgcggcggcggctgctaactgcgccacctgctgcagcctgtccccgccgctctgaagcggccgcgtcgaagccgaaatgccgccaccccggaccggccgaggccttctctggctgggtctggttctgagctccgtctgcgtcgccctcggatccgaaacgcaggccaactcgaccacagatgctctgaacgttcttctcatcatcgtggatgacctgcgcccctccctgggctgttatggggataagctggtgaggtccccaaatattgaccaactggcatcccacagcctcctcttccagaatgcctttgcgcagcaagcagtgtgcgccccgagccgcgtttctttcctcactggcaggagacctgacaccacccgcctgtacgacttcaactcctactggagggtgcacgctggaaacttctccaccatcccccagtacttcaaggagaatggctatgtgaccatgtcggtgggaaaagtctttcaccctgggatatcttctaaccataccgatgattctccgtatagctggtcttttccaccttatcatccttcctctgagaagtatgaaaacactaagacatgtcgagggccagatggagaactccatgccaacctgctttgccctgtggatgtgctggatgttcccgagggcaccttgcctgacaaacagagcactgagcaagccatacagttgttggaaaagatgaaaacgtcagccagtcctttcttcctggccgttgggtatcataagccacacatccccttcagataccccaaggaatttcagaagttgtatcccttggagaacatcaccctggcccccgatcccgaggtccctgatggcctaccccctgtggcctacaacccctggatggacatcaggcaacgggaagacgtccaagccttaaacatcagtgtgccgtatggtccaattcctgtggactttcagcggaaaatccgccagagctactttgcctctgtgtcatatttggatacacaggtcggccgcctcttgagtgctttggacgatcttcagctggccaacagcaccatcattgcatttacctcggatcatgagaagctaagtggaagagtgtttcctcctctggccgtaaagcagctgtccccgccctactccggaccgccccaaagactccatgggatggacctgagtcagccgaatc

SEQ ID NO: 374550 - DNA, 5692 bp, Homo sapiens
  misc_feature (988)..(988): n is a, c, g, or t
acttgccacaaggagacgctgttcagtttaccggatcctgtcccgcgccagccaaccaggacaaggccggggagctcgagacaggcagcctagaccaagaaccggaaggaggaaaaggaaccggagggaggaagaggaggggcgggacgagaccaccaggcaagagtccaaactttcccgcggcgacctaactgcacctccagtgtcttcccccagagggcacagaagcagcaagaagggcgggaacacttgactggggtccatgcagctctaggctgagtcttgcagggctgagccccccaggcctgctctcctgtgtcctggccgctccgtcagtgcctgccagtggggtccagagggaccgtttttttaacgcctcttttgcagtgagatgcgcctacttctccctggagaagcttgaggaagcagaaatgctggagatgagctgctcctcactctcactcctgggtgtgctgggcagtggggtgcaatgtgcacgtaggtgcacactctccctgggcggcagcgagcagcagaggtctgatctgtggtcggatgacgagaggaagtgcaagtaaagcagctgcagcgagacctcgtccgcacaggggcttgttcttctgtgtctttgcagggctgttttggactcagtattcacctaagcactccaaattacccagcacaccctgcctgcatggcgctgcgctgcaccttcactctggtcacgggtctggcagtcagctcaccaattcctcctgcttccctgggacttgccggcttttagcactgcaattcactcagcaaactgggactgttggtcaccctacctggcagccagtgataaggtgagggccactcctgggagggaggacacctgtggggaaaattcttgtgttatttatttctccttcgggatagggtgcctgcagcgcttcatgggagggggtgggctgatgctgcgggctcagaagtttcaagggcatctggngagaccagatattcagagaccttctagatgtgcctgttccatgtatcagggacgcaggttttcccaacagggctggtgtcattggcatgacagacctgccttggctgagcgttcacctgtctttggagttcagccaccttagcaagtcctgggtttgttcttcagactttgctgctcgcccattgcctggatcgggggctactttgtaaaccaccaggaagactccagtgtttctggttaatttttagatgtttgttaattgctcttggtctctcattaatcccctgtgggtcatccaggaaacatactcaccactgtctgttctctgagttttcatttccaggcatccgccctgcctggatctcctcacctgccaggaacttcctctccacaagccggccatcccagcaaaagttctaacaccaaaggtctggcaactagcctgccatcttgtgcctggagccgcctgcgtgccacctactcccgaagatgggaaccttgttgccagttgggcagatgcggggcaatcctgtaccaagaccccattttaccacctgctttctcagaccactctggaacccactgtctcagattgtgtcctccaggaagcagaccatgagagggagttggcagggccaaagatttactggggctaactaacactcaggaaagggataggaaggaaacagggctggagagcaggttgagcccgacctgacagtctcgagcagcccaacagggaggtgtggagcaagggttgcccactagaggggcctgcattgggtacgggtgatggggtccacatggtacctggcatatagcaggctgtgcaatccatattaactgactggataaattaatgcccagaaaaggtgccctggagaatgggtgtgtgctgaacacaatagggaagggcccagcatctgccttggcataggcagaactgtgctgtgccctgcaacaggccacctgagagctgctttgatcttgtgtgtacattagatgactgccaggggcatgaaggggatgtgcttccagggcatttgctggcagggcgtctcgtgatctcttggtattggtgtgagcacagcctggcaggagagggcagatctccatgcaaagtatgtcagaaagcagatggaagccaggccccctcctgaaagaggctccttgaagagacagagaagagtccatgagaatcaacattttctgaggactccaactgtgtgccaagagagttcccctgctggtgcctcctctgtagtaaaggaaaggctcctgggaccacattatcattctcttcactcgagagatgaggacactgaaattcagagaggggaagtgatttgcctcagcttgtactaaagaaacatttcaacagagaacccagtggaaattatgacatgttatcttctcagagtcctgaactcccatccctacctcagaagagactcctctgttcacagaagctaaaggcagttccttcccaatggcaactatgtttggatgttggatctacactttctcaagcactgtgatcttcaaatgtaagtttagtaacataaatatctttttgcagcctgaaagaattttatgtctctgtgttatcaggtaatgtttcagtatctcatattttgctggtaacatttagaatgttaatctcataaggagattttagagttatagttaaatttctttatctgggttagatgggaatcctttattctggggaaagcaaagttctttctataagcctgggttctcataatatacagactgggaaacttgggaaagagtaggagcatcattagtttcattttataggtgggaataacaaagcatggagagacaaacatatttgccaaaatagttattctcaactccttgttttgggaattctagagtgtttcataggatttcaaagtacctcacaaaattgttctaaatttctcaaagccaaattcattttaattaactttaattttttttgaaaagttatagcattcttgggggtaggataggtacattttataaaaacaatacaaacaattgttttgcttagaaccagtgaaatgtcaaaactccaaaaatgtttgggaagcactggattagtcagtagcataacaagcaataaaacaacccaggtcaggtgcagagagatataaactcttgtctcatcctccatagatctgtattttcaaaggcagagtcttgtgtgactgcatgtctgaggatatgtctcttctggacagggtttttacagtacttgagaatgatcctaacaaccttttggggtgactcaatttttttcactgctagagaggtaaaacaaatattgatacagttgaacagtgagaaattgagtttggctggagcacaggcacataatggtagaattatgagcctgtgctaggctgtgtgggtttggccaaattgggtcaagtgaaaacagaaagatcagttagaaacttgcaatagtttcgataaaagatgttatggcggttgtccaactttattgtgaactctcttattgtactagtgtttaaaagcagataagctgttacctcttgaatcccacaggctgtctagttatactggtcaggatctcttccagctcaattttttaaaaaatcctttgccttgacttccaaaggcacctgttaagagtggacttctcaagctgtgtaaagtacttttggcataatcaagtctatgttgttccatgaagctctaagtccagagtaactgtctttagttgatcatattgaaagcaagaacatcatttcaaacaaaccaagtctgagatatttaacccacatgtgctttcagacctggtatgtatgagcttgagcaatgaagccttattccattttgatgttataaaaaatggagggatttccctgcagtcagtttcacagccactatttgacttatatttgaagggggaaagataagggctgtgttcttttgatctgaatttttctgttcttaaaagttttcttttctaagaacactagtcagtacctggagacactccgacatatttaaagaattaatttgctttattgaaaaaagttgtttctttaaacatttaaataattactttttcttcagtgacaaattagtttgctttaatgaaaaaaaaggtttttttcataactttcattacatgaacctttagcaaaggagatttctcccattatatacttcttatgatcaacaaattccatcatctccccactaagagaaagtactccaagatgatagaatgattttaaagttatgggactacaacagcagccacaggaaccttgagtaagtaccatgaaccctgaccctcagcgttaatttgtaagcctttggcagtgagatggaatgtcttccttcagtttgaaacaaaggaaacctattgcatcgcacgtaaatttgtatattgatgctatattgactttgtagctgccatgccttcatacagacacctcatccagcccccactgttccacttattgtgatggtttgtatatctttatttcaaagaagatctgtttgaaccgtgtttaatttcttctttgacctgctttcatcactgcccatgcctaccctggtggcattctcatccacgagactaccacatccatgccactaggtggcattctcatccatgagactactgcacccgtgcgcacgtcaagaagtagccaagccatgggctggattgtgcttttcctgagaggatgaaaggcttcatggatacatgctagtatccatgttcctctattctcaagtcaggcaccaagatgatgtttcatacctgcctgcctttcaaagtctcataaatgttcattgaatatccactctatgcaaggcactagggtagtcacagaggcaaggtttgagctaaactacaggccctgccctccaggagctcccggtctcatggcagggtgcagaagccagaatagagggccatggcatgggagagaactctgctgaccgggagctctgaagggttaggggtccatgagcctgatttatggggtcgttgccataggattaggggctccctggcatacagtgaatggagagactagcattgctgtgttatttcactgagagggcaccaatgttcagcctctgagaccaggggaggaaagcagtggccatgaatgttccctcccatcccggggactgactgggctcctcccacagtctcagacacagaggaagaagtgtactcacactgccccaacaccagtgagtggaaatatttataggtctctcatttggttttaatttttatttttttatttttcagaaattaaaaaaaaaatcacactcacaaaattaaccattacccacattcctaccaacaagaagtaaccattcttaaccttgtaatatgttggtttccagatttatgtttatgctttaaaaaattatgcagacaacatattagcacattgccccttttctcatttgttttaatccatgttcttcccatttatacaggagcaattcttgcattcagttatgggatactataaatgcctagtataatggcagcagagagaattactatggttgtataccttttctcgctccttgctcctcaaatgccttagagtttaaaatctattgtggaaagtttgtgaaatgcagaacggtgaaaataaacaaattaccagtggttctttggcttcggga

SEQ ID NO: 374551 - DNA, 1602 bp, Homo sapiens
tcgcgtgggtggctttcggttcgtttggcggcctccccttcggtgggcctattggtcttcgcttcgtctgctgtgtctgcggtctgctctcgctgttcgtgctctctcgtgcttctcctgcctcactgagtcctgcttcgtccgtagtagttgtgtcgctccttggtttgctttttccctcacgcctcgttttgctcttcgcgtgctggatcctcttgtttcaattgtcgtctccctaccttgaggtgtgtcctgcgtttaatttcgcctcgctgcgagttggaatgtctttgtgtttccctaccactcaattatgtttctttctactatcctcttccctcctcctttcttgttatacatagtttagttccttcctctctgtcctgttgctttctctcctcgttcgtggctcgttcttgttgttctcctcgcttgctgctggtgctcgttgtttgcttgtattgctctgcctcgctgtcggtgtggcgaggtctgttatgtgattacgctgctccgttttttgtgggcgcgccctcttgtttgtccttcagtatgctggcgggtgctggcgtctttcgtgtgttggctcccccccgggggttgttcttgtgcgggcggcgccccccttttttttttgttttttttgtttttttttttgtttttttttgttattatgtgtggttattatagattttcacaaagatatattgctggtaatatattttattgtgtagtcttataatttacttaaccttctttcaattgttagaaatttaggctatttccagattttcagtattgtaaataatgctgtgatgaccaattttgtgaataaaatgtttttatgtatttcagattattcccttaggatagtctctcagtgccaagttgtcaaaaacatctctattttgcttatcttcctgctctcttgctgccttagggggtagtaaactgaaacataaagtaaacatgcatacaaataaaaaacataaaacaaaaataagcaacctgatggtaataggtgaaagtggtaacctgttttaactttgaattcttgccgggcgcggtggctcacgcctgtaatcccagcactttgggaggctgaggcgggtggatcacgaggtcaggagttcaaaaccagcctggccaagatggtgaaatcccgtctctactaaaaatacaaaaattagccgggcgtggtggcgggcgcctgtaatcccagctacttgggaggctgaggcagagaattgcttgaacccaggaggcggaggttgcagtgagccaagatcgcgccactgcactccagcctgggtgacagagcgagactccgtctcaaataaaaaacaacaaaaaacaaaaaaaacttaaaattctttgcttgttagtgaccttgatcatggttctctttgtacgatagttgggcatctgtatttccacttgtgtgaatttgcctttaaattttggttatgggtttcaccttttaaaataatcaaacatatttatcttttcctgtgtgataggtttttttctgtatcttttcctgttaaacacacagacccctccccaatctggacattgaataaatattcattttcctttgca

SEQ ID NO: 374552 - DNA, 1623 bp, Homo sapiens
  misc_feature (248)..(248): n is a, c, g, or t
ttataaaaagaaggaagggcagggcttccaggtgaaaggcatagcacaagcaaaggcaaaaagacgggtaactgctagttgttaagggcagtggctgaatcgctatacccctagcagttctacacctaggggcctgcgggccgctgggtctgcgaagcttgcaaggcaactggcccgcccccgctctgcgcctgtctctcggccacgcctattgctgcaggatgacgcgcacctctagaacccgcccnggagggtgagtgggacgcagggaagagtcgcacggacgcactcgcgctgcggccagcgcccgggcctgcgggcccgggcggcggctgtgttgcgcagtcttcatgggttcccgacgaggaggtctctgtggctgcggcggcggctgctaactgcgccacctgctgcagcctgtccccgccgctctgaagcggccgcgtcgaagccgaaatgccgccaccccggaccggccgaggccttctctggctgggtctggttctgagctccgtctgcgtcgccctcggatccgaaacgcaggccaactcgaccacagatgctctgaacgttcttctcatcatcgtggatgacctgcgcccctccctgggctgttatggggataagctggtgaggtccccaaatattgaccaactggcatcccacagcctcctcttccagaatgcctttgcgcagcaagcagtgtgcgccccgagccgcgtttctttcctcactggcaggagacctgacaccacccgcctgtacgacttcaactcctactggagggtgcacgctggaaacttctccaccatcccccagtacttcaaggagaatggctatgtgaccatgtcggtgggaaaagtctttcaccctggtactgctccatgtccagagtctgggttctcttggtttgtggtgtctgaatccagcattcccatcctggggatggggctgtctttgcagagccctcttctggctgggcgagtccctcgctagtcagtgcttcctttctaaaaaactgacttgtcaacccagccacgttttcacccaaagtgaaaaagggtagaaagagctttgcttcctttcagaaaccactgagggtgtgctgttgggtctttcagctcctcgggtggtagggaggacacaggctggggaggtggcagtgttgggtggagtccagctcagggccccaccctctcccctgcagggtacctgtcagtaaacctaggggtggggtgaggacacctgagggcctcccgtgtggccagcattgctgttgctgacttattgcccaatgagggggctgtgcttaggtaggggctgctatccactctggaaattaagtcagaaagatgagtgtaatctggtacccaggatctatagggtcccagagacggacattccttacctcaaatgctgcctgataaactggctctctttaatgccaatatggggatagtgaaaagcaaacaaactttaaaactttttatttatagaagtaatgcatgagtatttgagaaaaaaaatggagaaaaaagtattggaagacaagagcaccatagggacaataatgcttatcatttgggaatgacgaatgttttcagtctctttccctttgctcag

SEQ ID NO: 374553 - DNA, 2589 bp, Homo sapiens
  misc_feature (988)..(988): n is a, c, g, or t
acttgccacaaggagacgctgttcagtttaccggatcctgtcccgcgccagccaaccaggacaaggccggggagctcgagacaggcagcctagaccaagaaccggaaggaggaaaaggaaccggagggaggaagaggaggggcgggacgagaccaccaggcaagagtccaaactttcccgcggcgacctaactgcacctccagtgtcttcccccagagggcacagaagcagcaagaagggcgggaacacttgactggggtccatgcagctctaggctgagtcttgcagggctgagccccccaggcctgctctcctgtgtcctggccgctccgtcagtgcctgccagtggggtccagagggaccgtttttttaacgcctcttttgcagtgagatgcgcctacttctccctggagaagcttgaggaagcagaaatgctggagatgagctgctcctcactctcactcctgggtgtgctgggcagtggggtgcaatgtgcacgtaggtgcacactctccctgggcggcagcgagcagcagaggtctgatctgtggtcggatgacgagaggaagtgcaagtaaagcagctgcagcgagacctcgtccgcacaggggcttgttcttctgtgtctttgcagggctgttttggactcagtattcacctaagcactccaaattacccagcacaccctgcctgcatggcgctgcgctgcaccttcactctggtcacgggtctggcagtcagctcaccaattcctcctgcttccctgggacttgccggcttttagcactgcaattcactcagcaaactgggactgttggtcaccctacctggcagccagtgataaggtgagggccactcctgggagggaggacacctgtggggaaaattcttgtgttatttatttctccttcgggatagggtgcctgcagcgcttcatgggagggggtgggctgatgctgcgggctcagaagtttcaagggcatctggngagaccagatattcagagaccttctagatgtgcctgttccatgtatcagggacgcaggttttcccaacagggctggtgtcattggcatgacagacctgccttggctgagcgttcacctgtctttggagttcagccaccttagcaagtcctgggtttgttcttcagactttgctgctcgcccattgcctggatcgggggctactttgtaaaccaccaggaagactccagtgtttctggttaatttttagatgtttgttaattgctcttggtctctcattaatcccctgtgggtcatccaggaaacatactcaccactgtctgttctctgagttttcatttccaggcatccgccctgcctggatctcctcacctgccaggaacttcctctccacaagccggccatcccagcaaaagttctaacaccaaaggtctggcaactagcctgccatcttgtgcctggagccgcctgcgtgccacctactcccgaagatgggaaccttgttgccagttgggcagatgcggggcaatcctgtaccaagaccccattttaccacctgctttctcagaccactctggaacccactgtctcagattgtgtcctccaggaagcagaccatgagagggagttggcagggccaaagatttactggggctaactaacactcaggaaagggataggaaggaaacagggctggagagcaggttgagcccgacctgacagtctcgagcagcccaacagggaggtgtggagcaagggttgcccactagaggggcctgcattgggtacgggtgatggggtccacatggtacctggcatatagcaggctgtgcaatccatattaactgactggataaattaatgcccagaaaaggtgccctggagaatgggtgtgtgctgaacacaatagggaagggcccagcatctgccttggcataggcagaactgtgctgtgccctgcaacaggccacctgagagctgctttgatcttgtgtgtacattagatgactgccaggggcatgaaggggatgtgcttccagggcatttgctggcagggcgtctcgtgatctcttggtattggtgtgagcacagcctggcaggagagggcagatctccatgcaaagtatgtcagaaagcagatggaagccaggccccctcctgaaagaggctccttgaagataattctaacatctttgtcatcagtgttgacatctcttgattgtatcctgtcattccatttgagatcttcctggttctggctggcatcctctgacatcactccagcagaagaaagggaaggaacacgctgcattactgcgtggtcacaaggtccccgtctgatctgccttcactccacctttcagagtcttatgtttgttttgtgtatattatcaaggggttttaggtcacttagtcggaagaatagggaaaagtatgtctactccagcttaatggaagtggaattctcctgagaacctttttttgatacaaaatatgtacttgtgcatattttgtatcaaaatatataatgtacatgtcccttttgtacatgtatataaattgtatataaatatttagggttataaaaataaccaaagacacc

SEQ ID NO: 374554 - DNA, 1401 bp, Homo sapiens
ctgatgcgcgccagccaaccaggccaaggccaggggacctcgagaccggcagcctcgacgaagaaccggaaggaggaaaaggaacgggagggaggaagatctcccgcattgacttcataaccaagttctgggtccctgcctctggagtgcctgatgagacaaaacggctcctcgtcctgcatccccgctgctacttccagaattcaggcctcgtggtctggagcctgcactgttccatgagcctcctgagcaacctggagtcctctgtctttcttccctcagtgagatgcgcctacttctccctggagaagctcgaggaagcaggaatgctggagatgagacccagcacaccctgcctgcatggcgctgcgctgcaccttcactctggtcacgggtctggcagtcggctcaccaattcgtcctgcttccctgggactcgccggcttttagcactgcaattcactcagcaaactgggactgttggtcaccctacctggcagccagtgataagggctggtgtcattggcatgacagacctgccttggctgagcgttcacccgtcttcggagttcagccaccttagcaagtcctgggtttgttcttcagattttgctgctcgcccattgcctggatcgggggctactttgtaaaccaccaggaagactccagtgtttctgcttaatttttagatgtttgttaattgctcttggcctctcattaatcccctgtgggtcatccaggaaatatactcaccactgtctgttctctgagttttcatttccaggcatccgccctgcctggatctcctcacctgccaggaacttcctctccacaagccggccatcccagcaaaagttctaacaccaaagatgactgccaggggcatgaaggggatgtgcttccagggcatttgctggcagggcgtctcgtgatctcttggtattggtgtgagcacagcctggcaggagagggcagatctccatgcaaagtatgtcagaaagcagatggaagccaggccccctcctgaaagaggctccttgaagataattctaacatctttgtcatcagtgttgacatctcttgattgtatcctgtcattccatttgagatcttcctggttctggctggcatcctctgacatcactccagcagaagaaagggaaggaacacgctgcattactgcgtgggttcgatatttttcagcactatccttaaccctgattaaaaacaacacaacccttcatgttgatttaaaacatcccttgcaaaagatggtttgaatattccaagttggaaatacccagtcttttaaagttacagcaccctttttgatacaaaaaatgtgcatgacagaaattgtacagtgagtagtgttataaaaataaccaaacacaccaaaag

SEQ ID NO: 374555 - DNA, 461 bp, Homo sapiens
gtctgttgcctaggtgacacccaaatcccagtgtctggtttgagctctgcatgactcagctaccaagctgtttgctaggagcctcgggaggcggttgcttggttacctaagagatggcagacatgttttgctgtggcgatgcttacctctgcttctgctccctaacagcaagcagtgtgcgccccgagccgcgtttctttcctcactggcaggagacctgacaccacccgcctgtacgacttcaactcctactggagggtgcacgctggaaacttctccaccatcccccagtacttcaaggagaatggctatgtgaccatgtcggtgggaaaagtctttcaccctggtactgctccatgtccagagtctgggttctcttggtttgtggtgtctgaatccagcattcccatcctggggatggggctgtctttgcagagccctcttctggctgggcgagtccc

SEQ ID NO: 374556 - DNA, 853 bp, Homo sapiens
cttcagaccatctggatgtatacgtgcaggtcacaggggatatgatagcttagcttgggctcagaggcctgacattattgttactgtttttatctgtaattttctttcttcttcctttatcctagcaatgattgagagaatctaagttgaaacagataattgagaaatatgcctaatgaaatggataaagtgatgttctctatttctctctggcctccagaaatgtgtcctgagaatggatcttgtgtacctgatggtccaggtcttttgcagtgtgtttgtgctgatggtttccatggatacaagtgtatgcgccaggtgaggaattaggccgtctaactagggatacaaggaatgcatagagcaagtcttctcagaaaggagagccacaagaccaggagctgatacaaatttcctataggtggaaaactatagaattgccctagacaaagtgataggtatattaggaaagaactaggtgttaggatgtggccctccgtgtaacgttgtatgggggtgttttttggtctgttgttcacagggctcgttctcactgcttatgttcttcgggattctgggagccaccactctatccgtctccattctgctttgggcgacccagcgccgaaaagccaagacttcatgaactacataggtcttaccattgacctaagatcaatctgaactatcttagcccagtcagggagctctgcttcctagaaaggcatctttcgccagtggattcgcctcaaggttgaggccgccattggaagatgaaaaattgcactcccttggtgtagacaaataccagttcccattggtgttgttgcctataataaacactttttctttt

SEQ ID NO: 374557 - DNA, 1236 bp, Homo sapiens
tggaggggcccgagtttctgcgaagccgcgacctcggcgtccggacgcggggaacaccgggctgagggagtctgcagtcggctccgggaagccgcgcggcgacgggggaggccttcactaaaggggaaaaggaagagggggtcggccagtatccccgaaagagggctagggcgcatgaagaccagcgcagagctccacgagcaggaaaagcccccaagcagccccagggcgactggaccgggccgcttaggccacgcccggggaagagggcctgacgcgctgcggggcggggccgcggggccgggtcgcgcgagcagcggagcaccaagggaacggaaaatggcgcctcacggcccgggtagtcttacgaccctggtgccctgggctgccgccctgctcctcgctctgggcgtggaaagggctctggcgctacccgagatatgcacccaatgtccagggagcgtgcaaaatttgtcaaaagtggccttttattgtaaaacgacacgagagctaatgctgcatgcccgttgctgcctgaatcagaagggcaccatcttggggctggatctccagaactgttctctggaggaccctggtccaaactttcatcaggcacataccactgtcatcatagacctgcaagcaaaccccctcaaaggtgacttggccaacaccttccgtggctttactcagctccagactctgatactgccacaacatgtcaactgtcctggaggaattaatgcctggaatactatcacctcttatatagacaaccaaatctgtcaagggcaaaagaacctttgcaataacactggggacccagaaatgtgtcctgagaatggatcttgtgtacctgatggtccaggtcttttgcagtgtgtttgtgctgatggtttccatggatacaagtgtatgcgccagggctcgttctcactgcttatgttcttcgggattctgggagccaccactctatccgtctccattctgctttgggcgacccagcgccgaaaagccaagacttcatgaactacataggtcttaccattgacctaagatcaatctgaactatcttagcccagtcagggagctctgcttcctagaaaggcatctttcgccagtggattcgcctcaaggttgaggccgccattggaagatgaaaaattgcactcccttggtgtagacaaataccagttcccattggtgttgttgcctataataaacactttttctttt

SEQ ID NO: 374558 - DNA, 787 bp, Homo sapiens
  misc_feature (73)..(73): n is a, c, g, or t
ccgtctaaaggctcccggatccccagttccggacgccaaagttcaaaggccgtgtaccgcccgagactaatcncatgcccgttctgcctgaatcagaaggcaccttctggggctggatctccagaactgttctctggaggaccctggtccaaactttcatcaggcacataccactgtcatcatagacctgcaagcaaaccccctcaaaggtgacttggccaacaccttccgtggctttactcagctccagactctgatactgccacaacatgtcaactgtcctggaggaattaatgcctggaatactatcacctcttatatagacaaccaaatctgtcaagggcaaaagaacctttgcaataacactggggacccagaaatgtgtcctgagaatggatcttgtgtacctgatggtccaggtcttttgcagtgtgtttgtgctgatggtttccatggatacaagtgtatgcgccagggctcgttctcactgcttatgttcttcgggattctgggagccaccactctatccgtctccattctgctttgggcgacccagcgccgaaaagccaagacttcatgaactacataggtcttaccattgacctaagatcaatctgaactatcttagcccagtcagggagctctgcttcctagaaaggcatctttcgccagtggattcgcctcaaggttgaggccgccattggaagatgaaaaattgcactcccttggtgtagacaaataccagttcccattggtgttgttgcctataataaacactttttctttt

SEQ ID NO: 374559 - DNA, 1273 bp, Homo sapiens
  misc_feature (1246)..(1246): n is a, c, g, or t
  misc_feature (1251)..(1251): n is a, c, g, or t
  misc_feature (1257)..(1257): n is a, c, g, or t
tggaggggcccgagtttctgcgaagccgcgacctcggcgtccggacgcggggaacaccgggctgagggagtctgcagtcggctccgggaagccgcgcggcgacgggggaggccttcactaaaggggaaaaggaagagggggtcggccagtatccccgaaagagggctagggcgcatgaagaccagcgcagagctccacgagcaggaaaagcccccaagcagccccagggcgactggaccgggccgcttaggccacgcccggggaagagggcctgacgcgctgcggggcggggccgcggggccgggtcgcgcgagcagcggagcaccaagggaacggaaaatggcgcctcacggcccgggtagtcttacgaccctggtgccctgggctgccgccctgctcctcgctctgggcgtggaaagggctctggcgctacccgagatatgcacccaatgtccagggagcgtgcaaaatttgtcaaaagtggccttttattgtaaaacgacacgagagctaatgctgcatgcccgttgctgcctgaatcagaagggcaccatcttggggctggatctccagaactgttctctggaggaccctggtccaaactttcatcaggcacataccactgtcatcatagacctgcaagcaaaccccctcaaaggtgacttggccaacaccttccgtggctttactcagctccagactctgatactgccacaacatgtcaactgtcctggaggaattaatgcctggaatactatcacctcttatatagacaaccaaatctgtcaagggcaaaagaacctttgcaataacactggggacccagaaatgtgtcctgagaatggatcttgtgtacctgatggtccaggtcttttgcagtgtgtttgtgctgatggtttccatggatacaagtgtatgcgccagggctcgttctcactgcttatgttcttcgggattctgggagccaccactctatccgtctccattctgctttgggcgacccagcgccgaaaagccaagacttcatgaactacataggtcttaccattgacctaagatcaatctgaactatcttagcccagtcagggagctctgcttcctagaaaggcatctttcgccagtggattcgcctcaaggttgaggccgccattggaagatgaaaaattgcactcccttggtgtagacaaataccagttcccattggtgttgttgcctataataaacactttttcttttaaaaaaacanaaaanaaaaancacaccggtcttgggg

SEQ ID NO: 374560 - DNA, 1356 bp, Homo sapiens
tggaggggcccgagtttctgcgaagccgcgacctcggcgtccggacgcggggaacaccgggctgagggagtctgcagtcggctccgggaagccgcgcggcgacgggggaggccttcactaaaggggaaaaggaagagggggtcggccagtatccccgaaagagggctagggcgcatgaagaccagcgcagagctccacgagcaggaaaagcccccaagcagccccagggcgactggaccgggccgcttaggccacgcccggggaagagggcctgacgcgctgcggggcggggccgcggggccgggtcgcgcgagcagcggagcaccaagggaacggaaaatggcgcctcacggcccgggtagtcttacgaccctggtgccctgggctgccgccctgctcctcgctctgggcgtggaaagggctctggcgctacccgagatatgcacccaatgtccagggagcgtgcaaaatttgtcaaaagtggccttttattgtaaaacgacacgagagctaatgctgcatgcccgttgctgcctgaatcagaagggcaccatcttggggctggatctccagaactgttctctggaggaccctggtccaaactttcatcaggcacataccactgtcatcatagacctgcaagcaaaccccctcaaaggtgacttggccaacaccttccgtggctttactcagctccagactctgatactgccacaacatgtcaactgtcctggaggaattaatgcctggaatactatcacctcttatatagacaaccaaatctgtcaagggcaaaagaacctttgcaataacactggggacccagaaatgtgtcctgagaatggatcttgtgtacctgatggtccaggtcttttgcagtgtgtttgtgctgatggtttccatggatacaagtgtatgcgccagggctcgttctcactgcttatgttcttcgggattctgggagccaccactctatccgtctccattctgctttgggcgacccagcgccgaaaagccaagacttcatgaactacataggtcttaccattgacctaagatcaatctgaactatcttagcccagtcagggagctctgcttcctagaaaggcatctttcgccagtggattcgcctcaaggttgaggccgccattggaagatgaaaaattgcactcccttggtgtagacaaataccagttcccattggtgttgttgcctataataaacactttttcttttaaaaaaaaaaaaaaaaactcgagggggggccccggtcccaatttgggcctatagagggctgtttttccattcatggccggtggtttacaacgctggaattggaataaccctgctgtccta

SEQ ID NO: 374561 - DNA, 1722 bp, Homo sapiens
tggaggggcccgagtttctgcgaagccgcgacctcggcgtccggacgcggggaacaccgggctgagggagtctgcagtcggctccgggaagccgcgcggcgacgggggaggccttcactaaaggggaaaaggaagagggggtcggccagtatccccgaaagagggctagggcgcatgaagaccagcgcagagctccacgagcaggaaaagcccccaagcagccccagggcgactggaccgggccgcttaggccacgcccggggaagagggcctgacgcgctgcggggcggggccgcggggccgggtcgcgcgagcagcggagcaccaagggaacggaaaatggcgcctcacggcccgggtagtcttacgaccctggtgccctgggctgccgccctgctcctcgctctgggcgtggaaagggctctggcgctacccgaggtacagaagcaagtttgaggtcgggctgaagcagggtcactggccagccgtgcgtcgcgctcgccagcggctcccccttctcctcggcgggcctgcggttctgatttcgtccctgacgcttcccgaccctgcccagccaggtcctgttcccaagtactcacgtcgtgcaggccttcggcgccccagtcctgccgactttcaaagacctgtgaaacttgatttcgccccttaattttagaataactttaagttctttctacagacgggtcctctgcctcttgtgtaatctctctacgcacgaacgccatatatcgtgcggtggtagggctgtacttttgtaatgcttgatgagttctttacgtacctgcggtcgttttacaccgcgccaaactagggctgtcagattgagaagtctctgcagaaagcataataaataagttcgaatagtgatcttcagagatgaggaccttccctgtgcgatatctgatatgcacccaatgtccagggagcgtgcaaaatttgtcaaaagtggccttttattgtaaaacgacacgagagctaatgctgcatgcccgttgctgcctgaatcagaagggcaccatcttggggctggatctccagaactgttctctggaggaccctggtccaaactttcatcaggcacataccactgtcatcatagacctgcaagcaaaccccctcaaaggtgacttggccaacaccttccgtggctttactcagctccagactctgatactgccacaacatgtcaactgtcctggaggaattaatgcctggaatactatcacctcttatatagacaaccaaatctgtcaagggcaaaagaacctttgcaataacactggggacccagaaatgtgtcctgagaatggatcttgtgtacctgatggtccaggtcttttgcagtgtgtttgtgctgatggtttccatggatacaagtgtatgcgccagggctcgttctcactgcttatgttcttcgggattctgggagccaccactctatccgtctccattctgctttgggcgacccagcgccgaaaagccaagacttcatgaactacataggtcttaccattgacctaagatcaatctgaactatcttagcccagtcagggagctctgcttcctagaaaggcatctttcgccagtggattcgcctcaaggttgaggccgccattggaagatgaaaaattgcactcccttggtgtagacaaataccagttcccattggtgttgttgcctataataaacactttttctttt

SEQ ID NO: 374562 - DNA, 1169 bp, Homo sapiens
tggaggggcccgagtttctgcgaagccgcgacctcggcgtccggacgcggggaacaccgggctgagggagtctgcagtcggctccgggaagccgcgcggcgacgggggaggccttcactaaaggggaaaaggaagagggggtcggccagtatccccgaaagagggctagggcgcatgaagaccagcgcagagctccacgagcaggaaaagcccccaagcagccccagggcgactggaccgggccgcttaggccacgcccggggaagagggcctgacgcgctgcggggcggggccgcggggccgggtcgcgcgagcagcggagcaccaagggaacggaaaatggcgcctcacggcccgggtagtcttacgaccctggtgccctgggctgccgccctgctcctcgctctgggcgtggaaagggctctggcgctacccgagatatgcacccaatgtccagggagcgtgcaaaatttgtcaaaagtggccttttattgctggatctccagaactgttctctggaggaccctggtccaaactttcatcaggcacataccactgtcatcatagacctgcaagcaaaccccctcaaaggtgacttggccaacaccttccgtggctttactcagctccagactctgatactgccacaacatgtcaactgtcctggaggaattaatgcctggaatactatcacctcttatatagacaaccaaatctgtcaagggcaaaagaacctttgcaataacactggggacccagaaatgtgtcctgagaatggatcttgtgtacctgatggtccaggtcttttgcagtgtgtttgtgctgatggtttccatggatacaagtgtatgcgccagggctcgttctcactgcttatgttcttcgggattctgggagccaccactctatccgtctccattctgctttgggcgacccagcgccgaaaagccaagacttcatgaactacataggtcttaccattgacctaagatcaatctgaactatcttagcccagtcagggagctctgcttcctagaaaggcatctttcgccagtggattcgcctcaaggttgaggccgccattggaagatgaaaaattgcactcccttggtgtagacaaataccagttcccattggtgttgttgcctataataaacactttttctttt

SEQ ID NO: 374563 - DNA, 1203 bp, Homo sapiens
tggaggggcccgagtttctgcgaagccgcgacctcggcgtccggacgcggggaacaccgggctgagggagtctgcagtcggctccgggaagccgcgcggcgacgggggaggccttcactaaaggggaaaaggaagagggggtcggccagtatccccgaaagagggctagggcgcatgaagaccagcgcagagctccacgagcaggaaaagcccccaagcagccccagggcgactggaccgggccgcttaggccacgcccggggaagagggcctgacgcgctgcggggcggggccgcggggccgggtcgcgcgagcagcggagcaccaagggaacggaaaatggcgcctcacggcccgggtagtcttacgaccctggtgccctgggctgccgccctgctcctcgctctgggcgtggaaagggctctggcgctacccgagatatgcacccaatgtccagggagcgtgcaaaatttgtcaaaagtggccttttattgtaaaacgacacgagagctaatgctgcatgcccgttgctgcctgaatcagaagggcaccatcttggggctggatctccagaactgttctctggaggaccctggtccaaactttcatcaggcacataccactgtcatcatagacctgcaagcaaaccccctcaaaggtgacttggccaacaccttccgtggctttactcagctccagactctgatactgccacaacatgtcaactgtcctggaggaattaatgcctggaatactatcacctcttatatagacaaccaaatctgtcaagggcaaaagaacctttgcaataacactggggacccagaaatgtgtcctgagaatggatcttgtgtacctgatggtccaggtcttttgcagtgtgtttgtgctgatggtttccatggatacaagtgtatgcgccagggctcgttctcactgcttatgttcttcgggattctgggagccaccactctatccgtctccattctgctttgggcgacccagcgccgaaaagccaagacttcatgaactacataggtcttaccattgacctaagatcaatctgaactatcttagcccagtcagggagctctgcttcctagaaaggcatctttcgccagtggattcgcctcaaggttgaggccgccattggaagatgaaaaattgcactccctctccctaagaccctaggaatcctctaga

SEQ ID NO: 374564 - DNA, 1164 bp, Homo sapiens
tggaggggcccgagtttctgcgaagccgcgacctcggcgtccggacgcggggaacaccgggctgagggagtctgcagtcggctccgggaagccgcgcggcgacgggggaggccttcactaaaggggaaaaggaagagggggtcggccagtatccccgaaagagggctagggcgcatgaagaccagcgcagagctccacgagcaggaaaagcccccaagcagccccagggcgactggaccgggccgcttaggccacgcccggggaagagggcctgacgcgctgcggggcggggccgcggggccgggtcgcgcgagcagcggagcaccaagggaacggaaaatggcgcctcacggcccgggtagtcttacgaccctggtgccctgggctgccgccctgctcctcgctctgggcgtggaaagggctctggcgctacccgagatatgcacccaatgtccagggagcgtgcaaaatttgtcaaaagtggccttttattgtaaaacgacacgagagctaatgctgcatgcccgttgctgcctgaatcagaagggcaccatcttggggctggatctccagaactgttctctggaggaccctggtccaaactttcatcaggcacataccactgtcatcatagacctgcaagcaaaccccctcaaaggtgacttggccaacaccttccgtggctttactcagctccagactctgatactgccacaacatgtcaactgtcctggaggaattaatgcctggaatactatcacctcttatatagacaaccaaatctgtcaagggcaaaagaacctttgcaataacactggggacccagaaatgtgtcctgagaatggatcttgtgtacctgatggtccaggtcttttcttcgggattctgggagccaccactctatccgtctccattctgctttgggcgacccagcgccgaaaagccaagacttcatgaactacataggtcttaccattgacctaagatcaatctgaactatcttagcccagtcagggagctctgcttcctagaaaggcatctttcgccagtggattcgcctcaaggttgaggccgccattggaagatgaaaaattgcactcccttggtgtagacaaataccagttcccattggtgttgttgcctataataaacactttttctttt

SEQ ID NO: 374565 - DNA, 630 bp, Homo sapiens
cttcagaccatctggatgtatacgtgcaggtcacaggggatatgatagcttagcttgggctcagaggcctgacattattgttactgtttttatctgtaattttctttcttcttcctttatcctagcaatgattgagagaatctaagttgaaacagataattgagaaatatgcctaatgaaatggataaagtgatgttctctatttctctctggcctccagaaatgtgtcctgagaatggatcttgtgtacctgatggtccaggtcttttgcagtgtgtttgtgctgatggtttccatggatacaagtgtatgcgccagggctcgttctcactgcttatgttcttcgggattctgggagccaccactctatccgtctccattctgctttgggcgacccagcgccgaaaagccaagacttcatgaactacataggtcttaccattgacctaagatcaatctgaactatcttagcccagtcagggagctctgcttcctagaaaggcatctttcgccagtggattcgcctcaaggttgaggccgccattggaagatgaaaaattgcactcccttggtgtagacaaataccagttcccattggtgttgttgcctataataaacactttttctttt

SEQ ID NO: 374566 - DNA, 1376 bp, Homo sapiens
tggaggggcccgagtttctgcgaagccgcgacctcggcgtccggacgcggggaacaccgggctgagggagtctgcagtcggctccgggaagccgcgcggcgacgggggaggccttcactaaaggggaaaaggaagagggggtcggccagtatccccgaaagagggctagggcgcatgaagaccagcgcagagctccacgagcaggaaaagcccccaagcagccccagggcgactggaccgggccgcttaggccacgcccggggaagagggcctgacgcgctgcggggcggggccgcggggccgggtcgcgcgagcagcggagcaccaagggaacggaaaatggcgcctcacggcccgggtagtcttacgaccctggtgccctgggctgccgccctgctcctcgctctgggcgtggaaagggctctggcgctacccgaggtacagaagcaagtttgaggtcgggctgaagcagggtcactggccagccgtgcgtcgcgctcgccagcggctcccccttctcctcggcgggcctgcggttctgatttcgtccctgacgcttcccgaccctgcccagccagatatgcacccaatgtccagggagcgtgcaaaatttgtcaaaagtggccttttattgtaaaacgacacgagagctaatgctgcatgcccgttgctgcctgaatcagaagggcaccatcttggggctggatctccagaactgttctctggaggaccctggtccaaactttcatcaggcacataccactgtcatcatagacctgcaagcaaaccccctcaaaggtgacttggccaacaccttccgtggctttactcagctccagactctgatactgccacaacatgtcaactgtcctggaggaattaatgcctggaatactatcacctcttatatagacaaccaaatctgtcaagggcaaaagaacctttgcaataacactggggacccagaaatgtgtcctgagaatggatcttgtgtacctgatggtccaggtcttttgcagtgtgtttgtgctgatggtttccatggatacaagtgtatgcgccagggctcgttctcactgcttatgttcttcgggattctgggagccaccactctatccgtctccattctgctttgggcgacccagcgccgaaaagccaagacttcatgaactacataggtcttaccattgacctaagatcaatctgaactatcttagcccagtcagggagctctgcttcctagaaaggcatctttcgccagtggattcgcctcaaggttgaggccgccattggaagatgaaaaattgcactcccttggtgtagacaaataccagttcccattggtgttgttgcctataataaacactttttctttt

SEQ ID NO: 374567 - DNA, 2001 bp, Homo sapiens
  misc_feature (1295)..(1296): n is a, c, g, or t
tggaggggcccgagtttctgcgaagccgcgacctcggcgtccggacgcggggaacaccgggctgagggagtctgcagtcggctccgggaagccgcgcggcgacgggggaggccttcactaaaggggaaaaggaagagggggtcggccagtatccccgaaagagggctagggcgcatgaagaccagcgcagagctccacgagcaggaaaagcccccaagcagccccagggcgactggaccgggccgcttaggccacgcccggggaagagggcctgacgcgctgcggggcggggccgcggggccgggtcgcgcgagcagcggagcaccaagggaacggaaaatggcgcctcacggcccgggtagtcttacgaccctggtgccctgggctgccgccctgctcctcgctctgggcgtggaaagggctctggcgctacccgagatatgcacccaatgtccagggagcgtgcaaaatttgtcaaaagtggccttttattgtaaaacgacacgagagctaatgctgcatgcccgttgctgcctgaatcagaagggcaccatcttggggctggatctccagaactgttctctggaggaccctggtccaaactttcatcaggcacataccactgtcatcatagacctgcaagcaaaccccctcaaaggtgacttggccaacaccttccgtggctttactcagctccagactctgatactgccacaacatgtcaactgtcctggaggaattaatgcctggaatactatcacctcttatatagacaaccaaatctgtcaagggcaaaagaacctttgcaataacactggggacccagaaatgtgtcctgagaatggatcttgtgtacctgatggtccaggtcttttgcagtgtgtttgtgctgatggtttccatggatacaagtgtatgcgccagggctcgttctcactgcttatgttcttcgggattctgggagccaccactctatccgtctccattctgctttgggcgacccagcgccgaaaagccaagacttcatgaactacataggtcttaccattgacctaagatcaatctgaactatcttagcccagtcagggagctctgcttcctagaaaggcatctttcgccagtggattcgcctcaaggttgaggccgccattggaagatgaaaaattgcactcccttggtgtagacaaataccagttcccattggtgttgttgcctataataaacactttttcttttaaaaaaaaaaaaaaaaaaaaaaaaaaaaaaaaaaaaaaaaaaaaaaaaaaaaaaaaaannaaaaaaaaaaaaaaaaaaaaaaaaagaagtgtgtgggcgcgcgccggcgccccccaccgcgaaagaagagtccatcaaaaaccacccgcggcggagggggcgccggcgcccccgccaaagcagacacaagcagaaacgcgggacgacaaaagggtggtccacatgaaaagaaacacgagcggcggaagaaagcaagagacggggggcgaatccaccacaccccaagagaaaaaagagcgaggcgcgccggcgaaacaacagcgcacgcggtcggtccagacacaaccacaaccaggaggagcgaggctcgcgcggcgcgaagtacctacagcgcggggctcctaccccacgcaagggagcgcccaccacgcagagacagaccacataacaaatgaaataagaacgcggcacgagacgaggggggggggggggggtggacaaccaccgaaacaaagagaagaaagagagccaaaggaagcagacaacgacgaacgtgagggcgggaaggagggggggcgaggagggagaagagcacgggggcagcaggagaagacacgggggagccgcagggagcagcgacgagccgagaggcaagtaagaaagaggggggaggaaagcgagaacgcgggggcgggaggcggagagggagaagggccgagaacgcagacacagagaaggaagacggaagcgaaagaaggggaacag

SEQ ID NO: 374568 - DNA, 1984 bp, Homo sapiens
  misc_feature (1278)..(1279): n is a, c, g, or t
tggaggggcccgagtttctgcgaagccgcgacctcggcgtccggacgcggggaacaccgggctgagggagtctgcagtcggctccgggaagccgcgcggcgacgggggaggccttcactaaaggggaaaaggaagagggggtcggccagtatccccgaaagagggctagggcgcatgaagaccagcgcagagctccacgagcaggaaaagcccccaagcagccccagggcgactggaccgggccgcttaggccacgcccggggaagagggcctgacgcgctgcggggcggggccgcggggccgggtcgcgcgagcagcggagcaccaagggaacggaaaatggcgcctcacggcccgggtagtcttacgaccctggtgccctgggctgccgccctgctcctcgctctgggcgtggaaagggctctggcgctacccgagatatgcacccaatgtccagggagcgtgcaaaatttgtcaaaagtggccttttattgtaaaacgacacgagagctaatgctgcatgcccgttgctgcctgaatcagaagggcaccatcttggggctggatctccagaactgttctctggaggaccctggtccaaactttcatcaggcacataccactgtcatcatagacctgcaagcaaaccccctcaaaggtgacttggccaacaccttccgtggctttactcagctccagactctgatactgccacaacatgtcaactgtcctggaggaattaatgcctggaatactatcacctcttatatagacaaccaaatctgtcaagggcaaaagaacctttgcaataacactggggacccagaaatgtgtcctgagaatggatcttgtgtacctgatggtccaggtcttttgcagtgtgtttgtgctgatggtttccatggatacaagtgtatgcgccagggctcgttctcactgcttatgttcttcgggattctgggagccaccactctatccgtctccattctgctttgggcgacccagcgccgaaaagccaagacttcatgaactacataggtcttaccattgacctaagatcaatctgaactatcttagcccagtcagggagctctgcttcctagaaaggcatctttcgccagtggattcgcctcaaggttgaggccgccattggaagatgaaaaattgcactcccttggtgtagacaaataccagttcccattggtgttgttgcctataataaacactttttcttttaaaaaaaaaaaaaaaaaaaaaaaaaaaaaaaaaaaaaaaaannaaaaaaaaaaaaaaaaaaaaaaaaagaagtgtgtgggcgcgcgccggcgccccccaccgcgaaagaagagtccatcaaaaaccacccgcggcggagggggcgccggcgcccccgccaaagcagacacaagcagaaacgcgggacgacaaaagggtggtccacatgaaaagaaacacgagcggcggaagaaagcaagagacggggggcgaatccaccacaccccaagagaaaaaagagcgaggcgcgccggcgaaacaacagcgcacgcggtcggtccagacacaaccacaaccaggaggagcgaggctcgcgcggcgcgaagtacctacagcgcggggctcctaccccacgcaagggagcgcccaccacgcagagacagaccacataacaaatgaaataagaacgcggcacgagacgaggggggggggggggggtggacaaccaccgaaacaaagagaagaaagagagccaaaggaagcagacaacgacgaacgtgagggcgggaaggagggggggcgaggagggagaagagcacgggggcagcaggagaagacacgggggagccgcagggagcagcgacgagccgagaggcaagtaagaaagaggggggaggaaagcgagaacgcgggggcgggaggcggagagggagaagggccgagaacgcagacacagagaaggaagacggaagcgaaagaaggggaacag

SEQ ID NO: 374569 - DNA, 1945 bp, Homo sapiens
tggaggggcccgagtttctgcgaagccgcgacctcggcgtccggacgcggggaacaccgggctgagggagtctgcagtcggctccgggaagccgcgcggcgacgggggaggccttcactaaaggggaaaaggaagagggggtcggccagtatccccgaaagagggctagggcgcatgaagaccagcgcagagctccacgagcaggaaaagcccccaagcagccccagggcgactggaccgggccgcttaggccacgcccggggaagagggcctgacgcgctgcggggcggggccgcggggccgggtcgcgcgagcagcggagcaccaagggaacggaaaatggcgcctcacggcccgggtagtcttacgaccctggtgccctgggctgccgccctgctcctcgctctgggcgtggaaagggctctggcgctacccgaggtacagaagcaagtttgaggtcgggctgaagcagggtcactggccagccgtgcgtcgcgctcgccagcggctcccccttctcctcggcgggcctgcggttctgatttcgtccctgacgcttcccgaccctgcccagccaggtcctgttcccaagtactcacgtcgtgcaggccttcggcgccccagtcctgccgactttcaaagacctgtgaaacttgatttcgccccttaattttagaataactttaagttctttctacagacgggtcctctgcctcttgtgtaatctctctacgcacgaacgccatatatcgtgcggtggtagggctgtacttttgtaatgcttgatgagttctttacgtacctgcggtcgttttacaccgcgccaaactagggctgtcagattgagaagtctctgcagaaagcataataaataagttcgaatagtgatcttcagagatgaggaccttccctgtgcgatatctggtactgaaagtgtcgggagctgattcggcgcaggactctggaggaagagatggcatctcctagcctagcctgttacaagggtgggacacgagccgtttatccatttatcggccccgtgttagaggaattctggaaacgtgtactggcagttaattcttgatcgccgtttgttcttttcttggcttttctttctggagttctaatgtttctttctcttctgcagatatgcacccaatgtccagggagcgtgcaaaatttgtcaaaagtggccttttattgtaaaacgacacgagagctaatgctgcatgcccgttgctgcctgaatcagaagggcaccatcttggggctggatctccagaactgttctctggaggaccctggtccaaactttcatcaggcacataccactgtcatcatagacctgcaagcaaaccccctcaaaggtgacttggccaacaccttccgtggctttactcagctccagactctgatactgccacaacatgtcaactgtcctggaggaattaatgcctggaatactatcacctcttatatagacaaccaaatctgtcaagggcaaaagaacctttgcaataacactggggacccagaaatgtgtcctgagaatggatcttgtgtacctgatggtccaggtcttttgcagtgtgtttgtgctgatggtttccatggatacaagtgtatgcgccagggctcgttctcactgcttatgttcttcgggattctgggagccaccactctatccgtctccattctgctttgggcgacccagcgccgaaaagccaagacttcatgaactacataggtcttaccattgacctaagatcaatctgaactatcttagcccagtcagggagctctgcttcctagaaaggcatctttcgccagtggattcgcctcaaggttgaggccgccattggaagatgaaaaattgcactcccttggtgtagacaaataccagttcccattggtgttgttgcctataataaacactttttctttt

SEQ ID NO: 374570 - DNA, 1459 bp, Homo sapiens
tggaggggcccgagtttctgcgaagccgcgacctcggcgtccggacgcggggaacaccgggctgagggagtctgcagtcggctccgggaagccgcgcggcgacgggggaggccttcactaaaggggaaaaggaagagggggtcggccagtatccccgaaagagggctagggcgcatgaagaccagcgcagagctccacgagcaggaaaagcccccaagcagccccagggcgactggaccgggccgcttaggccacgcccggggaagagggcctgacgcgctgcggggcggggccgcggggccgggtcgcgcgagcagcggagcaccaagggaacggaaaatggcgcctcacggcccgggtagtcttacgaccctggtgccctgggctgccgccctgctcctcgctctgggcgtggaaagggctctggcgctacccgagatatgcacccaatgtccagggagcgtgcaaaatttgtcaaaagtggccttttattgtaaaacgacacgagagctaatgctgcatgcccgttgctgcctgaatcagaagggcaccatcttggggctggatctccagaactgttctctggaggaccctggtccaaactttcatcaggcacataccactgtcatcatagacctgcaagcaaaccccctcaaaggtgacttggccaacaccttccgtggctttactcagctccagactctgatactgccacaacatgtcaactgtcctggaggaattaatgcctggaatactatcacctcttatatagacaaccaaatctgtcaagggcaaaagaacctttgcaataacactggggacccagaaatgtgtcctgagaatggatcttgtgtacctgatggtccaggtcttttgcagtgtgtttgtgctgatggtttccatggatacaagtgtatgcgccaggtgaggaattaggccgtctaactagggatacaaggaatgcatagagcaagtcttctcagaaaggagagccacaagaccaggagctgatacaaatttcctataggtggaaaactatagaattgccctagacaaagtgataggtatattaggaaagaactaggtgttaggatgtggccctccgtgtaacgttgtatgggggtgttttttggtctgttgttcacagggctcgttctcactgcttatgttcttcgggattctgggagccaccactctatccgtctccattctgctttgggcgacccagcgccgaaaagccaagacttcatgaactacataggtcttaccattgacctaagatcaatctgaactatcttagcccagtcagggagctctgcttcctagaaaggcatctttcgccagtggattcgcctcaaggttgaggccgccattggaagatgaaaaattgcactcccttggtgtagacaaataccagttcccattggtgttgttgcctataataaacactttttctttt

SEQ ID NO: 374571 - DNA, 1182 bp, Homo sapiens
tggaggggcccgagtttctgcgaagccgcgacctcggcgtccggacgcggggaacaccgggctgagggagtctgcagtcggctccgggaagccgcgcggcgacgggggaggccttcactaaaggggaaaaggaagagggggtcggccagtatccccgaaagagggctagggcgcatgaagaccagcgcagagctccacgagcaggaaaagcccccaagcagccccagggcgactggaccgggccgcttaggccacgcccggggaagagggcctgacgcgctgcggggcggggccgcggggccgggtcgcgcgagcagcggagcaccaagggaacggaaaatggcgcctcacggcccgggtagtcttacgaccctggtgccctgggctgccgccctgctcctcgctctgggcgtggaaagggctctggcgctacccgagatatgcacccaatgtccagggagcgtgcaaaatttgtcaaaagtggccttttattgtaaaacgacacgagagctaatgctgcatgcccgttgctgcctgaatcagaagggcaccatcttggggctggatctccagaactgttctctggaggaccctggtccaaactttcatcaggcacataccactgtcatcatagacctgcaagcaaaccccctcaaaggtgacttggccaacaccttccgtggctttactcagctccagactctgatactgccacaacatgtcaactgtcctggaggaattaatgcctggaatactatcacctcttatatagacaaccaaatctgtcaagggccttgtgtacctgatggtccaggtcttttgcagtgtgtttgtgctgatggtttccatggatacaagtgtatgcgccagggctcgttctcactgcttatgttcttcgggattctgggagccaccactctatccgtctccattctgctttgggcgacccagcgccgaaaagccaagacttcatgaactacataggtcttaccattgacctaagatcaatctgaactatcttagcccagtcagggagctctgcttcctagaaaggcatctttcgccagtggattcgcctcaaggttgaggccgccattggaagatgaaaaattgcactcccttggtgtagacaaataccagttcccattggtgttgttgcctataataaacactttttctttt

SEQ ID NO: 374572 - DNA, 1080 bp, Homo sapiens
aaccctcttctgtattatttctaaagcttaatattatctttactgtttagaaactaatacaatctgtaagaccattaatatgataataatttgtcaaagagcatatatattcattatcatcacactattttttaaaatgttcaactgtatttcatttcagtgatgagtcctgtgagggattattatctttctgtatattcagttaagattttgtatctgatttaatccactgatttttgcaggctcaaaaaactcagaaaccaccgcagaaaccagcccctgcagttgtttctgtaactccagctgtcaaagatccattggttaagaaaccagaaactaaactgaaacaagagacaacttttctagcgtttaagagaacagaagtcaagacatccacagttatttcaggaaattcttctagtgccagcgtttcctcgtcagtaactagtggcttaactggatgggcagcttttgcagccaaaacttcctctgctggtccttcaacagcaaaattgagttcaacaacacaaaacaatactgggaaacctgctacttcgtcagctaaccagaaacctgtgggtttgactggtctggcaacatcatccaaaggtggaataggttccaaaataggttccaataacagcactacgcccactgtacctttaaaaccacctccacctctaaccttgggtaaaactggccttagtcgctcagttagttgtgacaatgtcagcaaagtaggtcttcctagtccaagtagtttagttccaggaagcagcagccaactaagtgggaatggaaatagtggaacatcaggacctagtggaagtactaccagcaaaactacttcagaatccagcagctctccctcagcatcccttaaaggcccaacttcacaagaatcacagctcaatgctatgaagcgattacagatggtcaagaagaaagctgcccaaaagaaactcaagaagtaatgtggccaagtaggtttttgtatcatattagcctaaagatgaaaggcttattattatgatataatctgtaatacactgtaatttaataaaagtcttcataatcaaa

SEQ ID NO: 374573 - DNA, 2138 bp, Homo sapiens
ccgcatcctcagccctgcagacccccgaagaaaagaccagttcttagggggtcgcggaggctgagaagccggcggcccgagcgccctctttacctggtcgcagaggcgcggccaggcagggagggtgcgtgagcgtgtcggcgacctgggccgcctgcgccttcccgcccagtccgagctggaattccaaggctgcctctgggagctgctgcccgcagaccactcgcctccacagacgccaggagaaaaacgacagccaccttatgtggaaaatactcgcgccggccgtcattcataatccggcggaccggaaaaagggaagtaacgtcacttcctactgtcgcactgccaaacgtttcccccgcccctactgtgggaacctttgttttcctgctttcggagccggccagtgcgggaaccgtttccgaagggaccaccgggaacagacggatcggcagggcggggcggaacggtgaggccatctactgaaacacagaagcaattttaaaagaaaatggaggaagtataactgatctttgcagaaagtggggaagtgagttgaccagagaaggatgagagaattgccaagttgtactgaacgccaagctgagaatggtgattctgaagatagaatgcgtttgcaatggctgctactgtgaacttggaacttgatcccatttttttgaaagcactaggtttcttgcattcaaagagtaaagattctgctgaaaagctaaaagcactgcttgatgaatctttggctcggggcattgattccagttaccgtccatctcaaaaggatgtggagccacccaaaatttcaagcacaaaaaacatttccattaagcaagagcccaaaatatcatccagtcttccttctggtaataataatggcaaggtcctcacaactgaaaaggtaaagaaggaagctgaaaagagacctgctgataaaatgaaatcagacatcactgaaggagttgatattccaaagaaacctagattggagaaaccagaaacacagtcatctcccattactgtccaaagtagcaaggatttacctatggctgacctttccagttttgaggagaccagtgctgatgattttgccatggagatgggattggcctgcgttgtttgtaggcaaatgatggtggcatctggcaatcaattagtagaatgtcaggagtgccataatctctaccaccgagattgtcataaaccccaggtgacagacaaggaagcgaatgaccctcgcctggtgtggtattgtgcccgatgtaccagacaaatgaaaagaatggctcaaaaaactcagaaaccaccgcagaaaccagcccctgcagttgtttctgtaactccagctgtcaaagatccattggttaagaaaccagaaactaaactgaaacaagagacaacttttctagcgtttaagagaacagaagtcaagacatccacagttatttcaggaaattcttctagtgccagcgtttcctcgtcagtaactagtggcttaactggatgggcagcttttgcagccaaaacttcctctgctggtccttcaacagcaaaattgagttcaacaacacaaaacaatactgggaaacctgctacttcgtcagctaaccagaaacctgtgggtttgactggtctggcaacatcatccaaaggtggaataggttccaaaataggttccaataacagcactacgcccactgtacctttaaaaccacctccacctctaaccttgggtaaaactggccttagtcgctcagttagttgtgacaatgtcagcaaagtaggtcttcctagtccaagtagtttagttccaggaagcagcagccaactaagtgggaatggaaatagtggaacatcaggacctagtggaagtactaccagcaaaactacttcagaatccagcagctctccctcagcatcccttaaaggcccaacttcacaagaatcacagctcaatgctatgaagcgattacagatggtcaagaagaaagctgcccaaaagaaactcaagaagtaatgtggccaagtaggtttttgtatcatattagcctaaagatgaaaggcttattattatgatataatctgtaatacactgtaatttaataaaagtcttcataatcaaa

SEQ ID NO: 374574 - DNA, 1341 bp, Homo sapiens
  misc_feature (1195)..(1195): n is a, c, g, or t
ccgcatcctcagccctgcagacccccgaagaaaagaccagttcttagggggtcgcggaggctgagaagccggcggcccgagcgccctctttacctggtcgcagaggcgcggccaggcagggagggtgcgtgagcgtgtcggcgacctgggccgcctgcgccttcccgcccagtccgagctggaattccaaggctgcctctgggagctgctgcccgcagaccactcgcctccacagacgccaggagaaaaacgacagccaccttatgtggaaaatactcgcgccggccgtcattcataatccggcggaccggaaaaagggaagtaacgtcacttcctactgtcgcactgccaaacgtttcccccgcccctactgtgggaacctttgttttcctgctttcggagccggccagtgcgggaaccgtttccgaagggaccaccgggaacagacggatcggcagggcggggcggaacggcgtttgcaatggctgctactgtgaacttggaacttgatcccatttttttgaaagcactaggtttcttgcattcaaagagtaaagattctgctgaaaagctaaaagcactgcttgatgaatctttggctcggggcattgattccagttaccgtccatctcaaaaggatgtggagccacccaaaatttcaagcacaaaaaacatttccattaagcaagagcccaaaatatcatccagtcttccttctggtaataataatggcaaggtcctcacaactgaaaaggtaaagaaggaagctgaaaagagacctgctgataaaatgaaatcagacatcactgaaggagttgatattccaaagaaacctagattggagaaaccagaaacacagtcatctcccattactgtccaaagtagcaaggatttacctatggctgacctttccagttttgaggagaccagtgctgatgattttgccatggagatgggattggcctgcgttgtttgtaggcaaatgatggtggcatctggcaatcaattagtagaatgtcaggagtgccataatctctaccaccgagattgtcataaaccccaggtgacagacaaggaagcgaatgaccctcgcctggtgtggtattgtgcccgatgtaccagacaaatgaaaagaatggtcaacaaactcagaaaaccacggagaaaccagccctgcagtggtctgtaactccgntgtgaagaatcctgggtgagaacggaataatggacagggagaattctaggttgagaaaaaagctgaaacacaggttgggaattctgggaggctccgaaataggtaggggaattggcaaattttggttcctttgtcaaaatggggtg

SEQ ID NO: 374575 - DNA, 1189 bp, Homo sapiens
ccgcatcctcagccctgcagacccccgaagaaaagaccagttcttagggggtcgcggaggctgagaagccggcggcccgagcgccctctttacctggtcgcagaggcgcggccaggcagggagggtgcgtgagcgtgtcggcgacctgggccgcctgcgccttcccgcccagtccgagctggaattccaaggctgcctctgggagctgctgcccgcagaccactcgcctccacagacgccaggagaaaaacgacagccaccttatgtggaaaatactcgcgccggccgtcattcataatccggcggaccggaaaaagggaagtaacgtcacttcctactgtcgcactgccaaacgtttcccccgcccctactgtgggaacctttgttttcctgctttcggagccggccagtgcgggaaccgtttccgaagggaccaccgggaacagacggatcggcagggcggggcggaacggtgagttatgctgagcgactctgctcctggcctcctggaggctcgagacccccgcgccaggagcgaggtgggagagtagctacgtggggtattagtttcctcgctcctcaaggggaatcataatttacgggcggttgcgtgccctagactgactgctctcccctttcagtgaggactgtgcttcctccgagggagttgcgggccgggacatgcggaccgagcatatttctaggtctagggacaagggacttggaatcctgcctcggactttgtcggagggttttagtgacttctctacgtagctccctcattgtctctcatcttttggctcccctgtcaaggaccatcccccattctaggacttcgatgtgtgatgctttgatcaaaggattgacattccttttctaagtgtttgctgtcagctttcagccacttgattggtttggaatcggagccttttctcctgcgattccaggtgtccctaaggtatcagtgttatccagaaccaagaactcagtggaggaatgaaaaaggcagcatctttaaaataatgtttattggaaggggttgcaagagcttgcgaagtcatgaagaacaaagttttttagagccattatgaaatggcaacgataatactgcactctatgtgaacagtttctgtttccttcatctggggcacgtgcatatgatcaactttggacttcttttgagattgcc

SEQ ID NO: 374576 - DNA, 1976 bp, Homo sapiens
ccgcatcctcagccctgcagacccccgaagaaaagaccagttcttagggggtcgcggaggctgagaagccggcggcccgagcgccctctttacctggtcgcagaggcgcggccaggcagggagggtgcgtgagcgtgtcggcgacctgggccgcctgcgccttcccgcccagtccgagctggaattccaaggctgcctctgggagctgctgcccgcagaccactcgcctccacagacgccaggagaaaaacgacagccaccttatgtggaaaatactcgcgccggccgtcattcataatccggcggaccggaaaaagggaagtaacgtcacttcctactgtcgcactgccaaacgtttcccccgcccctactgtgggaacctttgttttcctgctttcggagccggccagtgcgggaaccgtttccgaagggaccaccgggaacagacggatcggcagggcggggcggaacggcgtttgcaatggctgctactgtgaacttggaacttgatcccatttttttgaaagcactaggtttcttgcattcaaagagtaaagattctgctgaaaagctaaaagcactgcttgatgaatctttggctcggggcattgattccagttaccgtccatctcaaaaggatgtggagccacccaaaatttcaagcacaaaaaacatttccattaagcaagagcccaaaatatcatccagtcttccttctggtaataataatggcaaggtcctcacaactgaaaaggtaaagaaggaagctgaaaagagacctgctgataaaatgaaatcagacatcactgaaggagttgatattccaaagaaacctagattggagaaaccagaaacacagtcatctcccattactgtccaaagtagcaaggatttacctatggctgacctttccagttttgaggagaccagtgctgatgattttgccatggagatgggattggcctgcgttgtttgtaggcaaatgatggtggcatctggcaatcaattagtagaatgtcaggagtgccataatctctaccaccgagattgtcataaaccccaggtgacagacaaggaagcgaatgaccctcgcctggtgtggtattgtgcccgatgtaccagacaaatgaaaagaatggctcaaaaaactcagaaaccaccgcagaaaccagcccctgcagttgtttctgtaactccagctgtcaaagatccattggttaagaaaccagaaactaaactgaaacaagagacaacttttctagcgtttaagagaacagaagtcaagacatccacagttatttcaggaaattcttctagtgccagcgtttcctcgtcagtaactagtggcttaactggatgggcagcttttgcagccaaaacttcctctgctggtccttcaacagcaaaattgagttcaacaacacaaaacaatactgggaaacctgctacttcgtcagctaaccagaaacctgtgggtttgactggtctggcaacatcatccaaaggtggaataggttccaaaataggttccaataacagcactacgcccactgtacctttaaaaccacctccacctctaaccttgggtaaaactggccttagtcgctcagttagttgtgacaatgtcagcaaagtaggtcttcctagtccaagtagtttagttccaggaagcagcagccaactaagtgggaatggaaatagtggaacatcaggacctagtggaagtactaccagcaaaactacttcagaatccagcagctctccctcagcatcccttaaaggcccaacttcacaagaatcacagctcaatgctatgaagcgattacagatggtcaagaagaaagctgcccaaaagaaactcaagaagtaatgtggccaagtaggtttttgtatcatattagcctaaagatgaaaggcttattattatgatataatctgtaatacactgtaatttaataaaagtcttcataatcaaa

SEQ ID NO: 374577 - DNA, 2114 bp, Homo sapiens
ccgcatcctcagccctgcagacccccgaagaaaagaccagttcttagggggtcgcggaggctgagaagccggcggcccgagcgccctctttacctggtcgcagaggcgcggccaggcagggagggtgcgtgagcgtgtcggcgacctgggccgcctgcgccttcccgcccagtccgagctggaattccaaggctgcctctgggagctgctgcccgcagaccactcgcctccacagacgccaggagaaaaacgacagccaccttatgtggaaaatactcgcgccggccgtcattcataatccggcggaccggaaaaagggaagtaacgtcacttcctactgtcgcactgccaaacgtttcccccgcccctactgtgggaacctttgttttcctgctttcggagccggccagtgcgggaaccgtttccgaagggaccaccgggaacagacggatcggcagggcggggcggaacgatcaacacagttacaccaagttgctgacctctttatgactgctgtagaaagtaaacttctttcactatatggatatttgccggtaaggaaggaaaagtaacagagattagagaaggcaacagaaaagggggagtaaaggcgtttgcaatggctgctactgtgaacttggaacttgatcccatttttttgaaagcactaggtttcttgcattcaaagagtaaagattctgctgaaaagctaaaagcactgcttgatgaatctttggctcggggcattgattccagttaccgtccatctcaaaaggatgtggagccacccaaaatttcaagcacaaaaaacatttccattaagcaagagcccaaaatatcatccagtcttccttctggtaataataatggcaaggtcctcacaactgaaaaggtaaagaaggaagctgaaaagagacctgctgataaaatgaaatcagacatcactgaaggagttgatattccaaagaaacctagattggagaaaccagaaacacagtcatctcccattactgtccaaagtagcaaggatttacctatggctgacctttccagttttgaggagaccagtgctgatgattttgccatggagatgggattggcctgcgttgtttgtaggcaaatgatggtggcatctggcaatcaattagtagaatgtcaggagtgccataatctctaccaccgagattgtcataaaccccaggtgacagacaaggaagcgaatgaccctcgcctggtgtggtattgtgcccgatgtaccagacaaatgaaaagaatggctcaaaaaactcagaaaccaccgcagaaaccagcccctgcagttgtttctgtaactccagctgtcaaagatccattggttaagaaaccagaaactaaactgaaacaagagacaacttttctagcgtttaagagaacagaagtcaagacatccacagttatttcaggaaattcttctagtgccagcgtttcctcgtcagtaactagtggcttaactggatgggcagcttttgcagccaaaacttcctctgctggtccttcaacagcaaaattgagttcaacaacacaaaacaatactgggaaacctgctacttcgtcagctaaccagaaacctgtgggtttgactggtctggcaacatcatccaaaggtggaataggttccaaaataggttccaataacagcactacgcccactgtacctttaaaaccacctccacctctaaccttgggtaaaactggccttagtcgctcagttagttgtgacaatgtcagcaaagtaggtcttcctagtccaagtagtttagttccaggaagcagcagccaactaagtgggaatggaaatagtggaacatcaggacctagtggaagtactaccagcaaaactacttcagaatccagcagctctccctcagcatcccttaaaggcccaacttcacaagaatcacagctcaatgctatgaagcgattacagatggtcaagaagaaagctgcccaaaagaaactcaagaagtaatgtggccaagtaggtttttgtatcatattagcctaaagatgaaaggcttattattatgatataatctgtaatacactgtaatttaataaaagtcttcataatcaaa

SEQ ID NO: 374578 - DNA, 2276 bp, Homo sapiens
ccgcatcctcagccctgcagacccccgaagaaaagaccagttcttagggggtcgcggaggctgagaagccggcggcccgagcgccctctttacctggtcgcagaggcgcggccaggcagggagggtgcgtgagcgtgtcggcgacctgggccgcctgcgccttcccgcccagtccgagctggaattccaaggctgcctctgggagctgctgcccgcagaccactcgcctccacagacgccaggagaaaaacgacagccaccttatgtggaaaatactcgcgccggccgtcattcataatccggcggaccggaaaaagggaagtaacgtcacttcctactgtcgcactgccaaacgtttcccccgcccctactgtgggaacctttgttttcctgctttcggagccggccagtgcgggaaccgtttccgaagggaccaccgggaacagacggatcggcagggcggggcggaacggtgaggccatctactgaaacacagaagcaattttaaaagaaaatggaggaagtataactgatctttgcagaaagtggggaagtgagttgaccagagaaggatgagagaattgccaagttgtactgaacgccaagctgagaatggtgattctgaagatagaatatcaacacagttacaccaagttgctgacctctttatgactgctgtagaaagtaaacttctttcactatatggatatttgccggtaaggaaggaaaagtaacagagattagagaaggcaacagaaaagggggagtaaaggcgtttgcaatggctgctactgtgaacttggaacttgatcccatttttttgaaagcactaggtttcttgcattcaaagagtaaagattctgctgaaaagctaaaagcactgcttgatgaatctttggctcggggcattgattccagttaccgtccatctcaaaaggatgtggagccacccaaaatttcaagcacaaaaaacatttccattaagcaagagcccaaaatatcatccagtcttccttctggtaataataatggcaaggtcctcacaactgaaaaggtaaagaaggaagctgaaaagagacctgctgataaaatgaaatcagacatcactgaaggagttgatattccaaagaaacctagattggagaaaccagaaacacagtcatctcccattactgtccaaagtagcaaggatttacctatggctgacctttccagttttgaggagaccagtgctgatgattttgccatggagatgggattggcctgcgttgtttgtaggcaaatgatggtggcatctggcaatcaattagtagaatgtcaggagtgccataatctctaccaccgagattgtcataaaccccaggtgacagacaaggaagcgaatgaccctcgcctggtgtggtattgtgcccgatgtaccagacaaatgaaaagaatggctcaaaaaactcagaaaccaccgcagaaaccagcccctgcagttgtttctgtaactccagctgtcaaagatccattggttaagaaaccagaaactaaactgaaacaagagacaacttttctagcgtttaagagaacagaagtcaagacatccacagttatttcaggaaattcttctagtgccagcgtttcctcgtcagtaactagtggcttaactggatgggcagcttttgcagccaaaacttcctctgctggtccttcaacagcaaaattgagttcaacaacacaaaacaatactgggaaacctgctacttcgtcagctaaccagaaacctgtgggtttgactggtctggcaacatcatccaaaggtggaataggttccaaaataggttccaataacagcactacgcccactgtacctttaaaaccacctccacctctaaccttgggtaaaactggccttagtcgctcagttagttgtgacaatgtcagcaaagtaggtcttcctagtccaagtagtttagttccaggaagcagcagccaactaagtgggaatggaaatagtggaacatcaggacctagtggaagtactaccagcaaaactacttcagaatccagcagctctccctcagcatcccttaaaggcccaacttcacaagaatcacagctcaatgctatgaagcgattacagatggtcaagaagaaagctgcccaaaagaaactcaagaagtaatgtggccaagtaggtttttgtatcatattagcctaaagatgaaaggcttattattatgatataatctgtaatacactgtaatttaataaaagtcttcataatcaaa

SEQ ID NO: 374579 - DNA, 1922 bp, Homo sapiens
ccgcatcctcagccctgcagacccccgaagaaaagaccagttcttagggggtcgcggaggctgagaagccggcggcccgagcgccctctttacctggtcgcagaggcgcggccaggcagggagggtgcgtgagcgtgtcggcgacctgggccgcctgcgccttcccgcccagtccgagctggaattccaaggctgcctctgggagctgctgcccgcagaccactcgcctccacagacgccaggagaaaaacgacagccaccttatgtggaaaatactcgcgccggccgtcattcataatccggcggaccggaaaaagggaagtaacgtcacttcctactgtcgcactgccaaacgtttcccccgcccctactgtgggaacctttgttttcctgctttcggagccggccagtgcgggaaccgtttccgaagggaccaccgggaacagacggatcggcagggcggggcggaacggcgtttgcaatggctgctactgtgaacttggaacttgatcccatttttttgaaagcactaggtttcttgcattcaaagagtaaagattctgctgaaaagctaaaagcactgcttgatgaatctttggctcggggcattgattccagttaccgtccatctcaaaaggatgtggagccacccaaaatttcaagcacaaaaaacatttccattaagcaagagcccaaaatatcatccagtcttccttctggtaataataatggcaaggtcctcacaactgaaaaggtaaagaaggaagctgaaaagagacctgctgataaaaaaccagaaacacagtcatctcccattactgtccaaagtagcaaggatttacctatggctgacctttccagttttgaggagaccagtgctgatgattttgccatggagatgggattggcctgcgttgtttgtaggcaaatgatggtggcatctggcaatcaattagtagaatgtcaggagtgccataatctctaccaccgagattgtcataaaccccaggtgacagacaaggaagcgaatgaccctcgcctggtgtggtattgtgcccgatgtaccagacaaatgaaaagaatggctcaaaaaactcagaaaccaccgcagaaaccagcccctgcagttgtttctgtaactccagctgtcaaagatccattggttaagaaaccagaaactaaactgaaacaagagacaacttttctagcgtttaagagaacagaagtcaagacatccacagttatttcaggaaattcttctagtgccagcgtttcctcgtcagtaactagtggcttaactggatgggcagcttttgcagccaaaacttcctctgctggtccttcaacagcaaaattgagttcaacaacacaaaacaatactgggaaacctgctacttcgtcagctaaccagaaacctgtgggtttgactggtctggcaacatcatccaaaggtggaataggttccaaaataggttccaataacagcactacgcccactgtacctttaaaaccacctccacctctaaccttgggtaaaactggccttagtcgctcagttagttgtgacaatgtcagcaaagtaggtcttcctagtccaagtagtttagttccaggaagcagcagccaactaagtgggaatggaaatagtggaacatcaggacctagtggaagtactaccagcaaaactacttcagaatccagcagctctccctcagcatcccttaaaggcccaacttcacaagaatcacagctcaatgctatgaagcgattacagatggtcaagaagaaagctgcccaaaagaaactcaagaagtaatgtggccaagtaggtttttgtatcatattagcctaaagatgaaaggcttattattatgatataatctgtaatacactgtaatttaataaaagtcttcataatcaaa

SEQ ID NO: 374580 - DNA, 440 bp, Homo sapiens
gcgtttgcaatggctgctactgtgaacttggaacttgatcccatttttttgaaagcactaggtttcttgcattcaaagagtaaagattctgctgaaaagctaaaagcactgcttgatgaatctttggctcggggcattgattccagttaccgtccatctcaaaaggtacttgaatgaataaaaagcttggagagagttttgtaaggcctgtagtactacattgataacatatagaccatctcaaaacaatctctgccgaaataatctttccttgtagcatgaagaaattatattctttattttcttttttcccttcaagttttcagagaactgttacaccacatagaaaaatcagctgggggtgcaggatattctgttctactactttatgtgtatatgaattcactttgttacgacttactttaatctccgattctttg

SEQ ID NO: 374581 - DNA, 1221 bp, Homo sapiens
ccgcatcctcagccctgcagacccccgaagaaaagaccagttcttagggggtcgcggaggctgagaagccggcggcccgagcgccctctttacctggtcgcagaggcgcggccaggcagggagggtgcgtgagcgtgtcggcgacctgggccgcctgcgccttcccgcccagtccgagctggaattccaaggctgcctctgggagctgctgcccgcagaccactcgcctccacagacgccaggagaaaaacgacagccaccttatgtggaaaatactcgcgccggccgtcattcataatccggcggaccggaaaaagggaagtaacgtcacttcctactgtcgcactgccaaacgtttcccccgcccctactgtgggaacctttgttttcctgctttcggagccggccagtgcgggaaccgtttccgaagggaccaccgggaacagacggatcggcagggcggggcggaacggcgtttgcaatggctgctactgtgaacttggaacttgatcccatttttttgaaagcactaggtttcttgcattcaaagagtaaagattctgctgaaaagctaaaagcactgcttgatgaatctttggctcggggcattgattccagttaccgtccatctcaaaaggatgtggagccacccaaaatttcaagcacaaaaaacatttccattaagcaagagcccaaaatatcatccagtcttccttctggtaataataatggcaaggtcctcacaactgaaaaggtaaagaaggaagctgaaaagagacctgctgataaaatgaaatcagacatcactgaaggagttgatattccaaagaaacctagattggagaaaccagaaacacagtcatctcccattactgtccaaagtagcaaggatttacctatggctgacctttccagttttgaggagaccagtgctgatgattttgccatggagatgggattggcctgcgttgtttgtaggcaaatgatggtggcatctggcaatcaattagtagaatgtcaggagtgccataatctctaccaccgagattgtcataaaccccaggtgacagacaaggaagcgaatgacccttcaaaaaatcagaaaccaacggagaaaacaagccctgagttggttctggaacttccggtggtcaaggatcctggcttaaggaaccagaaataaattgaacacggaacaattttctagcggttagaagaccg

SEQ ID NO: 374582 - DNA, 2279 bp, Homo sapiens
ccgcatcctcagccctgcagacccccgaagaaaagaccagttcttagggggtcgcggaggctgagaagccggcggcccgagcgccctctttacctggtcgcagaggcgcggccaggcagggagggtgcgtgagcgtgtcggcgacctgggccgcctgcgccttcccgcccagtccgagctggaattccaaggctgcctctgggagctgctgcccgcagaccactcgcctccacagacgccaggagaaaaacgacagccaccttatgtggaaaatactcgcgccggccgtcattcataatccggcggaccggaaaaagggaagtaacgtcacttcctactgtcgcactgccaaacgtttcccccgcccctactgtgggaacctttgttttcctgctttcggagccggccagtgcgggaaccgtttccgaagggaccaccgggaacagacggatcggcagggcggggcggaacggcgtttgcaatggctgctactgtgaacttggaacttgatcccatttttttgaaagcactaggtttcttgcattcaaagagtaaagattctgctgaaaagctaaaagcactgcttgatgaatctttggctcggggcattgattccagttaccgtccatctcaaaaggatgtggagccacccaaaatttcaagcacaaaaaacatttccattaagcaagagcccaaaatatcatccagtcttccttctggtaataataatggcaaggtcctcacaactgaaaaggtaaagaaggaagctgaaaagagacctgctgataaaatgaaatcagacatcactgaaggagttgatattccaaagaaacctagattggagaaaccagaaacacagtcatctcccattactgtccaaagtagcaaggatttacctatggctgacctttccagttttgaggagaccagtgctgatgattttgccatggagatgggattggcctgcgttgtttgtaggcaaatgatggtggcatctggcaatcaattagtagaatgtcaggagtgccataatctctaccaccgagattgtcataaaccccaggtgacagacaaggaagcgaatgaccctcgcctggtgtggtattgtgcccgatgtaccagacaaatgaaaagaatggctcaaaaaactcagaaaccaccgcagaaaccagcccctgcagttgtttctgtaactccagctgtcaaagatccattggttaagaaaccagaaactaaactgaaacaagagacaacttttctagcgtttaagagaacagaagtcaagacatccacagttatttcaggaaattcttctagtgccagcgtttcctcgtcagtaactagtggcttaactggatgggcagcttttgcagccaaaacttcctctgctggtccttcaacagcaaaattgagttcaacaacacaaaacaatactgggaaacctgctacttcgtcagctaaccagaaacctgtgggtttgactggtctggcaacatcatccaaaggtggaataggttccaaaataggttccaataacagcactacgcccactgtacctttaaaaccacctccacctctaaccttgggtaaaactggccttagtcgctcagttagttgtgacaatgtcagcaaagtaggtcttcctagtccaagtagtttagttccaggaagcagcagccaactaagtgggaatggaaatagtggaacatcaggacctagtggaagtactaccagcaaaactacttcagaatccagcagctctccctcagcatcccttaaaggcccaacttcacaagaatcacagctcaatgctatgaagcgattacagatggtcaagaagaaagctgcccaaaagaaactcaagaagtaatgtggccaagtaggtttttgtatcatattagcctaaagatgaaaggcttattattatgatataatctgtaatacactgtaatttaataaaagtcttcataatcaaaaaaaaaaaaaaaaaaaaaaaaaaaaaaaaaggggggggggggaaaaaaatccccagggggcccccaagtagcgcgcgacacagctcttctgggacaaagggggcacataagggggcgcataataaaagaagagacggggcggagtaaacaggcggcagtgggaacagcggcagcggggaactgggaaagaaacactaccgggggggcatacgggacacacccacagagatataacgcgaggaacaacacttcagggtaaggtgataaccaccgatatggccgggaagtgctcgacgtatgaat

SEQ ID NO: 374583 - DNA, 2494 bp, Homo sapiens
ccgcatcctcagccctgcagacccccgaagaaaagaccagttcttagggggtcgcggaggctgagaagccggcggcccgagcgccctctttacctggtcgcagaggcgcggccaggcagggagggtgcgtgagcgtgtcggcgacctgggccgcctgcgccttcccgcccagtccgagctggaattccaaggctgcctctgggagctgctgcccgcagaccactcgcctccacagacgccaggagaaaaacgacagccaccttatgtggaaaatactcgcgccggccgtcattcataatccggcggaccggaaaaagggaagtaacgtcacttcctactgtcgcactgccaaacgtttcccccgcccctactgtgggaacctttgttttcctgctttcggagccggccagtgcgggaaccgtttccgaagggaccaccgggaacagacggatcggcagggcggggcggaacggcgtttgcaatggctgctactgtgaacttggaacttgatcccatttttttgaaagcactaggtttcttgcattcaaagagtaaagattctgctgaaaagctaaaagcactgcttgatgaatctttggctcggggcattgattccagttaccgtccatctcaaaaggatgtggagccacccaaaatttcaagcacaaaaaacatttccattaagcaagagcccaaaatatcatccagtcttccttctggtaataataatggcaaggtcctcacaactgaaaaggtaaagaaggaagctgaaaagagacctgctgataaaatgaaatcagacatcactgaaggagttgatattccaaagaaacctagattggagaaaccagaaacacagtcatctcccattactgtccaaagtagcaaggatttacctatggctgacctttccagttttgaggagaccagtgctgatgattttgccatggagatgggattggcctgcgttgtttgtaggcaaatgatggtggcatctggcaatcaattagtagaatgtcaggagtgccataatctctaccaccgagattgtcataaaccccaggtgacagacaaggaagcgaatgaccctcgcctggtgtggtattgtgcccgatgtaccagacaaatgaaaagaatggctcaaaaaactcagaaaccaccgcagaaaccagcccctgcagttgtttctgtaactccagctgtcaaagatccattggttaagaaaccagaaactaaactgaaacaagagacaacttttctagcgtttaagagaacagaagtcaagacatccacagttatttcaggaaattcttctagtgccagcgtttcctcgtcagtaactagtggcttaactggatgggcagcttttgcagccaaaacttcctctgctggtccttcaacagcaaaattgagttcaacaacacaaaacaatactgggaaacctgctacttcgtcagctaaccagaaacctgtgggtttgactggtctggcaacatcatccaaaggtggaataggttccaaaataggttccaataacagcactacgcccactgtacctttaaaaccacctccacctctaaccttgggtaaaactggccttagtcgctcagttagttgtgacaatgtcagcaaagtaggtcttcctagtccaagtagtttagttccaggaagcagcagccaactaagtgggaatggaaatagtggaacatcaggacctagtggaagtactaccagcaaaactacttcagaatccagcagctctccctcagcatcccttaaaggcccaacttcacaagaatcacagctcaatgctatgaagcgattacagatggtcaagaagaaagctgcccaaaagaaactcaagaagtaatgtggccaagtaggtttttgtatcatattagcctaaagatgaaaggcttattattatgatataatctgtaatacactgtaatttaataaaagtcttcataatcaaatttctattgtttcttaccttaaaatgctaaatattatataacaaaacttggaaactttcattttaaatcaatcttcaacatttttattctaatgatttccatagtgtgtgaaaacaatgattagaatgactggttctcaatgagatcttcagaagattgaaagcatctgtgaatttaaggaaaaagaaatagttcatcttctagcaaagccccaagagttgatcctgatgaatgaggtgccttatgtggcggcagggacgacccaacatagttttctattttcctccccgtattctgggtgttcattttctgtgctagccccatttcaactgactctccctctccctcccaattatttcatctttttcaaaattattttttcattattgatttctcatatcaatggattttcctaattgatttatcatacttcatattatatctttaccttttttatcacctcatttcaattatttaagggtatatctttttccaataaattgtgaactctcctggtg

SEQ ID NO: 374584 - DNA, 512 bp, Homo sapiens
agctggtttgaggctatgtgttcagagatggcatggtgagtaaaagagactgaatgaaagtggctggagttcaacaggcagttgggacagcagtgtgttgggtcagggcatgcagggccttacaagccatcttaagccattcagtctatatcctaagagccattggaagccctgtgggatggggagaacgaatcagatttgtctttgaaaatattgccctgggggccaggcacagtggctcatgcctgtaatcccagcactttgggaggctgaggcaggtggatcacctgaggtcgggcattcgagaccagcctggccaaccaacatggtgaaaccccgtctctactaaaaatacaaaaagttagccgggcatggtggtgcatgcttgtaatcccagctactcgggagggtgaggcaggagaatcgcttgaacccgggaggcagaggttgtggtgagctgagatcgcgccattgcacaccagcctgggcaacaagagcaaaactctgtctca

SEQ ID NO: 374585 - DNA, 2378 bp, Homo sapiens
gtcgcactccttctccccgagacttggtactgggagataggacgggagtctcctacacgcagtcaacacttgccacgagcggctagacttaggacaggcaagttgccctgccatccttctatcgcccccacccctcctttacttaagggcgatggcagagacgtcctcctcccccttctcctcctctttggtgcctccagccaggaggcgggagcgatccacagcagctgacccagctcaggcactgcctctctcacagccctcaagacacaccatgggcccagaggcaggtttgctacacagcagcgacgacgcaggcggcggccccagcgactcgcaactgcctccctgaccacagcggccaccgcccaacacccccgagaagccatcgccaccaccggcaggagaacctagggtccataaagccatcttcgcgatcgactaaagctacgtcaacaactatggcgggcgacgggcggcgggcagaggcggtgcgggaaggatggggtgtgtacgtcacccccagggcccccatccgagagggaaggggccggctcgcccctcaaaatggcggcagcagcgatgcgcctgcgtacagaactcctccgtcgcgccagggccggcgggaagtgaggttctcggacgagccgccagaagtgtacggcgacttcgagcccctggtggccaaagaaaggtccccggtgggaaaacgaacccggctagaagagttccggtccgattctgcgaaagaggaagtgagagaaagcgcgtactaccttcggtctaggcagcggaggcagccgcgaccccaggaaaccgaggaaatgaagacgcgaaggactacccgccttcagcagcagcactcagagcagcctccgctacagccgtctcctgttatgaccaggagagggctgcgggactctcattcctctgaagaggatgaagcatcttcccaaactgatttaagccaaacgatctcaaagaaaactgtcaggagcatacaagaggctccagcagtgagtgaagatcttgtaatcaggttacgtcgaccccctctaagatacccaagatatgaagccaccagtgtccaacagaaggtcaatttctctgaagaaggagaaactgaagaagatgatcaagacagctctcacagcagtgtcactactgttaaggccagatccagggattctgatgaatctggagataaaaccaccagatcatctagtcaatatatagaatcattttggcagtcatcacaaagtcaaaacttcacagctcatgataagcaaccttcagtgctaagtgctcaggatatcaaaaaactccccaggaatgggccccacaaactgcaagaataaggaccaggatgcaaaatgacagcattctgaaatcagagcttggaaaccagtcaccatcaacctccagccgacaagtgactggacaaccccaaaatgcatcttttgtcaagaggaaccggtggtggctacttcctctgatagctgctcttgcctctgggagtttttggttctttagtactcctgaggtagaaaccactgctgttcaagagttccagaaccagatgaatcaacttaagaataagtaccaaggtcaagatgagaagctgtggaaaaggagccaaacattcctggaaaaacatcttaatagctcccatcctcggtctcagcctgctatcttactgctcactgctgcccgagatgctgaagaagcacttaggtgtctgagtgaacaaattgctgatgcctattcttcttttcgtagtgtccgtgccatccggattgatgggacagataaagctactcaagacagtgatactgtcaaactagaggtagaccaagaactgagcaatggatttaagaatggccagaatgcagctgtggtacaccgctttgagtcatttcccgcaggctctactttgatcttctacaaatattgtgaccatgaaaacgcagccttcaaagatgtagccttagtcctgactgtcttattggaggaagagacacttggaacaagtctaggcctaaaggaagttgaagaaaaagtaagagattttcttaaagtcaagttcaccaattctaacacacccaactcctacaatcatatggacccagacaaactgaatggcctctggagccgtatttctcacttagttctgcctgtgcaacctgaaaatgccctgaaaaggggcatctgcttataagaagtgagagagaagaaaaatcatgtcccaagttctgagaattgttcacactttctaaccagagacagaattcagagctctttttgaaagaactagtttctttttaaagaagttaagtgcttacataaacatggaacatataaatcattcattcaaccta

SEQ ID NO: 374586 - DNA, 1757 bp, Homo sapiens
gtcgcactccttctccccgagacttggtactgggagataggacgggagtctcctacacgcagtcaacacttgccacgagcggctagacttaggacaggcaagttgccctgccatccttctatcgcccccacccctcctttacttaagggcgatggcagagacgtcctcctcccccttctcctcctctttggtgcctccagccaggaggcgggagcgatccacagcagctgacccagctcaggcactgcctctctcacagccctcaagacacaccatgggcccagaggcaggtttgctacacagcagcgacgacgcaggcggcggccccagcgactcgcaactgcctccctgaccacagcggccaccgcccaacacccccgagaagccatcgccaccaccggcaggagaacctagggtccataaagccatcttcgcgatcgactaaagctacgtcaacaactatggcgggcgacgggcggcgggcagaggcggtgcgggaaggatggggtgtgtacgtcacccccagggcccccatccgagagggaaggggccggctcgcccctcaaaatggcggcagcagcgatgcgcctgcgtacagaactcctccgtcgcgccagggccggcgggaagtgaggttctcggacgagccgccagaagtgtacggcgacttcgagcccctggtggccaaagaaaggtccccggtgggaaaacgaacccggctagaagagttccggtccgattctgcgaaagaggaagtgagagaaagcgcgtactaccttcggtctaggcagcggaggcagccgcgaccccaggaaaccgaggaaatgaagacgcgaaggactacccgccttcagcagcagcactcagagcagcctccgctacagccgtctcctgttatgaccaggagagggctgcgggactctcattcctctgaagaggatgaagcatcttcccaaactgatttaagccaaacgatctcaaagaaaactgtcaggagcatacaagaggctccagcagtgagtgaagatcttgtaatcaggttacgtcgaccccctctaagatacccaagatatgaagccaccagtgtccaacagaaggtcaatttctctgaagaaggagaaactgaagaagatgatcaagacagctctcacagcagtgtcactactgttaaggccagatccagggattctgatgaatctggagataaaaccaccagatcatctagtcaatatatagaatcattttggcagtcatcacaaagtcaaaacttcacagctcatgataagcaaccttcagtgctaagtgctctactttgatcttctacaaatattgtgaccatgaaaacgcagccttcaaagatgtagccttagtcctgactgtcttattggaggaagagacacttggaacaagtctaggcctaaaggaagttgaagaaaaagtaagagattttcttaaagtcaagttcaccaattctaacacacccaactcctacaatcatatggacccagacaaactgaatggcctctggagccgtatttctcacttagttctgcctgtgcaacctgaaaatgccctgaaaaggggcatctgcttataagaagtgagagagaagaaaaatcatgtcccaagttctgagaattgttcacactttctaaccagagacagaattcagagctctttttgaaagaactagtttctttttaaagaagttaagtgcttacataaacatggaacatataaatcattcattcaaccta

SEQ ID NO: 374587 - DNA, 4642 bp, Homo sapiens
gtcgcactccttctccccgagacttggtactgggagataggacgggagtctcctacacgcagtcaacacttgccacgagcggctagacttaggacaggcaagttgccctgccatccttctatcgcccccacccctcctttacttaagggcgatggcagagacgtcctcctcccccttctcctcctctttggtgcctccagccaggaggcgggagcgatccacagcagctgacccagctcaggcactgcctctctcacagccctcaagacacaccatgggcccagaggcaggtttgctacacagcagcgacgacgcaggcggcggccccagcgactcgcaactgcctccctgaccacagcggccaccgcccaacacccccgagaagccatcgccaccaccggcaggagaacctagggtccataaagccatcttcgcgatcgactaaagctacgtcaacaactatggcgggcgacgggcggcgggcagaggcggtgcgggaaggatggggtgtgtacgtcacccccagggcccccatccgagagggaaggggccggctcgcccctcaaaatggcggcagcagcgatgcgcctgcgtacagaactcctccgtcgcgccagggccggcgggaagtgaggttctcggacgagccgccagaagtgtacggcgacttcgagcccctggtggccaaagaaaggtccccggtgggaaaacgaacccggctagaagagttccggtccgattctgcgaaagaggaagtgagagaaagcgcgtactaccttcggtctaggcagcggaggcagccgcgaccccaggaaaccgaggaaatgaagacgcgaaggactacccgccttcagcagcagcactcagagcagcctccgctacagccgtctcctgttatgaccaggagagggctgcgggactctcattcctctgaagaggatgaagcatcttcccaaactgatttaagccaaacgatctcaaagaaaactgtcaggagcatacaagaggctccagcagtgagtgaagatcttgtaatcaggttacgtcgaccccctctaagatacccaagatatgaagccaccagtgtccaacagaaggtcaatttctctgaagaaggagaaactgaagaagatgatcaagacagctctcacagcagtgtcactactgttaaggccagatccagggattctgatgaatctggagataaaaccaccagatcatctagtcaatatatagaatcattttggcagtcatcacaaagtcaaaacttcacagctcatgataagcaaccttcagtgctaagtgctcaggatatcaaaaaactccccaggaatgggccccacaaactgcaagaataaggaccaggatgcaaaatgacagcattctgaaatcagagcttggaaaccagtcaccatcaacctccagccgacaagtgactggacaaccccaaaatgcatcttttgtcaagaggaaccggtggtggctacttcctctgatagctgctcttgcctctgggagtttttggttctttagtactcctgaggtagaaaccactgctgttcaagagttccagaaccagatgaatcaacttaagaataagtaccaaggtcaagatgagaagctgtggaaaaggagccaaacattcctggaaaaacatcttaatagctcccatcctcggtctcagcctgctatcttactgctcactgctgcccgagatgctgaagaagcacttaggtgtctgagtgaacaaattgctgatgcctattcttcttttcgtagtgtccgtgccatccggattgatgggacagataaagctactcaagacagtgatactgtcaaactagaggtagaccaagaactgagcaatggatttaagaatggccagaatgcagctgtggtacaccgctttgagtcatttcccgcaggctctactttgatcttctacaaatattgtgaccatgaaaacgcagccttcaaagatgtagccttagtcctgactgtcttattggaggaagagacacttggaacaagtctaggcctaaaggaagttgaagaaaaagtaagagattttcttaaagtcaagttcaccaattctaacacacccaactcctacaatcatatggacccagacaaactgaatggcctctggagccgtatttctcacttagttctgcctgtgcaacctgaaaatgccctgaaaaggggcatctgcttataagaagtgagagagaagaaaaatcatgtcccaagttctgagaattgttcacactttctaaccagagacagaattcagagctctttttgaaagaactagtttctttttaaagaagttaagtgcttacataaacatggaacatataaatcattcattcaacctaattatctgtgatatgagagaatcatttcagtttccattgagagctctgttaaaggtatcttaggagtgcagattatatgcagttccttagagaatctgttttgattctgggctgagttattacagttatggtatgaccagtgagagcgatttgtgtcctttcttatgaaccttcctgattttttaacttagatttctcactaagtttcctgagttattagtaagattgctccctaaatgtaaccagggatttttccattatgttcccttttataccatttaggtgtgagttccttagcttctgcctataggaacataagtaatgaaaggtcatctaggtgtgtgtttggaatttttttcttttgttttttggaaaatggaaagaacaaggcaaggaaggaaaattaatggggaagctgaagggaggaaatgttacagtaatccactgagatgtagtttagtcaaacataggtatatgaactgttaatcttggtggattccgttgggatttgttttttacatctcctttttccttccttgaagaaaaattcttggctgtcccaaggattcttcatgtatattgcaaaatttaatatatttgttcacttgagtcttaagagtaggtcaggccaaggcaggtggatcacctgaggtcagaagttcaagaccagcctggccaacatggtgaaaccccctctctactaaaaatacaaaaattagctgggcgtggtggtgcatgcctgaaatcccagctacttgggaggctgaggcaggagaattgcttgaacccgggaggcggaggttgcagtaagccgagaccatgcttattgccctccagtctgggcaacaaaaatgaaactccgtctcaaaaaaaaaaaagtaggtcaattcgtaacagtttattttggacacaccctgaagcttttgttttgaattaagaaatgagtttcaggaattgacaaaccatttgttaaccagctgtcctgggctattgaagaagatttcattttccgcgcatccacttgttgcagtccaagtcctctagtgcaacgccatagcaaatataaagatttactatgcacgtgatacattttatggagtgcctcaagccaagatagtgaatttatatgaagggtgtgaaatgtatttctttactactatagtagtttagttataactttgcatctataattgagctttctcatctgtcaaatgctatggttttcttaaaatgttacaattctagatctatccaccttgtttttttattgtctacaaaccattaaatgtaaatattgtttttagaaaaaaaaaaaaaaaaaaaaaaaagaggaaacaaaacgaaactaaagttattcccatagcagagaggaccaaagactataaaacggtccccaccttttttgtttcacatgtggttccctcatcattgaagtcgtatttataaaccctaggcattggaccgatgcgtgtccacaagctggctgaacttgggaaaactgagacctgggggcatccttggttgaaaggaccctcacttctgagagagttgacatattgtgcgacaataattaacctaacagcaatttacgggcgctcatagggctaaattatacaccaactgtctaccgttgttatatagtgttgttaaacagattacgccggcgattattgaatagcatgctagacagagtatatgggctaacatcgaaccttgattacatgcaacgtttttcttacccaaggaccttagtgataaaatgagtgatacaataaaaaaattttatacagcacagcgactcaataactacaacaagcgaccaacaacacacaatgataaaaaacgacatacacaggcaaagcgaaccgctacaggacagtacacaaggtgtaaggtatgagcaatagaagatacgtaataggaggacctaataggaatctgaatacgaagagaaacggcacagcagagacactcgacatagcgcacaagcactacaactcaaactcaagagacacagcactgcaagcaccagacaaccagaaatcagaagcgcaaagacgaaaggctggtcaagacacgagaaaccaggagtagatgaccacaagcccagcacagacgacacgcgtaagagcaacgccaaccaggacgcagagataagataccagaggagccttaaaacaccgaactaccagtcacttaagctgcaatacgccgcagacgagtccggaactatgaccagacagccaaaggacacgccacgcagg

SEQ ID NO: 374588 - DNA, 4592 bp, Homo sapiens
gtcgcactccttctccccgagacttggtactgggagataggacgggagtctcctacacgcagtcaacacttgccacgagcggctagacttaggacaggcaagttgccctgccatccttctatcgcccccacccctcctttacttaagggcgatggcagagacgtcctcctcccccttctcctcctctttggtgcctccagccaggaggcgggagcgatccacagcagctgacccagctcaggcactgcctctctcacagccctcaagacacaccatgggcccagaggcaggtttgctacacagcagcgacgacgcaggcggcggccccagcgactcgcaactgcctccctgaccacagcggccaccgcccaacacccccgagaagccatcgccaccaccggcaggagaacctagggtccataaagccatcttcgcgatcgactaaagctacgtcaacaactatggcgggcgacgggcggcgggcagaggcggtgcgggaaggatggggtgtgtacgtcacccccagggcccccatccgagagggaaggggccggctcgcccctcaaaatggcggcagcagcgatgcgcctgcgtacagaactcctccgtcgcgccagggccggcgggaagtgaggttctcggacgagccgccagaagtgtacggcgacttcgagcccctggtggccaaagaaaggtccccggtgggaaaacgaacccggctagaagagttccggtccgattctgcgaaagaggaagtgagagaaagcgcgtactaccttcggtctaggcagcggaggcagccgcgaccccaggaaaccgaggaaatgaagacgcgaaggactacccgccttcagcagcagcactcagagcagcctccgctacagccgtctcctgttatgaccaggagagggctgcgggactctcattcctctgaagaggatgaagcatcttcccaaactgatttaagccaaacgatctcaaagaaaactgtcaggagcatacaagaggctccagcagtgagtgaagatcttgtaatcaggttacgtcgaccccctctaagatacccaagatatgaagccaccagtgtccaacagaaggtcaatttctctgaagaaggagaaactgaagaagatgatcaagacagctctcacagcagtgtcactactgttaaggccagatccagggattctgatgaatctggagataaaaccaccagatcatctagtcaatatatagaatcattttggcagtcatcacaaagtcaaaacttcacagctcatgataagcaaccttcagtgctaagtgctcaggatatcaaaaaactccccaggaatgggccccacaaactgcaagaataaggaccaggatgcaaaatgacagcattctgaaatcagagcttggaaaccagtcaccatcaacctccagccgacaagtgactggacaaccccaaaatgcatcttttgtcaagaggaaccggtggtggctacttcctctgatagctgctcttgcctctgggagtttttggttctttagtactcctgaggtagaaaccactgctgttcaagagttccagaaccagatgaatcaacttaagaataagtaccaaggtcaagatgagaagctgtggaaaaggagccaaacattcctggaaaaacatcttaatagctcccatcctcggtctcagcctgctatcttactgctcactgctgcccgagatgctgaagaagcacttaggtgtctgagtgaacaaattgctgatgcctattcttcttttcgtagtgtccgtgccatccggattgatgggacagataaagctactcaagacagtgatactgtcaaactagaggtagaccaagaactgagcaatggatttaagaatggccagaatgcagctgtggtacaccgctttgagtcatttcccgcaggctctactttgatcttctacaaatattgtgaccatgaaaacgcagccttcaaagatgtagccttagtcctgactgtcttattggaggaagagacacttggaacaagtctaggcctaaaggaagttgaagaaaaagtaagagattttcttaaagtcaagttcaccaattctaacacacccaactcctacaatcatatggacccagacaaactgaatggcctctggagccgtatttctcacttagttctgcctgtgcaacctgaaaatgccctgaaaaggggcatctgcttataagaagtgagagagaagaaaaatcatgtcccaagttctgagaattgttcacactttctaaccagagacagaattcagagctctttttgaaagaactagtttctttttaaagaagttaagtgcttacataaacatggaacatataaatcattcattcaacctaattatctgtgatatgagagaatcatttcagtttccattgagagctctgttaaaggtatcttaggagtgcagattatatgcagttccttagagaatctgttttgattctgggctgagttattacagttatggtatgaccagtgagagcgatttgtgtcctttcttatgaaccttcctgattttttaacttagatttctcactaagtttcctgagttattagtaagattgctccctaaatgtaaccagggatttttccattatgttcccttttataccatttaggtgtgagttccttagcttctgcctataggaacataagtaatgaaaggtcatctaggtgtgtgtttggaatttttttcttttgttttttggaaaatggaaagaacaaggcaaggaaggaaaattaatggggaagctgaagggaggaaatgttacagtaatccactgagatgtagtttagtcaaacataggtatatgaactgttaatcttggtggattccgttgggatttgttttttacatctcctttttccttccttgaagaaaaattcttggctgtcccaaggattcttcatgtatattgcaaaatttaatatatttgttcacttgagtcttaagagtaggtcaggccaaggcaggtggatcacctgaggtcagaagttcaagaccagcctggccaacatggtgaaaccccctctctactaaaaatacaaaaattagctgggcgtggtggtgcatgcctgaaatcccagctacttgggaggctgaggcaggagaattgcttgaacccgggaggcggaggttgcagtaagccgagaccatgcttattgccctccagtctgggcaacaaaaatgaaactccgtctcaaaaaaaaaaaagtaggtcaattcgtaacagtttattttggacacaccctgaagcttttgttttgaattaagaaatgagtttcaggaattgacaaaccatttgttaaccagctgtcctgggctattgaagaagatttcattttccgcgcatccacttgttgcagtccaagtcctctagtgcaacgccatagcaaatataaagatttactatgcacgtgatacattttatggagtgcctcaagccaagatagtgaatttatatgaagggtgtgaaatgtatttctttactactatagtagtttagttataactttgcatctataattgagctttctcatctgtcaaatgctatggttttcttaaaatgttacaattctagatctatccaccttgtttttttattgtctacaaaccattaaatgtaaatattgtttttagagtcagtcattggctttgtcatttaccctttgagagttccacaagtggtagtagagtggtttaacgtctttcctctagtactaccagtattcataaatgtataccccttactgtaatttgttcctcttagaagtcagatcatctgatttatagaggattatgaaaaccagagtttttgaaaaggcttattttatacatacgtattatatagagaaacaaatgtttttattaaatgtttcattgacccaagtaatttaaaagtaatatgttacctatgtctttcaggaaaaataattatagcagctgatctgtaaatgactttaaaagctattttagtaatttaaataaatttactttcttggtttatactctctatgtgttataaacttaatgatttatcatctttaaaaaaagaaatccaagtattttccttgaacaattgtagcaactctggctaggagaaacaaaaatcaaagaactggagccatttgcaagtacattggttagaagtggaatagccgtaactttccattttatctcggcacttagggtttttaaaaatacagttaagttagatattcctgacttagcaaaagaatctccacagcagcttttcttttttttttttttaagtagacatgggatctcgctatattgcccaggctgtttttgaactcttggcctcaagcagtcctcctgcctaagcctcctaagtagctgggattacaggcataagtcactacacctggcttcttaaccttttctttatcacctccctgaagaacttttttagatttttttcttagtcaccccttccccatgatatttcaacaccagatatatactatgtatctgtttatggactgtaaatgttttttgctttatacaaaatagaatttttttttgtccc

SEQ ID NO: 374589 - DNA, 3997 bp, Homo sapiens
gtcgcactccttctccccgagacttggtactgggagataggacgggagtctcctacacgcagtcaacacttgccacgagcggctagacttaggacaggcaagttgccctgccatccttctatcgcccccacccctcctttacttaagggcgatggcagagacgtcctcctcccccttctcctcctctttggtgcctccagccaggaggcgggagcgatccacagcagctgacccagctcaggcactgcctctctcacagccctcaagacacaccatgggcccagaggcaggtttgctacacagcagcgacgacgcaggcggcggccccagcgactcgcaactgcctccctgaccacagcggccaccgcccaacacccccgagaagccatcgccaccaccggcaggagaacctagggtccataaagccatcttcgcgatcgactaaagctacgtcaacaactatggcgggcgacgggcggcgggcagaggcggtgcgggaaggatggggtgtgtacgtcacccccagggcccccatccgagagggaaggggccggctcgcccctcaaaatggcggcagcagcgatgcgcctgcgtacagaactcctccgtcgcgccagggccggcgggaagtgaggttctcggacgagccgccagaagtgtacggcgacttcgagcccctggtggccaaagaaaggtccccggtgggaaaacgaacccggctagaagagttccggtccgattctgcgaaagaggaagtgagagaaagcgcgtactaccttcggtctaggcagcggaggcagccgcgaccccaggaaaccgaggaaatgaagacgcgaaggactacccgccttcagcagcagcactcagagcagcctccgctacagccgtctcctgttatgaccaggagagggctgcgggactctcattcctctgaagaggatgaagcatcttcccaaactgatttaagccaaacgatctcaaagaaaactgtcaggagcatacaagaggctccagcagtgagtgaagatcttgtaatcaggttacgtcgaccccctctaagatacccaagatatgaagccaccagtgtccaacagaaggtcaatttctctgaagaaggagaaactgaagaagatgatcaagacagctctcacagcagtgtcactactgttaaggccagatccagggattctgatgaatctggagataaaaccaccagatcatctagtcaatatatagaatcattttggcagtcatcacaaagtcaaaacttcacagctcatgataagcaaccttcagtgctaagtgctcaggatatcaaaaaactccccaggaatgggccccacaaactgcaagaataaggaccaggatgcaaaatgacagcattctgaaatcagagcttggaaaccagtcaccatcaacctccagccgacaagtgactggacaaccccaaaatgcatcttttgtcaagaggaaccggtggtggctacttcctctgatagctgctcttgcctctgggagtttttggttctttagtactcctgaggtagaaaccactgctgttcaagagttccagaaccagatgaatcaacttaagaataagtaccaaggtcaagatgagaagctgtggaaaaggagccaaacattcctggaaaaacatcttaatagctcccatcctcggtctcagcctgctatcttactgctcactgctgcccgagatgctgaagaagcacttaggtgtctgagtgaacaaattgctgatgcctattcttcttttcgtagtgtccgtgccatccggattgatgggacagataaagctactcaagacagtgatactgtcaaactagaggtagaccaagaactgagcaatggatttaagaatggccagaatgcagctgtggtacaccgctttgagtcatttcccgcaggctctactttgatcttctacaaatattgtgaccatgaaaacgcagccttcaaagatgtagccttagtcctgactgtcttattggaggaagagacacttggaacaagtctaggcctaaaggaagttgaagaaaaagtaagagattttcttaaagtcaagttcaccaattctaacacacccaactcctacaatcatatggacccagacaaactgaatggcctctggagccgtatttctcacttagttctgcctgtgcaacctgaaaatgccctgaaaaggggcatctgcttataagaagtgagagagaagaaaaatcatgtcccaagttctgagaattgttcacactttctaaccagagacagaattcagagctctttttgaaagaactagtttctttttaaagaagttaagtgcttacataaacatggaacatataaatcattcattcaacctaattatctgtgatatgagagaatcatttcagtttccattgagagctctgttaaaggtatcttaggagtgcagattatatgcagttccttagagaatctgttttgattctgggctgagttattacagttatggtatgaccagtgagagcgatttgtgtcctttcttatgaaccttcctgattttttaacttagatttctcactaagtttcctgagttattagtaagattgctccctaaatgtaaccagggatttttccattatgttcccttttataccatttaggtgtgagttccttagcttctgcctataggaacataagtaatgaaaggtcatctaggtgtgtgtttggaatttttttcttttgttttttggaaaatggaaagaacaaggcaaggaaggaaaattaatggggaagctgaagggaggaaatgttacagtaatccactgagatgtagtttagtcaaacataggtatatgaactgttaatcttggtggattccgttgggatttgttttttacatctcctttttccttccttgaagaaaaattcttggctgtcccaaggattcttcatgtatattgcaaaatttaatatatttgttcacttgagtcttaagagtaggtcaggccaaggcaggtggatcacctgaggtcagaagttcaagaccagcctggccaacatggtgaaaccccctctctactaaaaatacaaaaattagctgggcgtggtggtgcatgcctgaaatcccagctacttgggaggctgaggcaggagaattgcttgaacccgggaggcggaggttgcagtaagccgagaccatgcttattgccctccagtctgggcaacaaaaatgaaactccgtctcaaaaaaaaaaaagtaggtcaattcgtaacagtttattttggacacaccctgaagcttttgttttgaattaagaaatgagtttcaggaattgacaaaccatttgttaaccagctgtcctgggctattgaagaagatttcattttccgcgcatccacttgttgcagtccaagtcctctagtgcaacgccatagcaaatataaagatttactatgcacgtgatacattttatggagtgcctcaagccaagatagtgaatttatatgaagggtgtgaaatgtatttctttactactatagtagtttagttataactttgcatctataattgagctttctcatctgtcaaatgctatggttttcttaaaatgttattgtttttagagtcagtcattggctttgtcatttaccctttgagagttccacaagtggtagtagagtggtttaacgtctttcctctagtactaccagtattcataaatgtataccccttactgtaatttgttcctcttagaagtcagatcatctgatttatagaggattatgaaaaccagagtttttgaaaaggcttattttatacatacgtattatatagagaaacaaatgtttttattaaatgtttcattgacccaagtaatttaaaagtaatatgttacctatgtctttcaggaaaaataattatagcagctgatctgtaaatgactttaaaagctattttagtaatttaaataaatttactttcttggtttatactctc

SEQ ID NO: 374590 - DNA, 4534 bp, Homo sapiens
gtcgcactccttctccccgagacttggtactgggagataggacgggagtctcctacacgcagtcaacacttgccacgagcggctagacttaggacaggcaagttgccctgccatccttctatcgcccccacccctcctttacttaagggcgatggcagagacgtcctcctcccccttctcctcctctttggtgcctccagccaggaggcgggagcgatccacagcagctgacccagctcaggcactgcctctctcacagccctcaagacacaccatgggcccagaggcaggtttgctacacagcagcgacgacgcaggcggcggccccagcgactcgcaactgcctccctgaccacagcggccaccgcccaacacccccgagaagccatcgccaccaccggcaggagaacctagggtccataaagccatcttcgcgatcgactaaagctacgtcaacaactatggcgggcgacgggcggcgggcagaggcggtgcgggaaggatggggtgtgtacgtcacccccagggcccccatccgagagggaaggggccggctcgcccctcaaaatggcggcagcagcgatgcgcctgcgtacagaactcctccgtcgcgccagggccggcgggaagtgaggttctcggacgagccgccagaagtgtacggcgacttcgagcccctggtggccaaagaaaggtccccggtgggaaaacgaacccggctagaagagttccggtccgattctgcgaaagaggaagtgagagaaagcgcgtactaccttcggtctaggcagcggaggcagccgcgaccccaggaaaccgaggaaatgaagacgcgaaggactacccgccttcagcagcagcactcagagcagcctccgctacagccgtctcctgttatgaccaggagagggctgcgggactctcattcctctgaagaggatgaagcatcttcccaaactgatttaagccaaacgatctcaaagaaaactgtcaggagcatacaagaggctccagcagtgagtgaagatcttgtaatcaggttacgtcgaccccctctaagatacccaagatatgaagccaccagtgtccaacagaaggtcaatttctctgaagaaggagaaactgaagaagatgatcaagacagctctcacagcagtgtcactactgttaaggccagatccagggattctgatgaatctggagataaaaccaccagatcatctagtcaatatatagaatcattttggcagtcatcacaaagtcaaaacttcacagctcatgataagcaaccttcagtgctaagtgctcaggatatcaaaaaactccccaggaatgggccccacaaactgcaagaataaggaccaggatgcaaaatgacagcattctgaaatcagagcttggaaaccagtcaccatcaacctccagccgacaagtgactggacaaccccaaaatgcatcttttgtcaagaggaaccggtggtggctacttcctctgatagctgctcttgcctctgggagtttttggttctttagtactcctgaggtagaaaccactgctgttcaagagttccagaaccagatgaatcaacttaagaataagtaccaaggtcaagatgagaagctgtggaaaaggagccaaacattcctggaaaaacatcttaatagctcccatcctcggtctcagcctgctatcttactgctcactgctgcccgagatgctgaagaagcacttaggtgtctgagtgaacaaattgctgatgcctattcttcttttcgtagtgtccgtgccatccggattgatgggacagataaagctactcaagacagtgatactgtcaaactagaggtagaccaagaactgagcaatggatttaagaatggccagaatgcagctgtggtacaccgctttgagtcatttcccgcaggctctactttgatcttctacaaatattgtgaccatgaaaacgcagccttcaaagatgtagccttagtcctgactgtcttattggaggaagagacacttggaacaagtctaggcctaaaggaagttgaagaaaaagtaagagattttcttaaagtcaagttcaccaattctaacacacccaactcctacaatcatatggacccagacaaactgaatggcctctggagccgtatttctcacttagttctgcctgtgcaacctgaaaatgccctgaaaaggggcatctgcttataagaagtgagagagaagaaaaatcatgtcccaagttctgagaattgttcacactttctaaccagagacagaattcagagctctttttgaaagaactagtttctttttaaagaagttaagtgcttacataaacatggaacatataaatcattcattcaacctaattatctgtgatatgagagaatcatttcagtttccattgagagctctgttaaaggtatcttaggagtgcagattatatgcagttccttagagaatctgttttgattctgggctgagttattacagttatggtatgaccagtgagagcgatttgtgtcctttcttatgaaccttcctgattttttaacttagatttctcactaagtttcctgagttattagtaagattgctccctaaatgtaaccagggatttttccattatgttcccttttataccatttaggtgtgagttccttagcttctgcctataggaacataagtaatgaaaggtcatctaggtgtgtgtttggaatttttttcttttgttttttggaaaatggaaagaacaaggcaaggaaggaaaattaatggggaagctgaagggaggaaatgttacagtaatccactgagatgtagtttagtcaaacataggtatatgaactgttaatcttggtggattccgttgggatttgttttttacatctcctttttccttccttgaagaaaaattcttggctgtcccaaggattcttcatgtatattgcaaaatttaatatatttgttcacttgagtcttaagagtaggtcaggccaaggcaggtggatcacctgaggtcagaagttcaagaccagcctggccaacatggtgaaaccccctctctactaaaaatacaaaaattagctgggcgtggtggtgcatgcctgaaatcccagctacttgggaggctgaggcaggagaattgcttgaacccgggaggcggaggttgcagtaagccgagaccatgcttattgccctccagtctgggcaacaaaaatgaaactccgtctcaaaaaaaaaaaagtaggtcaattcgtaacagtttattttggacacaccctgaagcttttgttttgaattaagaaatgagtttcaggaattgacaaaccatttgttaaccagctgtcctgggctattgaagaagatttcattttccgcgcatccacttgttgcagtccaagtcctctagtgcaacgccatagcaaatataaagatttactatgcacgtgatacattttatggagtgcctcaagccaagatagtgaatttatatgaagggtgtgaaatgtatttctttactactatagtagtttagttataactttgcatctataattgagctttctcatctgtcaaatgctatggttttcttaaaatgttattgtttttagagtcagtcattggctttgtcatttaccctttgagagttccacaagtggtagtagagtggtttaacgtctttcctctagtactaccagtattcataaatgtataccccttactgtaatttgttcctcttagaagtcagatcatctgatttatagaggattatgaaaaccagagtttttgaaaaggcttattttatacatacgtattatatagagaaacaaatgtttttattaaatgtttcattgacccaagtaatttaaaagtaatatgttacctatgtctttcaggaaaaataattatagcagctgatctgtaaatgactttaaaagctattttagtaatttaaataaatttactttcttggtttatactctctatgtgttataaacttaatgatttatcatctttaaaaaaagaaatccaagtattttccttgaacaattgtagcaactctggctaggagaaacaaaaatcaaagaactggagccatttgcaagtacattggttagaagtggaatagccgtaactttccattttatctcggcacttagggtttttaaaaatacagttaagttagatattcctgacttagcaaaagaatctccacagcagcttttcttttttttttttttaagtagacatgggatctcgctatattgcccaggctgtttttgaactcttggcctcaagcagtcctcctgcctaagcctcctaagtagctgggattacaggcataagtcactacacctggcttcttaaccttttctttatcacctccctgaagaacttttttagatttttttcttagtcaccccttccccatgatatttcaacaccagatatatactatgtatctgtttatggactgtaaatgttttttgctttatacaaaatagaatttttttttgtccc

SEQ ID NO: 374591 - DNA, 969 bp, Homo sapiens
acagcttttttttttaattctttttctaagatggaattgggctctgtctcccaggctgaggcaggagaattgcttgaacccgggaggcggaggttgcagtaagccgagaccatgcttattgccctccagtctgggcaacaaaaatgaaactccgtctcaaaaaaaaaaaagtaggtcaattcgtaacagtttattttggacacaccctgaagcttttgttttgaattaagaaatgagtttcaggaattgacaaaccatttgttaaccagctgtcctgggctattgaagaagatttcattttccgcgcatccacttgttgcagtccaagtcctctagtgcaacgccatagcaaatataaagatttactatgcacgtgatacattttatggagtgcctcaagccaagatagtgaatttatatgaagggtgtgaaatgtatttctttactactatagtagtttagttataactttgcatctataattgagctttctcatctgtcaaatgctatggttttcttaaaatgttacaattctagatctatccaccttgtttttttattgtctacaaaccattaaatgtaaatattgtttttagagtcagtcattggctttgtcatttaccctttgagagttccacaagtggtagtagagtggtttaacgtctttcctctagtactaccagtattcataaatgtataccccttactgtaatttgttcctcttagaagtcagatcatctgatttatagaggattatgaaaaccagagtttttgaaaaggcttattttatacatacgtattatatagagaaacaaatgtttttattaaatgtttcattgacccaagtaatttaaaagtaatatgttacctatgtctttcaggaaaaataattatagcagctgatctgtaaatgactttaaaagctattttagtaatttaaataaatttactttcttggtttatactctc

SEQ ID NO: 374592 - DNA, 529 bp, Homo sapiens
agattttcttgagaatgtgataaattattttattaagaaaattatcagctttcttctttaaagtccttcctcttttacctaatgtttataaagactgatattgattttaaaagtcacttgcccctgaatctaagaaagtggtatttatatctgtcatttcttttttgtctgagtagaagtgactggacaaccccaaaatgcatcttttgtcaagaggaaccggtggtggctacttcctctgatagctgctcttgcctctgggagtttttggttctttagtactcctgaggtagaaaccactgctgttcaagagttccagaaccagatgaatcaacttaagaataagtaccaaggtcaagatgagaagctgtggaaaaggagccaaacattcctggaaaaacatcttaatagctcccatcctcggtctcagcctgctatcttactgctcactgctgcccgagatgctgaagaagcacttaggtgtctgagtgaacaaattgctgatgcctattcttcttttcgtagtgtc

SEQ ID NO: 374593 - DNA, 4055 bp, Homo sapiens
gtcgcactccttctccccgagacttggtactgggagataggacgggagtctcctacacgcagtcaacacttgccacgagcggctagacttaggacaggcaagttgccctgccatccttctatcgcccccacccctcctttacttaagggcgatggcagagacgtcctcctcccccttctcctcctctttggtgcctccagccaggaggcgggagcgatccacagcagctgacccagctcaggcactgcctctctcacagccctcaagacacaccatgggcccagaggcaggtttgctacacagcagcgacgacgcaggcggcggccccagcgactcgcaactgcctccctgaccacagcggccaccgcccaacacccccgagaagccatcgccaccaccggcaggagaacctagggtccataaagccatcttcgcgatcgactaaagctacgtcaacaactatggcgggcgacgggcggcgggcagaggcggtgcgggaaggatggggtgtgtacgtcacccccagggcccccatccgagagggaaggggccggctcgcccctcaaaatggcggcagcagcgatgcgcctgcgtacagaactcctccgtcgcgccagggccggcgggaagtgaggttctcggacgagccgccagaagtgtacggcgacttcgagcccctggtggccaaagaaaggtccccggtgggaaaacgaacccggctagaagagttccggtccgattctgcgaaagaggaagtgagagaaagcgcgtactaccttcggtctaggcagcggaggcagccgcgaccccaggaaaccgaggaaatgaagacgcgaaggactacccgccttcagcagcagcactcagagcagcctccgctacagccgtctcctgttatgaccaggagagggctgcgggactctcattcctctgaagaggatgaagcatcttcccaaactgatttaagccaaacgatctcaaagaaaactgtcaggagcatacaagaggctccagcagtgagtgaagatcttgtaatcaggttacgtcgaccccctctaagatacccaagatatgaagccaccagtgtccaacagaaggtcaatttctctgaagaaggagaaactgaagaagatgatcaagacagctctcacagcagtgtcactactgttaaggccagatccagggattctgatgaatctggagataaaaccaccagatcatctagtcaatatatagaatcattttggcagtcatcacaaagtcaaaacttcacagctcatgataagcaaccttcagtgctaagtgctcaggatatcaaaaaactccccaggaatgggccccacaaactgcaagaataaggaccaggatgcaaaatgacagcattctgaaatcagagcttggaaaccagtcaccatcaacctccagccgacaagtgactggacaaccccaaaatgcatcttttgtcaagaggaaccggtggtggctacttcctctgatagctgctcttgcctctgggagtttttggttctttagtactcctgaggtagaaaccactgctgttcaagagttccagaaccagatgaatcaacttaagaataagtaccaaggtcaagatgagaagctgtggaaaaggagccaaacattcctggaaaaacatcttaatagctcccatcctcggtctcagcctgctatcttactgctcactgctgcccgagatgctgaagaagcacttaggtgtctgagtgaacaaattgctgatgcctattcttcttttcgtagtgtccgtgccatccggattgatgggacagataaagctactcaagacagtgatactgtcaaactagaggtagaccaagaactgagcaatggatttaagaatggccagaatgcagctgtggtacaccgctttgagtcatttcccgcaggctctactttgatcttctacaaatattgtgaccatgaaaacgcagccttcaaagatgtagccttagtcctgactgtcttattggaggaagagacacttggaacaagtctaggcctaaaggaagttgaagaaaaagtaagagattttcttaaagtcaagttcaccaattctaacacacccaactcctacaatcatatggacccagacaaactgaatggcctctggagccgtatttctcacttagttctgcctgtgcaacctgaaaatgccctgaaaaggggcatctgcttataagaagtgagagagaagaaaaatcatgtcccaagttctgagaattgttcacactttctaaccagagacagaattcagagctctttttgaaagaactagtttctttttaaagaagttaagtgcttacataaacatggaacatataaatcattcattcaacctaattatctgtgatatgagagaatcatttcagtttccattgagagctctgttaaaggtatcttaggagtgcagattatatgcagttccttagagaatctgttttgattctgggctgagttattacagttatggtatgaccagtgagagcgatttgtgtcctttcttatgaaccttcctgattttttaacttagatttctcactaagtttcctgagttattagtaagattgctccctaaatgtaaccagggatttttccattatgttcccttttataccatttaggtgtgagttccttagcttctgcctataggaacataagtaatgaaaggtcatctaggtgtgtgtttggaatttttttcttttgttttttggaaaatggaaagaacaaggcaaggaaggaaaattaatggggaagctgaagggaggaaatgttacagtaatccactgagatgtagtttagtcaaacataggtatatgaactgttaatcttggtggattccgttgggatttgttttttacatctcctttttccttccttgaagaaaaattcttggctgtcccaaggattcttcatgtatattgcaaaatttaatatatttgttcacttgagtcttaagagtaggtcaggccaaggcaggtggatcacctgaggtcagaagttcaagaccagcctggccaacatggtgaaaccccctctctactaaaaatacaaaaattagctgggcgtggtggtgcatgcctgaaatcccagctacttgggaggctgaggcaggagaattgcttgaacccgggaggcggaggttgcagtaagccgagaccatgcttattgccctccagtctgggcaacaaaaatgaaactccgtctcaaaaaaaaaaaagtaggtcaattcgtaacagtttattttggacacaccctgaagcttttgttttgaattaagaaatgagtttcaggaattgacaaaccatttgttaaccagctgtcctgggctattgaagaagatttcattttccgcgcatccacttgttgcagtccaagtcctctagtgcaacgccatagcaaatataaagatttactatgcacgtgatacattttatggagtgcctcaagccaagatagtgaatttatatgaagggtgtgaaatgtatttctttactactatagtagtttagttataactttgcatctataattgagctttctcatctgtcaaatgctatggttttcttaaaatgttacaattctagatctatccaccttgtttttttattgtctacaaaccattaaatgtaaatattgtttttagagtcagtcattggctttgtcatttaccctttgagagttccacaagtggtagtagagtggtttaacgtctttcctctagtactaccagtattcataaatgtataccccttactgtaatttgttcctcttagaagtcagatcatctgatttatagaggattatgaaaaccagagtttttgaaaaggcttattttatacatacgtattatatagagaaacaaatgtttttattaaatgtttcattgacccaagtaatttaaaagtaatatgttacctatgtctttcaggaaaaataattatagcagctgatctgtaaatgactttaaaagctattttagtaatttaaataaatttactttcttggtttatactctc

SEQ ID NO: 374594 - DNA, 4160 bp, Homo sapiens
gtcgcactccttctccccgagacttggtactgggagataggacgggagtctcctacacgcagtcaacacttgccacgagcggctagacttaggacaggcaagttgccctgccatccttctatcgcccccacccctcctttacttaagggcgatggcagagacgtcctcctcccccttctcctcctctttggtgcctccagccaggaggcgggagcgatccacagcagctgacccagctcaggcactgcctctctcacagccctcaagacacaccatgggcccagaggcaggtttgctacacagcagcgacgacgcaggcggcggccccagcgactcgcaactgcctccctgaccacagcggccaccgcccaacacccccgagaagccatcgccaccaccggcaggagaacctagggtccataaagccatcttcgcgatcgactaaagctacgtcaacaactatggcgggcgacgggcggcgggcagaggcggtgcgggaaggatggggtgtgtacgtcacccccagggcccccatccgagagggaaggggccggctcgcccctcaaaatggcggcagcagcgatgcgcctgcgtacagaactcctccgtcgcgccagggccggcgggaagtgaggttctcggacgagccgccagaagtgtacggcgacttcgagcccctggtggccaaagaaaggtccccggtgggaaaacgaacccggctagaagagttccggtccgattctgcgaaagaggaagtgagagaaagcgcgtactaccttcggtctaggcagcggaggcagccgcgaccccaggaaaccgaggaaatgaagacgcgaaggactacccgccttcagcagcagcactcagagcagcctccgctacagccgtctcctgttatgaccaggagagggctgcgggactctcattcctctgaagaggatgaagcatcttcccaaactgatttaagccaaacgatctcaaagaaaactgtcaggagcatacaagaggctccagcagtgagtgaagatcttgtaatcaggttacgtcgaccccctctaagatacccaagatatgaagccaccagtgtccaacagaaggtcaatttctctgaagaaggagaaactgaagaagatgatcaagacagctctcacagcagtgtcactactgttaaggccagatccagggattctgatgaatctggagataaaaccaccagatcatctagtcaatatatagaatcattttggcagtcatcacaaagtcaaaacttcacagctcatgataagcaaccttcagtgctaagtgctcaggatatcaaaaaactccccaggaatgggccccacaaactgcaagaataaggaccaggatgcaaaatgacagcattctgaaatcagagcttggaaaccagtcaccatcaacctccagccgacaagtgactggacaaccccaaaatgcatcttttgtcaagaggaaccggtggtggctacttcctctgatagctgctcttgcctctgggagtttttggttctttagtactcctgaggtagaaaccactgctgttcaagagttccagaaccagatgaatcaacttaagaataagtaccaaggtcaagatgagaagctgtggaaaaggagccaaacattcctggaaaaacatcttaatagctcccatcctcggtctcagcctgctatcttactgctcactgctgcccgagatgctgaagaagcacttaggtgtctgagtgaacaaattgctgatgcctattcttcttttcgtagtgtccgtgccatccggattgatgggacagataaagctactcaagacagtgatactgtcaaactagaggtagaccaagaactgagcaatggatttaagaatggccagaatgcagctgtggtacaccgctttgagtcatttcccgcaggctctactttgatcttctacaaatattgtgaccatgaaaacgcagccttcaaagatgtagccttagtcctgactgtcttattggaggaagagacacttggaacaagtctaggcctaaaggaagttgaagaaaaagtaagagattttcttaaagtcaagttcaccaattctaacacacccaactcctacaatcatatggacccagacaaactgaatggcctctggagccgtatttctcacttagttctgcctgtgcaacctgaaaatgccctgaaaaggggcatctgcttataagaagtgagagagaagaaaaatcatgtcccaagttctgagaattgttcacactttctaaccagagacagaattcagagctctttttgaaagaactagtttctttttaaagaagttaagtgcttacataaacatggaacatataaatcattcattcaacctaattatctgtgatatgagagaatcatttcagtttccattgagagctctgttaaaggtatcttaggagtgcagattatatgcagttccttagagaatctgttttgattctgggctgagttattacagttatggtatgaccagtgagagcgatttgtgtcctttcttatgaaccttcctgattttttaacttagatttctcactaagtttcctgagttattagtaagattgctccctaaatgtaaccagggatttttccattatgttcccttttataccatttaggtgtgagttccttagcttctgcctataggaacataagtaatgaaaggtcatctaggtgtgtgtttggaatttttttcttttgttttttggaaaatggaaagaacaaggcaaggaaggaaaattaatggggaagctgaagggaggaaatgttacagtaatccactgagatgtagtttagtcaaacataggtatatgaactgttaatcttggtggattccgttgggatttgttttttacatctcctttttccttccttgaagaaaaattcttggctgtcccaaggattcttcatgtatattgcaaaatttaatatatttgttcacttgagtcttaagagtaggtcaggccaaggcaggtggatcacctgaggtcagaagttcaagaccagcctggccaacatggtgaaaccccctctctactaaaaatacaaaaattagctgggcgtggtggtgcatgcctgaaatcccagctacttgggaggctgaggcaggagaattgcttgaacccgggaggcggaggttgcagtaagccgagaccatgcttattgccctccagtctgggcaacaaaaatgaaactccgtctcaaaaaaaaaaaagtaggtcaattcgtaacagtttattttggacacaccctgaagcttttgttttgaattaagaaatgagtttcaggaattgacaaaccatttgttaaccagctgtcctgggctattgaagaagatttcattttccgcgcatccacttgttgcagtccaagtcctctagtgcaacgccatagcaaatataaagatttactatgcacgtgatacattttatggagtgcctcaagccaagatagtgaatttatatgaagggtgtgaaatgtatttctttactactatagtagtttagttataactttgcatctataattgagctttctcatctgtcaaatgctatggttttcttaaaatgttacaattctagatctatccaccttgtttttttattgtctacaaaccattaaatgtaaatattgtttttagagtcagtcattggctttgtcatttaccctttgagagttccacaagtggtagtagagtggtttaacgtctttcctctagtactaccagtattcataaatgtataccccttactgtaatttgttcctcttagaagtcagatcatctgatttatagaggattatgaaaaccagagtttttgaaaaggcttattttatacatacgtattatatagagaaacaaatgtttttattaaatgtttcattgacccaagtaatttaaaagtaatatgttacctatgtctttcaggaaaaataattatagcagctgatctgtaaatgactttaaaagctattttagtaatttaaataaatttactttcttggtttatactctcaaaaaaaaaataaaaaattgtcgggccccggccccaaaattttaaaaccctccggggccggccccgggggaccaggcccgggccaggacaccggccaacaaggcg

SEQ ID NO: 374595 - DNA, 4018 bp, Homo sapiens
  misc_feature (3869)..(3869): n is a, c, g, or t
  misc_feature (3871)..(3872): n is a, c, g, or t
  misc_feature (3880)..(3880): n is a, c, g, or t
  misc_feature (3882)..(3883): n is a, c, g, or t
  misc_feature (3885)..(3885): n is a, c, g, or t
  misc_feature (3888)..(3888): n is a, c, g, or t
  misc_feature (3897)..(3897): n is a, c, g, or t
  misc_feature (4018)..(4018): n is a, c, g, or t
gtcgcactccttctccccgagacttggtactgggagataggacgggagtctcctacacgcagtcaacacttgccacgagcggctagacttaggacaggcaagttgccctgccatccttctatcgcccccacccctcctttacttaagggcgatggcagagacgtcctcctcccccttctcctcctctttggtgcctccagccaggaggcgggagcgatccacagcagctgacccagctcaggcactgcctctctcacagccctcaagacacaccatgggcccagaggcaggtttgctacacagcagcgacgacgcaggcggcggccccagcgactcgcaactgcctccctgaccacagcggccaccgcccaacacccccgagaagccatcgccaccaccggcaggagaacctagggtccataaagccatcttcgcgatcgactaaagctacgtcaacaactatggcgggcgacgggcggcgggcagaggcggtgcgggaaggatggggtgtgtacgtcacccccagggcccccatccgagagggaaggggccggctcgcccctcaaaatggcggcagcagcgatgcgcctgcgtacagaactcctccgtcgcgccagggccggcgggaagtgaggttctcggacgagccgccagaagtgtacggcgacttcgagcccctggtggccaaagaaaggtccccggtgggaaaacgaacccggctagaagagttccggtccgattctgcgaaagaggaagtgagagaaagcgcgtactaccttcggtctaggcagcggaggcagccgcgaccccaggaaaccgaggaaatgaagacgcgaaggactacccgccttcagcagcagcactcagagcagcctccgctacagccgtctcctgttatgaccaggagagggctgcgggactctcattcctctgaagaggatgaagcatcttcccaaactgatttaagccaaacgatctcaaagaaaactgtcaggagcatacaagaggctccagcagtgagtgaagatcttgtaatcaggttacgtcgaccccctctaagatacccaagatatgaagccaccagtgtccaacagaaggtcaatttctctgaagaaggagaaactgaagaagatgatcaagacagctctcacagcagtgtcactactgttaaggccagatccagggattctgatgaatctggagataaaaccaccagatcatctagtcaatatatagaatcattttggcagtcatcacaaagtcaaaacttcacagctcatgataagcaaccttcagtgctaagtgctcaggatatcaaaaaactccccaggaatgggccccacaaactgcaagaataaggaccaggatgcaaaatgacagcattctgaaatcagagcttggaaaccagtcaccatcaacctccagccgacaagtgactggacaaccccaaaatgcatcttttgtcaagaggaaccggtggtggctacttcctctgatagctgctcttgcctctgggagtttttggttctttagtactcctgaggtagaaaccactgctgttcaagagttccagaaccagatgaatcaacttaagaataagtaccaaggtcaagatgagaagctgtggaaaaggagccaaacattcctggaaaaacatcttaatagctcccatcctcggtctcagcctgctatcttactgctcactgctgcccgagatgctgaagaagcacttaggtgtctgagtgaacaaattgctgatgcctattcttcttttcgtagtgtccgtgccatccggattgatgggacagataaagctactcaagacagtgatactgtcaaactagaggtagaccaagaactgagcaatggatttaagaatggccagaatgcagctgtggtacaccgctttgagtcatttcccgcaggctctactttgatcttctacaaatattgtgaccatgaaaacgcagccttcaaagatgtagccttagtcctgactgtcttattggaggaagagacacttggaacaagtctaggcctaaaggaagttgaagaaaaagtaagagattttcttaaagtcaagttcaccaattctaacacacccaactcctacaatcatatggacccagacaaactgaatggcctctggagccgtatttctcacttagttctgcctgtgcaacctgaaaatgccctgaaaaggggcatctgcttataagaagtgagagagaagaaaaatcatgtcccaagttctgagaattgttcacactttctaaccagagacagaattcagagctctttttgaaagaactagtttctttttaaagaagttaagtgcttacataaacatggaacatataaatcattcattcaacctaattatctgtgatatgagagaatcatttcagtttccattgagagctctgttaaaggtatcttaggagtgcagattatatgcagttccttagagaatctgttttgattctgggctgagttattacagttatggtatgaccagtgagagcgatttgtgtcctttcttatgaaccttcctgattttttaacttagatttctcactaagtttcctgagttattagtaagattgctccctaaatgtaaccagggatttttccattatgttcccttttataccatttaggtgtgagttccttagcttctgcctataggaacataagtaatgaaaggtcatctaggtgtgtgtttggaatttttttcttttgttttttggaaaatggaaagaacaaggcaaggaaggaaaattaatggggaagctgaagggaggaaatgttacagtaatccactgagatgtagtttagtcaaacataggtatatgaactgttaatcttggtggattccgttgggatttgttttttacatctcctttttccttccttgaagaaaaattcttggctgtcccaaggattcttcatgtatattgcaaaatttaatatatttgttcacttgagtcttaagagtaggtcaggccaaggcaggtggatcacctgaggtcagaagttcaagaccagcctggccaacatggtgaaaccccctctctactaaaaatacaaaaattagctgggcgtggtggtgcatgcctgaaatcccagctacttgggaggctgaggcaggagaattgcttgaacccgggaggcggaggttgcagtaagccgagaccatgcttattgccctccagtctgggcaacaaaaatgaaactccgtctcaaaaaaaaaaaagtaggtcaattcgtaacagtttattttggacacaccctgaagcttttgttttgaattaagaaatgagtttcaggaattgacaaaccatttgttaaccagctgtcctgggctattgaagaagatttcattttccgcgcatccacttgttgcagtccaagtcctctagtgcaacgccatagcaaatataaagatttactatgcacgtgatacattttatggagtgcctcaagccaagatagtgaatttatatgaagggtgtgaaatgtatttctttactactatagtagtttagttataactttgcatctataattgagctttctcatctgtcaaatgctatggttttcttaaaatgttacaattctagatctatccaccttgtttttttattgtctacaaaccattaaatgtaaatattgtttttagagtcagtcattggctttgtcatttaccctttgagagttccacaagtggtagtagagtggtttaacgtctttcctctagtactaccagtattcataaatgtataccccttactgtaatttgttcctcttagaagtcagatcatctgatttatagaggattatgaaaaccagagtttgaaggttttatncnncgtttttngnncnagnttttatgtnctgcccgtttaagattggctttttcggaaaattggcgtggagtacgattatacaatttggttaacaaaaaaaaatgggcgcgagtaatgggggaagaggaggaggcaagagagaaatatgn

SEQ ID NO: 374596 - DNA, 3162 bp, Homo sapiens
gtcgcactccttctccccgagacttggtactgggagataggacgggagtctcctacacgcagtcaacacttgccacgagcggctagacttaggacaggcaagttgccctgccatccttctatcgcccccacccctcctttacttaagggcgatggcagagacgtcctcctcccccttctcctcctctttggtgcctccagccaggaggcgggagcgatccacagcagctgacccagctcaggcactgcctctctcacagccctcaagacacaccatgggcccagaggcaggtttgctacacagcagcgacgacgcaggcggcggccccagcgactcgcaactgcctccctgaccacagcggccaccgcccaacacccccgagaagccatcgccaccaccggcaggagaacctagggtccataaagccatcttcgcgatcgactaaagctacgtcaacaactatggcgggcgacgggcggcgggcagaggcggtgcgggaaggatggggtgtgtacgtcacccccagggcccccatccgagagggaaggggccggctcgcccctcaaaatggcggcagcagcgatgcgcctgcgtacagaactcctccgtcgcgccagggccggcgggaagtgaggttctcggacgagccgccagaagtgtacggcgacttcgagcccctggtggccaaagaaaggtccccggtgggaaaacgaacccggctagaagagttccggtccgattctgcgaaagaggaagtgagagaaagcgcgtactaccttcggtctaggcagcggaggcagccgcgaccccaggaaaccgaggaaatgaagacgcgaaggactacccgccttcagcagcagcactcagagcagcctccgctacagccgtctcctgttatgaccaggagagggctgcgggactctcattcctctgaagaggatgaagcatcttcccaaactgatttaagccaaacgatctcaaagaaaactgtcaggagcatacaagaggctccagcagtgagtgaagatcttgtaatcaggttacgtcgaccccctctaagatacccaagatatgaagccaccagtgtccaacagaaggtcaatttctctgaagaaggagaaactgaagaagatgatcaagacagctctcacagcagtgtcactactgttaaggccagatccagggattctgatgaatctggagataaaaccaccagatcatctagtcaatatatagaatcattttggcagtcatcacaaagtcaaaacttcacagctcatgataagcaaccttcagtgctaagtgctcaggatatcaaaaaactccccaggaatgggccccacaaactgcaagaataaggaccaggatgcaaaatgacagcattctgaaatcagagcttggaaaccagtcaccatcaacctccagccgacaagtgactggacaaccccaaaatgcatcttttgtcaagaggaaccggtggtggctacttcctctgatagctgctcttgcctctgggagtttttggttctttagtactcctgaggtagaaaccactgctgttcaagagttccagaaccagatgaatcaacttaagaataagtaccaaggtcaagatgagaagctgtggaaaaggagccaaacattcctggaaaaacatcttaatagctcccatcctcggtctcagcctgctatcttactgctcactgctgcccgagatgctgaagaagcacttaggtgtctgagtgaacaaattgctgatgcctattcttcttttcgtagtgtccgtgccatccggattgatgggacagataaagctactcaagacagtgatactgtcaaactagaggtagaccaagaactgagcaatggatttaagaatggccagaatgcagctgtggtacaccgctttgagtcatttcccgcaggctctactttgatcttctacaaatattgtgaccatgaaaacgcagccttcaaagatgtagccttagtcctgactgtcttattggaggaagagacacttggaacaagtctaggcctaaaggaagttgaagaaaaagtaagagattttcttaaagtcaagttcaccaattctaacacacccaactcctacaatcatatggacccagacaaactgaatggcctctggagccgtatttctcacttagttctgcctgtgcaacctgaaaatgccctgaaaaggggcatctgcttataagaagtgagagagaagaaaaatcatgtcccaagttctgagaattgttcacactttctaaccagagacagaattcagagctctttttgaaagaactagtttctttttaaagaagttaagtgcttacataaacatggaacatataaatcattcattcaacctaattatctgtgatatgagagaatcatttcagtttccattgagagctctgttaaaggtatcttaggagtgcagattatatgcagttccttagagaatctgttttgattctgggctgagttattacagttatggtatgaccagtgagagcgatttgtgtcctttcttatgaaccttcctgattttttaacttagatttctcactaagtttcctgagttattagtaagattgctccctaaatgtaaccagggatttttccattatgttcccttttataccatttaggtgtgagttccttagcttctgcctataggaacataagtaatgaaaggtcatctaggtgtgtgtttggaatttttttcttttgttttttggaaaatggaaagaacaaggcaaggaaggaaaattaatggggaagctgaagggaggaaatgactaatgaagctaattaaaagaagcattcaaatctggtttctacctcattaacaattagcagggcactggccagagtttgtaccctgtgttttaccttaacaaattctattgctcttgtattttaacgtgtgtagggaacgtgttcatcaaaactgaccctgagataaggaagagatggggcttgggaattctatcaccaaccttatggtttccgtcaactacacgttgttgcctgtagggtggcccaagtgggtccctgccagaaaacgcatgggccaacaacttggggaaatggccctgtggtggaaacccctttttgggggcgaaaacctctcgtttgcaactcgggtgt

SEQ ID NO: 374597 - DNA, 400 bp, Homo sapiens
gagatggtgtcttgctctggcacccaggctggagtgggggggtgcgatctcagctcactgcaccgtccgaggaggagctgtagtttaaaggaagatactcaatactctaggaagcagatcatcaaaattttaaaaagcggctgggtgcggtggctcatgccttaggttttctagtttagaagacattttgtgtacccttctaggcctctgagcaagaagtttcttcattaggctctccgtgttactttatactttttacttacgttcacagtggtcctaaaaccaagatgcagccctaagcacctcataggagaagctgtattttttttttttttttttgagatggagtcttgctctggcacccaggctggagtgcagtggtgcgatctcagctcactgc

SEQ ID NO: 374598 - DNA, 6473 bp, Homo sapiens
acctttaagcgtcacgtgactcccctcgggcttgtcccctcctctttcccctccccaggcccaggcgagcgctggtgtggacgggaagctcccggcccggcgaactaactggagcacggagctgcagccggttgggccggtgtactttcccgctctggaaaggaagagaaatggaagtgagaaagttgagcatttcctggcagttcttgatagttctggttctgatcctgcaaattctgtctgcgttggattttgacccatacagagtcctaggggtcagccgaacagccagtcaggctgatattaaaaaggcttataagaagctcgcccgggaatggcatcctgacaaaaacaaagatcctggagcagaagacaagttcattcaaatcagtaaggcttacgagattctttcaaatgaagaaaagagatcaaattatgatcaatatggagacgctggagagaaccagggctaccagaagcagcaacagcagcgagagtatcgcttccgccatttccatgaaaatttttattttgatgaatccttttttcacttcccttttaattctgaacggcgggactcaattgacgaaaagtatttattgcacttttcacattatgtgaatgaagtggttccagatagcttcaagaaaccctacctcatcaagatcacctccgattggtgctttagctgcattcatatcgagcctgtgtggaaagaagtcattcaagaactggaagaattgggtgtaggaattggcgtggtccatgctgggtatgagagacgcctggcccatcacctaggggcacacagcacgccctctatcctaggaatcattaacgggaaaatctccttcttccacaatgcagttgtccgtgaaaatctgcgacaatttgtagaaagtcttcttccagggaacttggtggagaaagttacaaataaaaattacgtcagattcctctctggctggcagcaagagaataagcctcatgtccttctgtttgaccaaacgcccattgtgccactgttatacaagttgactgcctttgcatacaaagattatttatcatttggatatgtatatgtgggtttgagagggacggaagagatgacaaggcggtacaacatcaatatctacgcccctaccctcttggtctttaaagaacatataaacaggcctgccgatgttatccaggcccgaggtatgaagaagcaaatcattgacgacttcatcacccgaaacaaatatctattggcagccaggctcaccagccagaagttgttccatgaactctgccctgtgaaacggtcgcatcgacagaggaagtactgtgtggttttattgactgctgagactaccaagttgagcaaaccctttgaggctttcctgtcctttgccctggcaaacactcaagacacagtgagatttgtgcatgtctacagcaatcggcagcaggagtttgccgacaccttactaccagacagtgaggcgtttcaagggaaatcagcggtgtctattttagaaaggcgcaacacagcaggaagggtggtgtataaaaccctggaagacccttggattgggagtgagagtgacaaatttatcctcttgggctatctcgaccagctgcgtaaagatccagctcttctgtcctctgaagcagtgcttcctgacctgaccgatgaacttgcccctgtttttctccttcgatggttctactctgcttctgactacatctcagactgctgggatagcatttttcacaacaactggagggaaatgatgcccctgctgtccctgatcttctctgccctcttcatcctcttcggcactgtcatcgttcaggctttcagcgactctaatgatgagcgagagtcaagccctccagaaaaagaggaagcccaagagaagactgggaaaactgagccaagcttcaccaaagaaaacagcagcaagattcctaaaaaaggctttgtggaggtaactgaactcacagatgtaacatacaccagtaacttggtacgtctgaggccaggccacatgaatgtggtcctcatcctgtcgaattctaccaagaccagcctactacagaaatttgctttggaggtctacacatttactgggagcagctgcctacacttctccttcctgagtctagataaacacagagaatggctagaatacttactagaatttgctcaagatgcagctccaatcccaaaccaatatgataagcatttcatggagcgtgactacactggttatgtactggctctgaatggccacaagaaatacttctgcctcttcaagccccaaaagacagtcgaagaggaggaagccatagggtcgtgcagtgatgttgactcttccctctacctgggtgaatctcgagggaaaccttcctgtggccttggatccaggcccatcaaaggaaagttgagcaagctctctttatggatggaacgcctgctggagggctccttacagaggttttatatcccatcatggcctgaactagactgagaggattttccaaagagatttgaactcttcagactttttaacatgcccctgtgaacaggtattttcaggactcaaactaccacaatgaacagagtatagattttagattgctcttctagaaccatggctagaagaatctttcctttgtcctgttctaacctaggaatgaaaaacaccaccagtttgaatcgcctagatgaaaatcttttcctctgggtgttatttttccccactgaatgccacaccattgaaaatagactgctcatcccctcttcctttcttgtccttgtcccatgctcaccccaccctcctgtcctgtgtcttggagaagcacagggctccaccctgcaagcggcatctggcggaccctcatgagcctgtcgtgcaggccaggtcattggccccttccccaatcccggccctgctgtgctgctgccatggcgcatgctcctaactctgaacaacccacggcagcttctagccccgcatctggaaaaaggcccctttccaagcaatctcacgtttactggttgttctgggagtaagtggctaaatgtatattttgggggtatcccccaacaacagtttgttggccacaggttgaaaaggaaaggaataaacgggagttctgcatgtgagttctcaagaaaaggaaagggaggctgagcagtggctgaagcgatgcagccttgagacacgctgtgagcatcccatccgccgccccagcgctgctggtagccaggggaggggtctgcacagcgagaagtactgtgatgactttgagccgttgacatgtatgtcttcagatgcctttctgcctctgtcgattttagggtatggatattaggagccataacttgtaatcttgttctctgaacgtagagataagctgctataaagccagtagatgttaaactgaagagaaattattcccacctgctatgagtcaggcttaaggaatctcttcaatagtgtctctttagtaaaataccaaacatgtctttgtatcaaggaacttaaaatttctcaacaattgtattttgaacactgttaccctaaaagtgctgtctcttcaagtcatcttttgcaggaagtgagccaagatttgttctagactcccattttgcaaaaggcttactttccacttctgggctgtattttgatgtctcatcttcattgttttcactcttaacttagagctgcttcaccagtattggggtcagactggccatcagcacctgagcgtgctgagctccaggtatagtggaccccagggtgcctcataccagccagttagagagcataccttttatttttcagggcagaatgaccagtggttctgagtttgagtttggacagcttcaaagagtggtccgttcaaatgtcaaagcaaggtgcctttggtggctttgtgaagggtgaaaatcagtgatgggacatttactaagtatttcttttttttttttttttttttagttgttgagacagagtttcactcttgttgcccaggctggagtgaaatggtgcgatctcggttcaccgcaacctccacatcccaggttcaagtgattctcctgcctcagcctcctgagtagctaggattacaggcatgtgccaccatgtaattagcccggctaattttgtatttttagtagagacgggatttctccatgttgatcaggctggtcatgaactcctgacctcaggtgatctgcctgcctcagcctcccaaagtgctgctgggattacaggcgtgagccaccactcccggctaagttagtatttctttaatcttaatgctttaaactaagccacttggatcctgaataatttaaatcttgagctacattggtaagtaataaattatttaaggccaggaattcctgtagttttcatggagtctgtagctttattaaaaaataaatcactgccaggcttcattcttccatatgatcctctaaaaatggacacttcctctgaatgctgtatctcatggcacctggtccaactagaaatggtcaaggaattcatttggctccttgatacatcagtcctcaatattactttctaggtattttatggccagattgcttatatgagtggtcttttggtttggtagtaggtttttatttttaatttctgtactaatgaaattcctgactttaatttctgaaaaccaaaaactctccaagtgtatttatttatattttttttaatagagacgaggtcttgctatgttgcccaggctggtcccaaactcctggcctcaagcagtccttccaccttggcctcccaaagtgctgggattatcaatatgagccaccatgccagatttgttcatttttaaacatttttatctcttcaagtcatcttttgatcttttaaaaagcaccttcaaacagctgcaccttccatttgcactaggaaatgaaggtagtgatgggattggcaatgttcctggcagatgtttcagcccaaaagctcttctacagaccggtttagagctggtgccctatgagaatattagggagcttttattttaaattgaactttacccttgtccatgcaaggcattcctcctgaatgcatccatgaatttgtttacttttgcgtcaaacatatgagccattgtcatgctcagcctgtgccaccattgctctgtctgatgtatgtaatcatacaagacctgattttggttctaacacagtggtctttgactatcaacattgatgtttttagagatgggttcttctggttgatacagactatgcattgcgtttagcagatggggtaaaactggcctaaaacaagtctttgcagaatacatgccaatttccaaaaaaaaaaaaaaatttgttgctcaggtgttgcacaatttttatctaacactgaggctatcagctccaactaaacaacatttcagtgggtgaggctgccctaacttccattaggggccatggtctcactgccatcacttattagccatgagaatttggttgtagttttcaggtaggttggtttcttcctcatttgcagcttgttgatacttgttcctttttatttattaacatcccaatcaatttgcagctgccatcattacataaatatttttctgttataaaaagaagtgtgatctgtttttttagtgatttcctttgtttgggaatagagattggaagcacatactcagacctgttttgttaactagaattctttaaaagctgatgccaaacatctttacagaggaactgtagttcacatccacctgtctgacattgtcccctaaaaacaagtgcagtgtggcagctgctgaatctgtctgttcagtttgtcaaggaggataattatgcttgggagagatctgaaaagaaggtgaatattttgcacttttgatactcttaggaacaaataacttatttggcaaattgtttcttttttatgttttgggtgttgtttttgttttttgactttttttgtattgtgaacaggcactgaagctgatgttattttaagattacagaatggaaaaagaaataaactattttaatgtctgataattatggggtagcccttgcattgcaagatgatgatttgattatggacacattatcaacagaattgaatttgcatggaactcaagacacgcttaagatcaccacagcataactgcagatttcaggaattacagtcatagagggtacatcaacttgaagagtagattgagtcttacaggaagtgagttacaataagtaacattaagagcccagctgccagcctggccaacatggtgaaaccccgtctccactaaaaatacaaaaattagccgggcgtggtgacgcatgaccgtaattccagctactcaggaggctgaggcagcagaattgcttgaacccaggaggcggagattgcagtgagctaagatcgggccactgcactccagcctgggggacagag

SEQ ID NO: 374599 - DNA, 6537 bp, Homo sapiens
acctttaagcgtcacgtgactcccctcgggcttgtcccctcctctttcccctccccaggcccaggcgagcgctggtgtggacgggaagctcccggcccggcgaactaactggagcacggagctgcagccggttgggccggtgtactttcccgctctggaaaggaagagaaatggaagtgagaaagttgagcatttcctggcagttcttgatagttctggttctgatcctgcaaattctgtctgcgttggattttgacccatacagagtcctaggggtcagccgaacagccagtcaggctgatattaaaaaggcttataagaagctcgcccgggaatggcatcctgacaaaaacaaagatcctggagcagaagacaagttcattcaaatcagtaaggcttacgagattctttcaaatgaagaaaagagatcaaattatgatcaatatggagacgctggagagaaccagggctaccagaagcagcaacagcagcgagagtatcgcttccgccatttccatgaaaatttttattttgatgaatccttttttcacttcccttttaattctgaacggcgggactcaattgacgaaaagtatttattgcacttttcacattatgtgaatgaagtggttccagatagcttcaagaaaccctacctcatcaagatcacctccgattggtgctttagctgcattcatatcgagcctgtgtggaaagaagtcattcaagaactggaagaattgggtgtaggaattggcgtggtccatgctgggtatgagagacgcctggcccatcacctaggggcacacagcacgccctctatcctaggaatcattaacgggaaaatctccttcttccacaatgcagttgtccgtgaaaatctgcgacaatttgtagaaagtcttcttccagggaacttggtggagaaagttacaaataaaaattacgtcagattcctctctggctggcagcaagagaataagcctcatgtccttctgtttgaccaaacgcccattgtgccactgttatacaagttgactgcctttgcatacaaagattatttatcatttggatatgtatatgtgggtttgagagggacggaagagatgacaaggcggtacaacatcaatatctacgcccctaccctcttggtctttaaagaacatataaacaggcctgccgatgttatccaggcccgaggtatgaagaagcaaatcattgacgacttcatcacccgaaacaaatatctattggcagccaggctcaccagccagaagttgttccatgaactctgccctgtgaaacggtcgcatcgacagaggaagtactgtgtggttttattgactgctgagactaccaagttgagcaaaccctttgaggctttcctgtcctttgccctggcaaacactcaagacacagtgagatttgtgcatgtctacagcaatcggcagcaggagtttgccgacaccttactaccagacagtgaggcgtttcaagggaaatcagcggtgtctattttagaaaggcgcaacacagcaggaagggtggtgtataaaaccctggaagacccttggattgggagtgagagtgacaaatttatcctcttgggctatctcgaccagctgcgtaaagatccagctcttctgtcctctgaagcagtgcttcctgacctgaccgatgaacttgcccctgtttttctccttcgatggttctactctgcttctgactacatctcagactgctgggatagcatttttcacaacaactggagggaaatgatgcccctgctgtccctgatcttctctgccctcttcatcctcttcggcactgtcatcgttcaggctttcagcgactctaatgatgagcgagagtcaagccctccagaaaaagaggaagcccaagagaagactgggaaaactgagccaagcttcaccaaagaaaacagcagcaagattcctaaaaaaggctttgtggaggtaactgaactcacagatgtaacatacaccagtaacttggtacgtctgaggccaggccacatgaatgtggtcctcatcctgtcgaattctaccaagaccagcctactacagaaatttgctttggaggtctacacatttactgggagcagctgcctacacttctccttcctgagtctagataaacacagagaatggctagaatacttactagaatttgctcaagatgcagctccaatcccaaaccaatatgataagcatttcatggagcgtgactacactggttatgtactggctctgaatggccacaagaaatacttctgcctcttcaagccccaaaagacagtcgaagaggaggaagccatagggtcgtgcagtgatgttgactcttccctctacctgggtgaatctcgagggaaaccttcctgtggccttggatccaggcccatcaaaggaaagttgagcaagctctctttatggatggaacgcctgctggagggctccttacagaggttttatatcccatcatggcctgaactagactgagaggattttccaaagagatttgaactcttcagactttttaacatgcccctgtgaacaggtattttcaggactcaaactaccacaatgaacagagtatagattttagattgctcttctagaaccatggctagaagaatctttcctttgtcctgttctaacctaggaatgaaaaacaccaccagtttgaatcgcctagatgaaaatcttttcctctgggtgttatttttccccactgaatgccacaccattgaaaatagactgctcatcccctcttcctttcttgtccttgtcccatgctcaccccaccctcctgtcctgtgtcttggagaagcacagggctccaccctgcaagcggcatctggcggaccctcatgagcctgtcgtgcaggccaggtcattggccccttccccaatcccggccctgctgtgctgctgccatggcgcatgctcctaactctgaacaacccacggcagcttctagccccgcatctggaaaaaggcccctttccaagcaatctcacgtttactggttgttctgggagtaagtggctaaatgtatattttgggggtatcccccaacaacagtttgttggccacaggttgaaaaggaaaggaataaacgggagttctgcatgtgagttctcaagaaaaggaaagggaggctgagcagtggctgaagcgatgcagccttgagacacgctgtgagcatcccatccgccgccccagcgctgctggtagccaggggaggggtctgcacagcgagaagtactgtgatgactttgagccgttgacatgtatgtcttcagatgcctttctgcctctgtcgattttagggtatggatattaggagccataacttgtaatcttgttctctgaacgtagagataagctgctataaagccagtagatgttaaactgaagagaaattattcccacctgctatgagtcaggcttaaggaatctcttcaatagtgtctctttagtaaaataccaaacatgtctttgtatcaaggaacttaaaatttctcaacaattgtattttgaacactgttaccctaaaagtgctgtctcttcaagtcatcttttgcaggaagtgagccaagatttgttctagactcccattttgcaaaaggcttactttccacttctgggctgtattttgatgtctcatcttcattgttttcactcttaacttagagctgcttcaccagtattggggtcagactggccatcagcacctgagcgtgctgagctccaggtatagtggaccccagggtgcctcataccagccagttagagagcataccttttatttttcagggcagaatgaccagtggttctgagtttgagtttggacagcttcaaagagtggtccgttcaaatgtcaaagcaaggtgcctttggtggctttgtgaagggtgaaaatcagtgatgggacatttactaagtatttcttttttttttttttttttttagttgttgagacagagtttcactcttgttgcccaggctggagtgaaatggtgcgatctcggttcaccgcaacctccacatcccaggttcaagtgattctcctgcctcagcctcctgagtagctaggattacaggcatgtgccaccatgtaattagcccggctaattttgtatttttagtagagacgggatttctccatgttgatcaggctggtcatgaactcctgacctcaggtgatctgcctgcctcagcctcccaaagtgctgctgggattacaggcgtgagccaccactcccggctaagttagtatttctttaatcttaatgctttaaactaagccacttggatcctgaataatttaaatcttgagctacattggtaagtaataaattatttaaggccaggaattcctgtagttttcatggagtctgtagctttattaaaaaataaatcactgccaggcttcattcttccatatgatcctctaaaaatggacacttcctctgaatgctgtatctcatggcacctggtccaactagaaatggtcaaggaattcatttggctccttgatacatcagtcctcaatattactttctaggtattttatggccagattgcttatatgagtggtcttttggtttggtagtaggtttttatttttaatttctgtactaatgaaattcctgactttaatttctgaaaaccaaaaactctccaagtgtatttatttatattttttttaatagagacgaggtcttgctatgttgcccaggctggtcccaaactcctggcctcaagcagtccttccaccttggcctcccaaagtgctgggattatcaatatgagccaccatgccagatttgttcatttttaaacatttttatctcttcaagtcatcttttgatcttttaaaaagcaccttcaaacagctgcaccttccatttgcactaggaaatgaaggtagtgatgggattggcaatgttcctggcagatgtttcagcccaaaagctcttctacagaccggtttagagctggtgccctatgagaatattagggagcttttattttaaattgaactttacccttgtccatgcaaggcattcctcctgaatgcatccatgaatttgtttacttttgcgtcaaacatatgagccattgtcatgctcagcctgtgccaccattgctctgtctgatgtatgtaatcatacaagacctgattttggttctaacacagtggtctttgactatcaacattgatgtttttagagatgggttcttctggttgatacagactatgcattgcgtttagcagatggggtaaaactggcctaaaacaagtctttgcagaatacatgccaatttccaaaaaaaaaaaaaaatttgttgctcaggtgttgcacaatttttatctaacactgaggctatcagctccaactaaacaacatttcagtgggtgaggctgccctaacttccattaggggccatggtctcactgccatcacttattagccatgagaatttggttgtagttttcaggtaggttggtttcttcctcatttgcagcttgttgatacttgttcctttttatttattaacatcccaatcaatttgcagctgccatcattacataaatatttttctgttataaaaagaagtgtgatctgtttttttagtgatttcctttgtttgggaatagagattggaagcacatactcagacctgttttgttaactagaattctttaaaagctgatgccaaacatctttacagaggaactgtagttcacatccacctgtctgacattgtcccctaaaaacaagtgcagtgtggcagctgctgaatctgtctgttcagtttgtcaaggaggataattatgcttgggagagatctgaaaagaaggtgaatattttgcacttttgatactcttaggaacaaataacttatttggcaaattgtttcttttttatgttttgggtgttgtttttgttttttgactttttttgtattgtgaacaggcactgaagctgatgttattttaagattacagaatggaaaaagaaataaactattttaatgtctgataattatggggtagcccttgcattgcaagatgatgatttgattatggacacattatcaacagaattgaatttgcatggaactcaagacacgcttaagatcaccacagcataactgcagatttcaggaattacagtcatagagggtacatcaacttgaagagtagattgagtcttacaggaagtgagttacaataagtaacattaagagcccagctgccagcctgctcaggtgatcctcccgcctaggcctgggattacaggcgtgagccactgggtccggcctgctttttttttttttttttttttttttttggagacggagtctcactctgtcacccaggctggagtgtagtggcatgacctcagctcactgcaacctccacctcccgggttcaagcaatgcccctgcctcagcttcctgagtagctgggactataggcacgcgccaccacgcccagctaact

SEQ ID NO: 374600 - DNA, 6610 bp, Homo sapiens
acctttaagcgtcacgtgactcccctcgggcttgtcccctcctctttcccctccccaggcccaggcgagcgctggtgtggacgggaagctcccggcccggcgaactaactggagcacggagctgcagccggttgggccggtgtactttcccgctctggaaaggaagagaaatggaagtgagaaagttgagcatttcctggcagttcttgatagttctggttctgatcctgcaaattctgtctgcgttggattttgacccatacagagtcctaggggtcagccgaacagccagtcaggctgatattaaaaaggcttataagaagctcgcccgggaatggcatcctgacaaaaacaaagatcctggagcagaagacaagttcattcaaatcagtaaggcttacgagattctttcaaatgaagaaaagagatcaaattatgatcaatatggagacgctggagagaaccagggctaccagaagcagcaacagcagcgagagtatcgcttccgccatttccatgaaaatttttattttgatgaatccttttttcacttcccttttaattctgaacggcgggactcaattgacgaaaagtatttattgcacttttcacattatgtgaatgaagtggttccagatagcttcaagaaaccctacctcatcaagatcacctccgattggtgctttagctgcattcatatcgagcctgtgtggaaagaagtcattcaagaactggaagaattgggtgtaggaattggcgtggtccatgctgggtatgagagacgcctggcccatcacctaggggcacacagcacgccctctatcctaggaatcattaacgggaaaatctccttcttccacaatgcagttgtccgtgaaaatctgcgacaatttgtagaaagtcttcttccagggaacttggtggagaaagttacaaataaaaattacgtcagattcctctctggctggcagcaagagaataagcctcatgtccttctgtttgaccaaacgcccattgtgccactgttatacaagttgactgcctttgcatacaaagattatttatcatttggatatgtatatgtgggtttgagagggacggaagagatgacaaggcggtacaacatcaatatctacgcccctaccctcttggtctttaaagaacatataaacaggcctgccgatgttatccaggcccgaggtatgaagaagcaaatcattgacgacttcatcacccgaaacaaatatctattggcagccaggctcaccagccagaagttgttccatgaactctgccctgtgaaacggtcgcatcgacagaggaagtactgtgtggttttattgactgctgagactaccaagttgagcaaaccctttgaggctttcctgtcctttgccctggcaaacactcaagacacagtgagatttgtgcatgtctacagcaatcggcagcaggagtttgccgacaccttactaccagacagtgaggcgtttcaagggaaatcagcggtgtctattttagaaaggcgcaacacagcaggaagggtggtgtataaaaccctggaagacccttggattgggagtgagagtgacaaatttatcctcttgggctatctcgaccagctgcgtaaagatccagctcttctgtcctctgaagcagtgcttcctgacctgaccgatgaacttgcccctgtttttctccttcgatggttctactctgcttctgactacatctcagactgctgggatagcatttttcacaacaactggagggaaatgatgcccctgctgtccctgatcttctctgccctcttcatcctcttcggcactgtcatcgttcaggctttcagcgactctaatgatgagcgagagtcaagccctccagaaaaagaggaagcccaagagaagactgggaaaactgagccaagcttcaccaaagaaaacagcagcaagattcctaaaaaaggctttgtggaggtaactgaactcacagatgtaacatacaccagtaacttggtacgtctgaggccaggccacatgaatgtggtcctcatcctgtcgaattctaccaagaccagcctactacagaaatttgctttggaggtctacacatttactgggagcagctgcctacacttctccttcctgagtctagataaacacagagaatggctagaatacttactagaatttgctcaagatgcagctccaatcccaaaccaatatgataagcatttcatggagcgtgactacactggttatgtactggctctgaatggccacaagaaatacttctgcctcttcaagccccaaaagacagtcgaagaggaggaagccatagggtcgtgcagtgatgttgactcttccctctacctgggtgaatctcgagggaaaccttcctgtggccttggatccaggcccatcaaaggaaagttgagcaagctctctttatggatggaacgcctgctggagggctccttacagaggttttatatcccatcatggcctgaactagactgagaggattttccaaagagatttgaactcttcagactttttaacatgcccctgtgaacaggtattttcaggactcaaactaccacaatgaacagagtatagattttagattgctcttctagaaccatggctagaagaatctttcctttgtcctgttctaacctaggaatgaaaaacaccaccagtttgaatcgcctagatgaaaatcttttcctctgggtgttatttttccccactgaatgccacaccattgaaaatagactgctcatcccctcttcctttcttgtccttgtcccatgctcaccccaccctcctgtcctgtgtcttggagaagcacagggctccaccctgcaagcggcatctggcggaccctcatgagcctgtcgtgcaggccaggtcattggccccttccccaatcccggccctgctgtgctgctgccatggcgcatgctcctaactctgaacaacccacggcagcttctagccccgcatctggaaaaaggcccctttccaagcaatctcacgtttactggttgttctgggagtaagtggctaaatgtatattttgggggtatcccccaacaacagtttgttggccacaggttgaaaaggaaaggaataaacgggagttctgcatgtgagttctcaagaaaaggaaagggaggctgagcagtggctgaagcgatgcagccttgagacacgctgtgagcatcccatccgccgccccagcgctgctggtagccaggggaggggtctgcacagcgagaagtactgtgatgactttgagccgttgacatgtatgtcttcagatgcctttctgcctctgtcgattttagggtatggatattaggagccataacttgtaatcttgttctctgaacgtagagataagctgctataaagccagtagatgttaaactgaagagaaattattcccacctgctatgagtcaggcttaaggaatctcttcaatagtgtctctttagtaaaataccaaacatgtctttgtatcaaggaacttaaaatttctcaacaattgtattttgaacactgttaccctaaaagtgctgtctcttcaagtcatcttttgcaggaagtgagccaagatttgttctagactcccattttgcaaaaggcttactttccacttctgggctgtattttgatgtctcatcttcattgttttcactcttaacttagagctgcttcaccagtattggggtcagactggccatcagcacctgagcgtgctgagctccaggtatagtggaccccagggtgcctcataccagccagttagagagcataccttttatttttcagggcagaatgaccagtggttctgagtttgagtttggacagcttcaaagagtggtccgttcaaatgtcaaagcaaggtgcctttggtggctttgtgaagggtgaaaatcagtgatgggacatttactaagtatttcttttttttttttttttttttagttgttgagacagagtttcactcttgttgcccaggctggagtgaaatggtgcgatctcggttcaccgcaacctccacatcccaggttcaagtgattctcctgcctcagcctcctgagtagctaggattacaggcatgtgccaccatgtaattagcccggctaattttgtatttttagtagagacgggatttctccatgttgatcaggctggtcatgaactcctgacctcaggtgatctgcctgcctcagcctcccaaagtgctgctgggattacaggcgtgagccaccactcccggctaagttagtatttctttaatcttaatgctttaaactaagccacttggatcctgaataatttaaatcttgagctacattggtaagtaataaattatttaaggccaggaattcctgtagttttcatggagtctgtagctttattaaaaaataaatcactgccaggcttcattcttccatatgatcctctaaaaatggacacttcctctgaatgctgtatctcatggcacctggtccaactagaaatggtcaaggaattcatttggctccttgatacatcagtcctcaatattactttctaggtattttatggccagattgcttatatgagtggtcttttggtttggtagtaggtttttatttttaatttctgtactaatgaaattcctgactttaatttctgaaaaccaaaaactctccaagtgtatttatttatattttttttaatagagacgaggtcttgctatgttgcccaggctggtcccaaactcctggcctcaagcagtccttccaccttggcctcccaaagtgctgggattatcaatatgagccaccatgccagatttgttcatttttaaacatttttatctcttcaagtcatcttttgatcttttaaaaagcaccttcaaacagctgcaccttccatttgcactaggaaatgaaggtagtgatgggattggcaatgttcctggcagatgtttcagcccaaaagctcttctacagaccggtttagagctggtgccctatgagaatattagggagcttttattttaaattgaactttacccttgtccatgcaaggcattcctcctgaatgcatccatgaatttgtttacttttgcgtcaaacatatgagccattgtcatgctcagcctgtgccaccattgctctgtctgatgtatgtaatcatacaagacctgattttggttctaacacagtggtctttgactatcaacattgatgtttttagagatgggttcttctggttgatacagactatgcattgcgtttagcagatggggtaaaactggcctaaaacaagtctttgcagaatacatgccaatttccaaaaaaaaaaaaaaatttgttgctcaggtgttgcacaatttttatctaacactgaggctatcagctccaactaaacaacatttcagtgggtgaggctgccctaacttccattaggggccatggtctcactgccatcacttattagccatgagaatttggttgtagttttcaggtaggttggtttcttcctcatttgcagcttgttgatacttgttcctttttatttattaacatcccaatcaatttgcagctgccatcattacataaatatttttctgttataaaaagaagtgtgatctgtttttttagtgatttcctttgtttgggaatagagattggaagcacatactcagacctgttttgttaactagaattctttaaaagctgatgccaaacatctttacagaggaactgtagttcacatccacctgtctgacattgtcccctaaaaacaagtgcagtgtggcagctgctgaatctgtctgttcagtttgtcaaggaggataattatgcttgggagagatctgaaaagaaggtgaatattttgcacttttgatactcttaggaacaaataacttatttggcaaattgtttcttttttatgttttgggtgttgtttttgttttttgactttttttgtattgtgaacaggcactgaagctgatgttattttaagattacagaatggaaaaagaaataaactattttaatgtctgataattatggggtagcccttgcattgcaagatgatgatttgattatggacacattatcaacagaattgaatttgcatggaactcaagacacgcttaagatcaccacagcataactgcagatttcaggaattacagtcatagagggtacatcaacttgaagagtagattgagtcttacaggaagtgagttacaataagtaacattaagagcccagctgccagcctgctgacctcaagtgatctgcccacctccgccccccaaagtgctgggattacaggcatgagccaccgtgtccagccttaggttttctagtttagaagacattttgtgtacccttctaggcctctgagcaagaagtttcttcattaggctctccgtgttactttatactttttacttacgttcacagtggtcctaaaaccaagatgcagccctaagcacctcataggagaagctgtattttttttttttttttttgagatggagtcttgctctggcacccaggctggagtgcagtggtgcgatctcagctcactgc

SEQ ID NO: 374601 - DNA, 6413 bp, Homo sapiens
acctttaagcgtcacgtgactcccctcgggcttgtcccctcctctttcccctccccaggcccaggcgagcgctggtgtggacgggaagctcccggcccggcgaactaactggagcacggagctgcagccggttgggccggtgtactttcccgctctggaaaggaagagaaatggaagtgagaaagttgagcatttcctggcagttcttgatagttctggttctgatcctgcaaattctgtctgcgttggattttgacccatacagagtcctaggggtcagccgaacagccagtcaggctgatattaaaaaggcttataagaagctcgcccgggaatggcatcctgacaaaaacaaagatcctggagcagaagacaagttcattcaaatcagtaaggcttacgagattctttcaaatgaagaaaagagatcaaattatgatcaatatggagacgctggagagaaccagggctaccagaagcagcaacagcagcgagagtatcgcttccgccatttccatgaaaatttttattttgatgaatccttttttcacttcccttttaattctgaacggcgggactcaattgacgaaaagtatttattgcacttttcacattatgtgaatgaagtggttccagatagcttcaagaaaccctacctcatcaagatcacctccgattggtgctttagctgcattcatatcgagcctgtgtggaaagaagtcattcaagaactggaagaattgggtgtaggaattggcgtggtccatgctgggtatgagagacgcctggcccatcacctaggggcacacagcacgccctctatcctaggaatcattaacgggaaaatctccttcttccacaatgcagttgtccgtgaaaatctgcgacaatttgtagaaagtcttcttccagggaacttggtggagaaagttacaaataaaaattacgtcagattcctctctggctggcagcaagagaataagcctcatgtccttctgtttgaccaaacgcccattgtgccactgttatacaagttgactgcctttgcatacaaagattatttatcatttggatatgtatatgtgggtttgagagggacggaagagatgacaaggcggtacaacatcaatatctacgcccctaccctcttggtctttaaagaacatataaacaggcctgccgatgttatccaggcccgaggtatgaagaagcaaatcattgacgacttcatcacccgaaacaaatatctattggcagccaggctcaccagccagaagttgttccatgaactctgccctgtgaaacggtcgcatcgacagaggaagtactgtgtggttttattgactgctgagactaccaagttgagcaaaccctttgaggctttcctgtcctttgccctggcaaacactcaagacacagtgagatttgtgcatgtctacagcaatcggcagcaggagtttgccgacaccttactaccagacagtgaggcgtttcaagggaaatcagcggtgtctattttagaaaggcgcaacacagcaggaagggtggtgtataaaaccctggaagacccttggattgggagtgagagtgacaaatttatcctcttgggctatctcgaccagctgcgtaaagatccagctcttctgtcctctgaagcagtgcttcctgacctgaccgatgaacttgcccctgtttttctccttcgatggttctactctgcttctgactacatctcagactgctgggatagcatttttcacaacaactggagggaaatgatgcccctgctgtccctgatcttctctgccctcttcatcctcttcggcactgtcatcgttcaggctttcagcgactctaatgatgagcgagagtcaagccctccagaaaaagaggaagcccaagagaagactgggaaaactgagccaagcttcaccaaagaaaacagcagcaagattcctaaaaaaggctttgtggaggtaactgaactcacagatgtaacatacaccagtaacttggtacgtctgaggccaggccacatgaatgtggtcctcatcctgtcgaattctaccaagaccagcctactacagaaatttgctttggaggtctacacatttactgggagcagctgcctacacttctccttcctgagtctagataaacacagagaatggctagaatacttactagaatttgctcaagatgcagctccaatcccaaaccaatatgataagcatttcatggagcgtgactacactggttatgtactggctctgaatggccacaagaaatacttctgcctcttcaagccccaaaagacagtcgaagaggaggaagccatagggtcgtgcagtgatgttgactcttccctctacctgggtgaatctcgagggaaaccttcctgtggccttggatccaggcccatcaaaggaaagttgagcaagctctctttatggatggaacgcctgctggagggctccttacagaggttttatatcccatcatggcctgaactagactgagaggattttccaaagagatttgaactcttcagactttttaacatgcccctgtgaacaggtattttcaggactcaaactaccacaatgaacagagtatagattttagattgctcttctagaaccatggctagaagaatctttcctttgtcctgttctaacctaggaatgaaaaacaccaccagtttgaatcgcctagatgaaaatcttttcctctgggtgttatttttccccactgaatgccacaccattgaaaatagactgctcatcccctcttcctttcttgtccttgtcccatgctcaccccaccctcctgtcctgtgtcttggagaagcacagggctccaccctgcaagcggcatctggcggaccctcatgagcctgtcgtgcaggccaggtcattggccccttccccaatcccggccctgctgtgctgctgccatggcgcatgctcctaactctgaacaacccacggcagcttctagccccgcatctggaaaaaggcccctttccaagcaatctcacgtttactggttgttctgggagtaagtggctaaatgtatattttgggggtatcccccaacaacagtttgttggccacaggttgaaaaggaaaggaataaacgggagttctgcatgtgagttctcaagaaaaggaaagggaggctgagcagtggctgaagcgatgcagccttgagacacgctgtgagcatcccatccgccgccccagcgctgctggtagccaggggaggggtctgcacagcgagaagtactgtgatgactttgagccgttgacatgtatgtcttcagatgcctttctgcctctgtcgattttagggtatggatattaggagccataacttgtaatcttgttctctgaacgtagagataagctgctataaagccagtagatgttaaactgaagagaaattattcccacctgctatgagtcaggcttaaggaatctcttcaatagtgtctctttagtaaaataccaaacatgtctttgtatcaaggaacttaaaatttctcaacaattgtattttgaacactgttaccctaaaagtgctgtctcttcaagtcatcttttgcaggaagtgagccaagatttgttctagactcccattttgcaaaaggcttactttccacttctgggctgtattttgatgtctcatcttcattgttttcactcttaacttagagctgcttcaccagtattggggtcagactggccatcagcacctgagcgtgctgagctccaggtatagtggaccccagggtgcctcataccagccagttagagagcataccttttatttttcagggcagaatgaccagtggttctgagtttgagtttggacagcttcaaagagtggtccgttcaaatgtcaaagcaaggtgcctttggtggctttgtgaagggtgaaaatcagtgatgggacatttactaagtatttcttttttttttttttttttttagttgttgagacagagtttcactcttgttgcccaggctggagtgaaatggtgcgatctcggttcaccgcaacctccacatcccaggttcaagtgattctcctgcctcagcctcctgagtagctaggattacaggcatgtgccaccatgtaattagcccggctaattttgtatttttagtagagacgggatttctccatgttgatcaggctggtcatgaactcctgacctcaggtgatctgcctgcctcagcctcccaaagtgctgctgggattacaggcgtgagccaccactcccggctaagttagtatttctttaatcttaatgctttaaactaagccacttggatcctgaataatttaaatcttgagctacattggtaagtaataaattatttaaggccaggaattcctgtagttttcatggagtctgtagctttattaaaaaataaatcactgccaggcttcattcttccatatgatcctctaaaaatggacacttcctctgaatgctgtatctcatggcacctggtccaactagaaatggtcaaggaattcatttggctccttgatacatcagtcctcaatattactttctaggtattttatggccagattgcttatatgagtggtcttttggtttggtagtaggtttttatttttaatttctgtactaatgaaattcctgactttaatttctgaaaaccaaaaactctccaagtgtatttatttatattttttttaatagagacgaggtcttgctatgttgcccaggctggtcccaaactcctggcctcaagcagtccttccaccttggcctcccaaagtgctgggattatcaatatgagccaccatgccagatttgttcatttttaaacatttttatctcttcaagtcatcttttgatcttttaaaaagcaccttcaaacagctgcaccttccatttgcactaggaaatgaaggtagtgatgggattggcaatgttcctggcagatgtttcagcccaaaagctcttctacagaccggtttagagctggtgccctatgagaatattagggagcttttattttaaattgaactttacccttgtccatgcaaggcattcctcctgaatgcatccatgaatttgtttacttttgcgtcaaacatatgagccattgtcatgctcagcctgtgccaccattgctctgtctgatgtatgtaatcatacaagacctgattttggttctaacacagtggtctttgactatcaacattgatgtttttagagatgggttcttctggttgatacagactatgcattgcgtttagcagatggggtaaaactggcctaaaacaagtctttgcagaatacatgccaatttccaaaaaaaaaaaaaaatttgttgctcaggtgttgcacaatttttatctaacactgaggctatcagctccaactaaacaacatttcagtgggtgaggctgccctaacttccattaggggccatggtctcactgccatcacttattagccatgagaatttggttgtagttttcaggtaggttggtttcttcctcatttgcagcttgttgatacttgttcctttttatttattaacatcccaatcaatttgcagctgccatcattacataaatatttttctgttataaaaagaagtgtgatctgtttttttagtgatttcctttgtttgggaatagagattggaagcacatactcagacctgttttgttaactagaattctttaaaagctgatgccaaacatctttacagaggaactgtagttcacatccacctgtctgacattgtcccctaaaaacaagtgcagtgtggcagctgctgaatctgtctgttcagtttgtcaaggaggataattatgcttgggagagatctgaaaagaaggtgaatattttgcacttttgatactcttaggaacaaataacttatttggcaaattgtttcttttttatgttttgggtgttgtttttgttttttgactttttttgtattgtgaacaggcactgaagctgatgttattttaagattacagaatggaaaaagaaataaactattttaatgtctgataattatggggtagcccttgcattgcaagatgatgatttgattatggacacattatcaacagaattgaatttgcatggaactcaagacacgcttaagatcaccacagcataactgcagatttcaggaattacagtcatagagggcctctgagcaagaagtttcttcattaggctctccgtgttactttatactttttacttacgttcacagtggtcctaaaaccaagatgcagccctaagcacctcataggagaagctgtattttttttttttttttttgagatggagtcttgctctggcacccaggctggagtgcagtggtgcgatctcagctcactgc

SEQ ID NO: 374602 - DNA, 5639 bp, Homo sapiens
acctttaagcgtcacgtgactcccctcgggcttgtcccctcctctttcccctccccaggcccaggcgagcgctggtgtggacgggaagctcccggcccggcgaactaactggagcacggagctgcagccggttgggccggtgtactttcccgctctggaaaggaagagaaatggaagtgagaaagttgagcatttcctggcagttcttgatagttctggttctgatcctgcaaattctgtctgcgttggattttgacccatacagagtcctaggggtcagccgaacagccagtcaggctgatattaaaaaggcttataagaagctcgcccgggaatggcatcctgacaaaaacaaagatcctggagcagaagacaagttcattcaaatcagtaaggcttacgagattctttcaaatgaagaaaagagatcaaattatgatcaatatggagacgctggagagaaccagggctaccagaagcagcaacagcagcgagagtatcgcttccgccatttccatgaaaatttttattttgatgaatccttttttcacttcccttttaattctgaacggcgggactcaattgacgaaaagtatttattgcacttttcacattatgtgaatgaagtggttccagatagcttcaagaaaccctacctcatcaagatcacctccgattggtgctttagctgcattcatatcgagcctgtgtggaaagaagtcattcaagaactggaagaattgggtgtaggaattggcgtggtccatgctgggtatgagagacgcctggcccatcacctaggggcacacagcacgccctctatcctaggaatcattaacgggaaaatctccttcttccacaatgcagttgtccgtgaaaatctgcgacaatttgtagaaagtcttcttccagggaacttggtggagaaagttacaaataaaaattacgtcagattcctctctggctggcagcaagagaataagcctcatgtccttctgtttgaccaaacgcccattgtgccactgttatacaagttgactgcctttgcatacaaagattatttatcatttggatatgtatatgtgggtttgagagggacggaagagatgacaaggcggtacaacatcaatatctacgcccctaccctcttggtctttaaagaacatataaacaggcctgccgatgttatccaggcccgaggtatgaagaagcaaatcattgacgacttcatcacccgaaacaaatatctattggcagccaggctcaccagccagaagttgttccatgaactctgccctgtgaaacggtcgcatcgacagaggaagtactgtgtggttttattgactgctgagactaccaagttgagcaaaccctttgaggctttcctgtcctttgccctggcaaacactcaagacacagtgagatttgtgcatgtctacagcaatcggcagcaggagtttgccgacaccttactaccagacagtgaggcgtttcaagggaaatcagcggtgtctattttagaaaggcgcaacacagcaggaagggtggtgtataaaaccctggaagacccttggattgggagtgagagtgacaaatttatcctcttgggctatctcgaccagctgcgtaaagatccagctcttctgtcctctgaagcagtgcttcctgacctgaccgatgaacttgcccctgtttttctccttcgatggttctactctgcttctgactacatctcagactgctgggatagcatttttcacaacaactggagggaaatgatgcccctgctgtccctgatcttctctgccctcttcatcctcttcggcactgtcatcgttcaggctttcagcgactctaatgatgagcgagagtcaagccctccagaaaaagaggaagcccaagagaagactgggaaaactgagccaagcttcaccaaagaaaacagcagcaagattcctaaaaaaggctttgtggaggtaactgaactcacagatgtaacatacaccagtaacttggtacgtctgaggccaggccacatgaatgtggtcctcatcctgtcgaattctaccaagaccagcctactacagaaatttgctttggaggtctacacatttactgggagcagctgcctacacttctccttcctgagtctagataaacacagagaatggctagaatacttactagaatttgctcaagatgcagctccaatcccaaaccaatatgataagcatttcatggagcgtgactacactggttatgtactggctctgaatggccacaagaaatacttctgcctcttcaagccccaaaagacagtcgaagaggaggaagccatagggtcgtgcagtgatgttgactcttccctctacctgggtgaatctcgagggaaaccttcctgtggccttggatccaggcccatcaaaggaaagttgagcaagctctctttatggatggaacgcctgctggagggctccttacagaggttttatatcccatcatggcctgaactagactgagaggattttccaaagagatttgaactcttcagactttttaacatgcccctgtgaacaggtattttcaggactcaaactaccacaatgaacagagtatagattttagattgctcttctagaaccatggctagaagaatctttcctttgtcctgttctaacctaggaatgaaaaacaccaccagtttgaatcgcctagatgaaaatcttttcctctgggtgttatttttccccactgaatgccacaccattgaaaatagactgctcatcccctcttcctttcttgtccttgtcccatgctcaccccaccctcctgtcctgtgtcttggagaagcacagggctccaccctgcaagcggcatctggcggaccctcatgagcctgtcgtgcaggccaggtcattggccccttccccaatcccggccctgctgtgctgctgccatggcgcatgctcctaactctgaacaacccacggcagcttctagccccgcatctggaaaaaggcccctttccaagcaatctcacgtttactggttgttctgggagtaagtggctaaatgtatattttgggggtatcccccaacaacagtttgttggccacaggttgaaaaggaaaggaataaacgggagttctgcatgtgagttctcaagaaaaggaaagggaggctgagcagtggctgaagcgatgcagccttgagacacgctgtgagcatcccatccgccgccccagcgctgctggtagccaggggaggggtctgcacagcgagaagtactgtgatgactttgagccgttgacatgtatgtcttcagatgcctttctgcctctgtcgattttagggtatggatattaggagccataacttgtaatcttgttctctgaacgtagagataagctgctataaagccagtagatgttaaactgaagagaaattattcccacctgctatgagtcaggcttaaggaatctcttcaatagtgtctctttagtaaaataccaaacatgtctttgtatcaaggaacttaaaatttctcaacaattgtattttgaacactgttaccctaaaagtgctgtctcttcaagtcatcttttgcaggaagtgagccaagatttgttctagactcccattttgcaaaaggcttactttccacttctgggctgtattttgatgtctcatcttcattgttttcactcttaacttagagctgcttcaccagtattggggtcagactggccatcagcacctgagcgtgctgagctccaggtatagtggaccccagggtgcctcataccagccagttagagagcataccttttatttttcagggcagaatgaccagtggttctgagtttgagtttggacagcttcaaagagtggtccgttcaaatgtcaaagcaaggtgcctttggtggctttgtgaagggtgaaaatcagtgatgggacatttactaagtatttcttttttttttttttttttttagttgttgagacagagtttcactcttgttgcccaggctggagtgaaatggtgcgatctcggttcaccgcaacctccacatcccaggttcaagtgattctcctgcctcagcctcctgagtagctaggattacaggcatgtgccaccatgtaattagcccggctaattttgtatttttagtagagacgggatttctccatgttgatcaggctggtcatgaactcctgacctcaggtgatctgcctgcctcagcctcccaaagtgctgctgggattacaggcgtgagccaccactcccggctaagttagtatttctttaatcttaatgctttaaactaagccacttggatcctgaataatttaaatcttgagctacattggtaagtaataaattatttaaggccaggaattcctgtagttttcatggagtctgtagctttattaaaaaataaatcactgccaggcttcattcttccatatgatcctctaaaaatggacacttcctctgaatgctgtatctcatggcacctggtccaactagaaatggtcaaggaattcatttggctccttgatacatcagtcctcaatattactttctaggtattttatggccagattgcttatatgagtggtcttttggtttggtagtaggtttttatttttaatttctgtactaatgaaattcctgactttaatttctgaaaaccaaaaactctccaagtgtatttatttatattttttttaatagagacgaggtcttgctatgttgcccaggctggtcccaaactcctggcctcaagcagtccttccaccttggcctcccaaagtgctgggattatcaatatgagccaccatgccagatttgttcatttttaaacatttttatctcttcaagtcatcttttgatcttttaaaaagcaccttcaaacagctgcaccttccatttgcactaggaaatgaaggtagtgatgggattggcaatgttcctggcagatgtttcagcccaaaagctcttctacagaccggtttagagctggtgccctatgagaatattagggagcttttattttaaattgaactttacccttgtccatgcaaggcattcctcctgaatgcatccatgaatttgtttacttttgcgtcaaacatatgagccattgtcatgctcagcctgtgccaccattgctctgtctgatgtatgtaatcatacaagacctgattttggttctaacacagtggtctttgactatcaacattgatgtttttagagatgggttcttctggttgatacagactatgcattgcgtttagcagatggggtaaaactggcctaaaacaagtctttgcagaatacatgccaatttccaaaaaaaaaaaaaaatttgttgctcaggtgttgcacaatttttatctaacactgaggctatcagctccaactaaacaacatttcagtgggtgaggctgccctaacttccattaggggccatggtctcactgccatcacttattagccatgagaatttggttgtagttttcaggtaggttggtttcttcctcatttgcagcttgttgatacttgttcctttttatttattaacatcccaatcaatttgcagctgccatcattacataaatatttttctgttata

SEQ ID NO: 374603 - DNA, 6592 bp, Homo sapiens
acctttaagcgtcacgtgactcccctcgggcttgtcccctcctctttcccctccccaggcccaggcgagcgctggtgtggacgggaagctcccggcccggcgaactaactggagcacggagctgcagccggttgggccggtgtactttcccgctctggaaaggaagagaaatggaagtgagaaagttgagcatttcctggcagttcttgatagttctggttctgatcctgcaaattctgtctgcgttggattttgacccatacagagtcctaggggtcagccgaacagccagtcaggctgatattaaaaaggcttataagaagctcgcccgggaatggcatcctgacaaaaacaaagatcctggagcagaagacaagttcattcaaatcagtaaggcttacgagattctttcaaatgaagaaaagagatcaaattatgatcaatatggagacgctggagagaaccagggctaccagaagcagcaacagcagcgagagtatcgcttccgccatttccatgaaaatttttattttgatgaatccttttttcacttcccttttaattctgaacggcgggactcaattgacgaaaagtatttattgcacttttcacattatgtgaatgaagtggttccagatagcttcaagaaaccctacctcatcaagatcacctccgattggtgctttagctgcattcatatcgagcctgtgtggaaagaagtcattcaagaactggaagaattgggtgtaggaattggcgtggtccatgctgggtatgagagacgcctggcccatcacctaggggcacacagcacgccctctatcctaggaatcattaacgggaaaatctccttcttccacaatgcagttgtccgtgaaaatctgcgacaatttgtagaaagtcttcttccagggaacttggtggagaaagttacaaataaaaattacgtcagattcctctctggctggcagcaagagaataagcctcatgtccttctgtttgaccaaacgcccattgtgccactgttatacaagttgactgcctttgcatacaaagattatttatcatttggatatgtatatgtgggtttgagagggacggaagagatgacaaggcggtacaacatcaatatctacgcccctaccctcttggtctttaaagaacatataaacaggcctgccgatgttatccaggcccgaggtatgaagaagcaaatcattgacgacttcatcacccgaaacaaatatctattggcagccaggctcaccagccagaagttgttccatgaactctgccctgtgaaacggtcgcatcgacagaggaagtactgtgtggttttattgactgctgagactaccaagttgagcaaaccctttgaggctttcctgtcctttgccctggcaaacactcaagacacagtgagatttgtgcatgtctacagcaatcggcagcaggagtttgccgacaccttactaccagacagtgaggcgtttcaagggaaatcagcggtgtctattttagaaaggcgcaacacagcaggaagggtggtgtataaaaccctggaagacccttggattgggagtgagagtgacaaatttatcctcttgggctatctcgaccagctgcgtaaagatccagctcttctgtcctctgaagcagtgcttcctgacctgaccgatgaacttgcccctgtttttctccttcgatggttctactctgcttctgactacatctcagactgctgggatagcatttttcacaacaactggagggaaatgatgcccctgctgtccctgatcttctctgccctcttcatcctcttcggcactgtcatcgttcaggctttcagcgactctaatgatgagcgagagtcaagccctccagaaaaagaggaagcccaagagaagactgggaaaactgagccaagcttcaccaaagaaaacagcaggtttctctaacaaaacaccagactcacctccccggcacctgccccccagatcctgtcatctgataacgcagcattggaacatagagtgtagagaagaactctcatgcacctcctcccatcaagattcctaaaaaaggctttgtggaggtaactgaactcacagatgtaacatacaccagtaacttggtacgtctgaggccaggccacatgaatgtggtcctcatcctgtcgaattctaccaagaccagcctactacagaaatttgctttggaggtctacacatttactgggagcagctgcctacacttctccttcctgagtctagataaacacagagaatggctagaatacttactagaatttgctcaagatgcagctccaatcccaaaccaatatgataagcatttcatggagcgtgactacactggttatgtactggctctgaatggccacaagaaatacttctgcctcttcaagccccaaaagacagtcgaagaggaggaagccatagggtcgtgcagtgatgttgactcttccctctacctgggtgaatctcgagggaaaccttcctgtggccttggatccaggcccatcaaaggaaagttgagcaagctctctttatggatggaacgcctgctggagggctccttacagaggttttatatcccatcatggcctgaactagactgagaggattttccaaagagatttgaactcttcagactttttaacatgcccctgtgaacaggtattttcaggactcaaactaccacaatgaacagagtatagattttagattgctcttctagaaccatggctagaagaatctttcctttgtcctgttctaacctaggaatgaaaaacaccaccagtttgaatcgcctagatgaaaatcttttcctctgggtgttatttttccccactgaatgccacaccattgaaaatagactgctcatcccctcttcctttcttgtccttgtcccatgctcaccccaccctcctgtcctgtgtcttggagaagcacagggctccaccctgcaagcggcatctggcggaccctcatgagcctgtcgtgcaggccaggtcattggccccttccccaatcccggccctgctgtgctgctgccatggcgcatgctcctaactctgaacaacccacggcagcttctagccccgcatctggaaaaaggcccctttccaagcaatctcacgtttactggttgttctgggagtaagtggctaaatgtatattttgggggtatcccccaacaacagtttgttggccacaggttgaaaaggaaaggaataaacgggagttctgcatgtgagttctcaagaaaaggaaagggaggctgagcagtggctgaagcgatgcagccttgagacacgctgtgagcatcccatccgccgccccagcgctgctggtagccaggggaggggtctgcacagcgagaagtactgtgatgactttgagccgttgacatgtatgtcttcagatgcctttctgcctctgtcgattttagggtatggatattaggagccataacttgtaatcttgttctctgaacgtagagataagctgctataaagccagtagatgttaaactgaagagaaattattcccacctgctatgagtcaggcttaaggaatctcttcaatagtgtctctttagtaaaataccaaacatgtctttgtatcaaggaacttaaaatttctcaacaattgtattttgaacactgttaccctaaaagtgctgtctcttcaagtcatcttttgcaggaagtgagccaagatttgttctagactcccattttgcaaaaggcttactttccacttctgggctgtattttgatgtctcatcttcattgttttcactcttaacttagagctgcttcaccagtattggggtcagactggccatcagcacctgagcgtgctgagctccaggtatagtggaccccagggtgcctcataccagccagttagagagcataccttttatttttcagggcagaatgaccagtggttctgagtttgagtttggacagcttcaaagagtggtccgttcaaatgtcaaagcaaggtgcctttggtggctttgtgaagggtgaaaatcagtgatgggacatttactaagtatttcttttttttttttttttttttagttgttgagacagagtttcactcttgttgcccaggctggagtgaaatggtgcgatctcggttcaccgcaacctccacatcccaggttcaagtgattctcctgcctcagcctcctgagtagctaggattacaggcatgtgccaccatgtaattagcccggctaattttgtatttttagtagagacgggatttctccatgttgatcaggctggtcatgaactcctgacctcaggtgatctgcctgcctcagcctcccaaagtgctgctgggattacaggcgtgagccaccactcccggctaagttagtatttctttaatcttaatgctttaaactaagccacttggatcctgaataatttaaatcttgagctacattggtaagtaataaattatttaaggccaggaattcctgtagttttcatggagtctgtagctttattaaaaaataaatcactgccaggcttcattcttccatatgatcctctaaaaatggacacttcctctgaatgctgtatctcatggcacctggtccaactagaaatggtcaaggaattcatttggctccttgatacatcagtcctcaatattactttctaggtattttatggccagattgcttatatgagtggtcttttggtttggtagtaggtttttatttttaatttctgtactaatgaaattcctgactttaatttctgaaaaccaaaaactctccaagtgtatttatttatattttttttaatagagacgaggtcttgctatgttgcccaggctggtcccaaactcctggcctcaagcagtccttccaccttggcctcccaaagtgctgggattatcaatatgagccaccatgccagatttgttcatttttaaacatttttatctcttcaagtcatcttttgatcttttaaaaagcaccttcaaacagctgcaccttccatttgcactaggaaatgaaggtagtgatgggattggcaatgttcctggcagatgtttcagcccaaaagctcttctacagaccggtttagagctggtgccctatgagaatattagggagcttttattttaaattgaactttacccttgtccatgcaaggcattcctcctgaatgcatccatgaatttgtttacttttgcgtcaaacatatgagccattgtcatgctcagcctgtgccaccattgctctgtctgatgtatgtaatcatacaagacctgattttggttctaacacagtggtctttgactatcaacattgatgtttttagagatgggttcttctggttgatacagactatgcattgcgtttagcagatggggtaaaactggcctaaaacaagtctttgcagaatacatgccaatttccaaaaaaaaaaaaaaatttgttgctcaggtgttgcacaatttttatctaacactgaggctatcagctccaactaaacaacatttcagtgggtgaggctgccctaacttccattaggggccatggtctcactgccatcacttattagccatgagaatttggttgtagttttcaggtaggttggtttcttcctcatttgcagcttgttgatacttgttcctttttatttattaacatcccaatcaatttgcagctgccatcattacataaatatttttctgttataaaaagaagtgtgatctgtttttttagtgatttcctttgtttgggaatagagattggaagcacatactcagacctgttttgttaactagaattctttaaaagctgatgccaaacatctttacagaggaactgtagttcacatccacctgtctgacattgtcccctaaaaacaagtgcagtgtggcagctgctgaatctgtctgttcagtttgtcaaggaggataattatgcttgggagagatctgaaaagaaggtgaatattttgcacttttgatactcttaggaacaaataacttatttggcaaattgtttcttttttatgttttgggtgttgtttttgttttttgactttttttgtattgtgaacaggcactgaagctgatgttattttaagattacagaatggaaaaagaaataaactattttaatgtctgataattatggggtagcccttgcattgcaagatgatgatttgattatggacacattatcaacagaattgaatttgcatggaactcaagacacgcttaagatcaccacagcataactgcagatttcaggaattacagtcatagagggtacatcaacttgaagagtagattgagtcttacaggaagtgagttacaataagtaacattaagagcccagctgccagcctggccaacatggtgaaaccccgtctccactaaaaatacaaaaattagccgggcgtggtgacgcatgaccgtaattccagctactcaggaggctgaggcagcagaattgcttgaacccaggaggcggagattgcagtgagctaagatcgggccactgcactccagcctgggggacagag

SEQ ID NO: 374604 - DNA, 5331 bp, Homo sapiens
attcttccatgtttacaccttaagtcctttattatcccttttattgtttcctcatgcagaacttattgagcatagcctattatactgagatacaaaatcaaacttttagaataagctgtctgtgaattagaacactgagcaatctctaccttcccctccaccacctccacccgccaagaaaagctctgtttgcctgaaattagtaagcgtttattggtgtgaagagtttttggtttgggatttttattttatctttttttagctggagagaagaaattttaacttgagctaatagtttgttaatttggttttaggagggaaatgatgcccctgctgtccctgatcttctctgccctcttcatcctcttcggcactgtcatcgttcaggctttcaggtaaatgtcctgtggcttctcggtgcaccaccatggttggtgttgacactttttttgtaaaactccttttttcttactttagcgactctaatgatgagcgagagtcaagccctccagaaaaagaggaagcccaagagaagactgggaaaactgagccaagcttcaccaaagaaaacagcaggtttctctaacaaaacaccagactcacctccccggcacctgccccccagatcctgtcatctgataacgcagcattggaacatagagtgtagagaagaactctcatgcacctcctcccatgtaaactgtggctacagggaaaagtcactgtgatttgtgtttactaagaccctgtaggtgtttagatgccttagatttcataatgaaggcagaaggaaagaagcctatcagcaagattcctaaaaaaggctttgtggaggtaactgaactcacagatgtaacatacaccagtaacttggtacgtctgaggccaggccacatgaatgtggtcctcatcctgtcgaattctaccaagaccagcctactacagaaatttgctttggaggtctacacatttactgggagcagctgcctacacttctccttcctgagtctagataaacacagagaatggctagaatacttactagaatttgctcaagatgcagctccaatcccaaaccaatatgataagcatttcatggagcgtgactacactggttatgtactggctctgaatggccacaagaaatacttctgcctcttcaagccccaaaagacagtcgaagaggaggaagccatagggtcgtgcagtgatgttgactcttccctctacctgggtgaatctcgagggaaaccttcctgtggccttggatccaggcccatcaaaggaaagttgagcaagctctctttatggatggaacgcctgctggagggctccttacagaggttttatatcccatcatggcctgaactagactgagaggattttccaaagagatttgaactcttcagactttttaacatgcccctgtgaacaggtattttcaggactcaaactaccacaatgaacagagtatagattttagattgctcttctagaaccatggctagaagaatctttcctttgtcctgttctaacctaggaatgaaaaacaccaccagtttgaatcgcctagatgaaaatcttttcctctgggtgttatttttccccactgaatgccacaccattgaaaatagactgctcatcccctcttcctttcttgtccttgtcccatgctcaccccaccctcctgtcctgtgtcttggagaagcacagggctccaccctgcaagcggcatctggcggaccctcatgagcctgtcgtgcaggccaggtcattggccccttccccaatcccggccctgctgtgctgctgccatggcgcatgctcctaactctgaacaacccacggcagcttctagccccgcatctggaaaaaggcccctttccaagcaatctcacgtttactggttgttctgggagtaagtggctaaatgtatattttgggggtatcccccaacaacagtttgttggccacaggttgaaaaggaaaggaataaacgggagttctgcatgtgagttctcaagaaaaggaaagggaggctgagcagtggctgaagcgatgcagccttgagacacgctgtgagcatcccatccgccgccccagcgctgctggtagccaggggaggggtctgcacagcgagaagtactgtgatgactttgagccgttgacatgtatgtcttcagatgcctttctgcctctgtcgattttagggtatggatattaggagccataacttgtaatcttgttctctgaacgtagagataagctgctataaagccagtagatgttaaactgaagagaaattattcccacctgctatgagtcaggcttaaggaatctcttcaatagtgtctctttagtaaaataccaaacatgtctttgtatcaaggaacttaaaatttctcaacaattgtattttgaacactgttaccctaaaagtgctgtctcttcaagtcatcttttgcaggaagtgagccaagatttgttctagactcccattttgcaaaaggcttactttccacttctgggctgtattttgatgtctcatcttcattgttttcactcttaacttagagctgcttcaccagtattggggtcagactggccatcagcacctgagcgtgctgagctccaggtatagtggaccccagggtgcctcataccagccagttagagagcataccttttatttttcagggcagaatgaccagtggttctgagtttgagtttggacagcttcaaagagtggtccgttcaaatgtcaaagcaaggtgcctttggtggctttgtgaagggtgaaaatcagtgatgggacatttactaagtatttcttttttttttttttttttttagttgttgagacagagtttcactcttgttgcccaggctggagtgaaatggtgcgatctcggttcaccgcaacctccacatcccaggttcaagtgattctcctgcctcagcctcctgagtagctaggattacaggcatgtgccaccatgtaattagcccggctaattttgtatttttagtagagacgggatttctccatgttgatcaggctggtcatgaactcctgacctcaggtgatctgcctgcctcagcctcccaaagtgctgctgggattacaggcgtgagccaccactcccggctaagttagtatttctttaatcttaatgctttaaactaagccacttggatcctgaataatttaaatcttgagctacattggtaagtaataaattatttaaggccaggaattcctgtagttttcatggagtctgtagctttattaaaaaataaatcactgccaggcttcattcttccatatgatcctctaaaaatggacacttcctctgaatgctgtatctcatggcacctggtccaactagaaatggtcaaggaattcatttggctccttgatacatcagtcctcaatattactttctaggtattttatggccagattgcttatatgagtggtcttttggtttggtagtaggtttttatttttaatttctgtactaatgaaattcctgactttaatttctgaaaaccaaaaactctccaagtgtatttatttatattttttttaatagagacgaggtcttgctatgttgcccaggctggtcccaaactcctggcctcaagcagtccttccaccttggcctcccaaagtgctgggattatcaatatgagccaccatgccagatttgttcatttttaaacatttttatctcttcaagtcatcttttgatcttttaaaaagcaccttcaaacagctgcaccttccatttgcactaggaaatgaaggtagtgatgggattggcaatgttcctggcagatgtttcagcccaaaagctcttctacagaccggtttagagctggtgccctatgagaatattagggagcttttattttaaattgaactttacccttgtccatgcaaggcattcctcctgaatgcatccatgaatttgtttacttttgcgtcaaacatatgagccattgtcatgctcagcctgtgccaccattgctctgtctgatgtatgtaatcatacaagacctgattttggttctaacacagtggtctttgactatcaacattgatgtttttagagatgggttcttctggttgatacagactatgcattgcgtttagcagatggggtaaaactggcctaaaacaagtctttgcagaatacatgccaatttccaaaaaaaaaaaaaaatttgttgctcaggtgttgcacaatttttatctaacactgaggctatcagctccaactaaacaacatttcagtgggtgaggctgccctaacttccattaggggccatggtctcactgccatcacttattagccatgagaatttggttgtagttttcaggtaggttggtttcttcctcatttgcagcttgttgatacttgttcctttttatttattaacatcccaatcaatttgcagctgccatcattacataaatatttttctgttataaaaagaagtgtgatctgtttttttagtgatttcctttgtttgggaatagagattggaagcacatactcagacctgttttgttaactagaattctttaaaagctgatgccaaacatctttacagaggaactgtagttcacatccacctgtctgacattgtcccctaaaaacaagtgcagtgtggcagctgctgaatctgtctgttcagtttgtcaaggaggataattatgcttgggagagatctgaaaagaaggtgaatattttgcacttttgatactcttaggaacaaataacttatttggcaaattgtttcttttttatgttttgggtgttgtttttgttttttgactttttttgtattgtgaacaggcactgaagctgatgttattttaagattacagaatggaaaaagaaataaactattttaatgtctgataattatggggtagcccttgcattgcaagatgatgatttgattatggacacattatcaacagaattgaatttgcatggaactcaagacacgcttaagatcaccacagcataactgcagatttcaggaattacagtcatagagggtacatcaacttgaagagtagattgagtcttacaggaagtgagttacaataagtaacattaagagcccagctgccagcctggccaacatggtgaaaccccgtctccactaaaaatacaaaaattagccgggcgtggtgacgcatgaccgtaattccagctactcaggaggctgaggcagcagaattgcttgaacccaggaggcggagattgcagtgagctaagatcgggccactgcactccagcctgggggacagag

SEQ ID NO: 374605 - DNA, 4578 bp, Homo sapiens
acggctttccccctatcctgacagcatcttaactcctcaatatttctccacagcaagattcctaaaaaaggctttgtggaggtaactgaactcacagatgtaacatacaccagtaacttggtacgtctgaggccaggccacatgaatgtggtcctcatcctgtcgaattctaccaagaccagcctactacagaaatttgctttggaggtctacacatttactgggagcagctgcctacacttctccttcctgagtctagataaacacagagaatggctagaatacttactagaatttgctcaagatgcagctccaatcccaaaccaatatgataagcatttcatggagcgtgactacactggttatgtactggctctgaatggccacaagaaatacttctgcctcttcaagccccaaaagacagtcgaagaggaggaagccatagggtcgtgcagtgatgttgactcttccctctacctgggtgaatctcgagggaaaccttcctgtggccttggatccaggcccatcaaaggaaagttgagcaagctctctttatggatggaacgcctgctggagggctccttacagaggttttatatcccatcatggcctgaactagactgagaggattttccaaagagatttgaactcttcagactttttaacatgcccctgtgaacaggtattttcaggactcaaactaccacaatgaacagagtatagattttagattgctcttctagaaccatggctagaagaatctttcctttgtcctgttctaacctaggaatgaaaaacaccaccagtttgaatcgcctagatgaaaatcttttcctctgggtgttatttttccccactgaatgccacaccattgaaaatagactgctcatcccctcttcctttcttgtccttgtcccatgctcaccccaccctcctgtcctgtgtcttggagaagcacagggctccaccctgcaagcggcatctggcggaccctcatgagcctgtcgtgcaggccaggtcattggccccttccccaatcccggccctgctgtgctgctgccatggcgcatgctcctaactctgaacaacccacggcagcttctagccccgcatctggaaaaaggcccctttccaagcaatctcacgtttactggttgttctgggagtaagtggctaaatgtatattttgggggtatcccccaacaacagtttgttggccacaggttgaaaaggaaaggaataaacgggagttctgcatgtgagttctcaagaaaaggaaagggaggctgagcagtggctgaagcgatgcagccttgagacacgctgtgagcatcccatccgccgccccagcgctgctggtagccaggggaggggtctgcacagcgagaagtactgtgatgactttgagccgttgacatgtatgtcttcagatgcctttctgcctctgtcgattttagggtatggatattaggagccataacttgtaatcttgttctctgaacgtagagataagctgctataaagccagtagatgttaaactgaagagaaattattcccacctgctatgagtcaggcttaaggaatctcttcaatagtgtctctttagtaaaataccaaacatgtctttgtatcaaggaacttaaaatttctcaacaattgtattttgaacactgttaccctaaaagtgctgtctcttcaagtcatcttttgcaggaagtgagccaagatttgttctagactcccattttgcaaaaggcttactttccacttctgggctgtattttgatgtctcatcttcattgttttcactcttaacttagagctgcttcaccagtattggggtcagactggccatcagcacctgagcgtgctgagctccaggtatagtggaccccagggtgcctcataccagccagttagagagcataccttttatttttcagggcagaatgaccagtggttctgagtttgagtttggacagcttcaaagagtggtccgttcaaatgtcaaagcaaggtgcctttggtggctttgtgaagggtgaaaatcagtgatgggacatttactaagtatttcttttttttttttttttttttagttgttgagacagagtttcactcttgttgcccaggctggagtgaaatggtgcgatctcggttcaccgcaacctccacatcccaggttcaagtgattctcctgcctcagcctcctgagtagctaggattacaggcatgtgccaccatgtaattagcccggctaattttgtatttttagtagagacgggatttctccatgttgatcaggctggtcatgaactcctgacctcaggtgatctgcctgcctcagcctcccaaagtgctgctgggattacaggcgtgagccaccactcccggctaagttagtatttctttaatcttaatgctttaaactaagccacttggatcctgaataatttaaatcttgagctacattggtaagtaataaattatttaaggccaggaattcctgtagttttcatggagtctgtagctttattaaaaaataaatcactgccaggcttcattcttccatatgatcctctaaaaatggacacttcctctgaatgctgtatctcatggcacctggtccaactagaaatggtcaaggaattcatttggctccttgatacatcagtcctcaatattactttctaggtattttatggccagattgcttatatgagtggtcttttggtttggtagtaggtttttatttttaatttctgtactaatgaaattcctgactttaatttctgaaaaccaaaaactctccaagtgtatttatttatattttttttaatagagacgaggtcttgctatgttgcccaggctggtcccaaactcctggcctcaagcagtccttccaccttggcctcccaaagtgctgggattatcaatatgagccaccatgccagatttgttcatttttaaacatttttatctcttcaagtcatcttttgatcttttaaaaagcaccttcaaacagctgcaccttccatttgcactaggaaatgaaggtagtgatgggattggcaatgttcctggcagatgtttcagcccaaaagctcttctacagaccggtttagagctggtgccctatgagaatattagggagcttttattttaaattgaactttacccttgtccatgcaaggcattcctcctgaatgcatccatgaatttgtttacttttgcgtcaaacatatgagccattgtcatgctcagcctgtgccaccattgctctgtctgatgtatgtaatcatacaagacctgattttggttctaacacagtggtctttgactatcaacattgatgtttttagagatgggttcttctggttgatacagactatgcattgcgtttagcagatggggtaaaactggcctaaaacaagtctttgcagaatacatgccaatttccaaaaaaaaaaaaaaatttgttgctcaggtgttgcacaatttttatctaacactgaggctatcagctccaactaaacaacatttcagtgggtgaggctgccctaacttccattaggggccatggtctcactgccatcacttattagccatgagaatttggttgtagttttcaggtaggttggtttcttcctcatttgcagcttgttgatacttgttcctttttatttattaacatcccaatcaatttgcagctgccatcattacataaatatttttctgttataaaaagaagtgtgatctgtttttttagtgatttcctttgtttgggaatagagattggaagcacatactcagacctgttttgttaactagaattctttaaaagctgatgccaaacatctttacagaggaactgtagttcacatccacctgtctgacattgtcccctaaaaacaagtgcagtgtggcagctgctgaatctgtctgttcagtttgtcaaggaggataattatgcttgggagagatctgaaaagaaggtgaatattttgcacttttgatactcttaggaacaaataacttatttggcaaattgtttcttttttatgttttgggtgttgtttttgttttttgactttttttgtattgtgaacaggcactgaagctgatgttattttaagattacagaatggaaaaagaaataaactattttaatgtctgataattatggggtagcccttgcattgcaagatgatgatttgattatggacacattatcaacagaattgaatttgcatggaactcaagacacgcttaagatcaccacagcataactgcagatttcaggaattacagtcatagagggtacatcaacttgaagagtagattgagtcttacaggaagtgagttacaataagtaacattaagagcccagctgccagcctggccaacatggtgaaaccccgtctccactaaaaatacaaaaattagccgggcgtggtgacgcatgaccgtaattccagctactcaggaggctgaggcagcagaattgcttgaacccaggaggcggagattgcagtgagctaagatcgggccactgcactccagcctgggggacagag

SEQ ID NO: 374606 - DNA, 2417 bp, Homo sapiens
tagatagtagtagagagagagagtagagagtagagagagagagtagagagagagagatatagagagagagatagagagagatatagagagatagactcatcctcctgagtagctaggattacaggcatgtgccaccatgtaattagcccggctaattttgtatttttagtagagacgggatttctccatgttgatcaggctggtcatgaactcctgacctcaggtgatctgcctgcctcagcctcccaaagtgctgctgggattacaggcgtgagccaccactcccggctaagttagtatttctttaatcttaatgctttaaactaagccacttggatcctgaataatttaaatcttgagctacattggtaagtaataaattatttaaggccaggaattcctgtagttttcatggagtctgtagctttattaaaaaataaatcactgccaggcttcattcttccatatgatcctctaatggtcaaggaattcatttggctccttgatacatcagtcctcaatattactttctaggtattttatggccagattgcttatatgagtggtcttttggtttggtagtaggtttttatttttaatttctgtactaatgaaattcctgactttaatttctgaaaaccaaaaactctccaagtgtatttatttatattttttttaatagagacgaggtcttgctatgttgcccaggctggtcccaaactcctggcctcaagcagtccttccaccttggcctcccaaagtgctgggattatcaatatgagccaccatgccagatttgttcatttttaaacatttttatctcttcaagtcatcttttgatcttttaaaaagcaccttcaaacagctgcaccttccatttgcactaggaaatgaaggtagtgatgggattggcaatgttcctggcagatgtttcagcccaaaagctcttctacagaccggtttagagctggtgccctatgagaatattagggagcttttattttaaattgaactttacccttgtccatgcaaggcattcctcctgaatgcatccatgaatttgtttacttttgcgtcaaacatatgagccattgtcatgctcagcctgtgccaccattgctctgtctgatgtatgtaatcatacaagacctgattttggttctaacacagtggtctttgactatcaacattgatgtttttagagatgggttcttctggttgatacagactatgcattgcgtttagcagatggggtaaaactggcctaaaacaagtctttgcagaatacatgccaatttccaaaaaaaaaaaaaaatttgttgctcaggtgttgcacaatttttatctaacactgaggctatcagctccaactaaacaacatttcagtgggtgaggctgccctaacttccattaggggccatggtctcactgccatcacttattagccatgagaatttggttgtagttttcaggtaggttggtttcttcctcatttgcagcttgttgatacttgttcctttttatttattaacatcccaatcaatttgcagctgccatcattacataaatatttttctgttataaaaagaagtgtgatctgtttttttagtgatttcctttgtttgggaatagagattggaagcacatactcagacctgttttgttaactagaattctttaaaagctgatgccaaacatctttacagaggaactgtagttcacatccacctgtctgacattgtcccctaaaaacaagtgcagtgtggcagctgctgaatctgtctgttcagtttgtcaaggaggataattatgcttgggagagatctgaaaagaaggtgaatattttgcacttttgatactcttaggaacaaataacttatttggcaaattgtttcttttttatgttttgggtgttgtttttgttttttgactttttttgtattgtgaacaggcactgaagctgatgttattttaagattacagaatggaaaaagaaataaactattttaatgtctgataattatggggtagcccttgcattgcaagatgatgatttgattatggacacattatcaacagaattgaatttgcatggaactcaagacacgcttaagatcaccacagcataactgcagatttcaggaattacagtcatagagggtacatcaacttgaagagtagattgagtcttacaggaagtgagttacaataagtaacattaagagcccagctgccagcctggccaacatggtgaaaccccgtctccactaaaaatacaaaaattagccgggcgtggtgacgcatgaccgtaattccagctactcaggaggctgaggcagcagaattgcttgaacccaggaggcggagattgcagtgagctaagatcgggccactgcactccagcctgggggacagag

SEQ ID NO: 374607 - DNA, 4120 bp, Homo sapiens
acctttaagcgtcacgtgactcccctcgggcttgtcccctcctctttcccctccccaggcccaggcgagcgctggtgtggacgggaagctcccggcccggcgaactaactggagcacggagctgcagccggttgggccggtgtactttcccgctctggaaaggaagagaaatggaagtgagaaagttgagcatttcctggcagttcttgatagttctggttctgatcctgcaaattctgtctgcgttggattttgacccatacagagtcctaggggtcagccgaacagccagtcaggctgatattaaaaaggcttataagaagctcgcccgggaatggcatcctgacaaaaacaaagatcctggagcagaagacaagttcattcaaatcagtaaggcttacgagattctttcaaatgaagaaaagagatcaaattatgatcaatatggagacgctggagagaaccagggctaccagaagcagcaacagcagcgagagtatcgcttccgccatttccatgaaaatttttattttgatgaatccttttttcacttcccttttaattctgaacggcgggactcaattgacgaaaagtatttattgcacttttcacattatgtgaatgaagtggttccagatagcttcaagaaaccctacctcatcaagatcacctccgattggtgctttagctgcattcatatcgagcctgtgtggaaagaagtcattcaagaactggaagaattgggtgtaggaattggcgtggtccatgctgggtatgagagacgcctggcccatcacctaggggcacacagcacgccctctatcctaggaatcattaacgggaaaatctccttcttccacaatgcagttgtccgtgaaaatctgcgacaatttgtagaaagtcttcttccagggaacttggtggagaaagttacaaataaaaattacgtcagattcctctctggctggcagcaagagaataagcctcatgtccttctgtttgaccaaacgcccattgtgccactgttatacaagttgactgcctttgcatacaaagattatttatcatttggatatgtatatgtgggtttgagagggacggaagagatgacaaggcggtacaacatcaatatctacgcccctaccctcttggtctttaaagaacatataaacaggcctgccgatgttatccaggcccgaggtatgaagaagcaaatcattgacgacttcatcacccgaaacaaatatctattggcagccaggctcaccagccagaagttgttccatgaactctgccctgtgaaacggtcgcatcgacagaggaatccagggcactttagcaccaaattgtcagatgtgccagcctgtcctagtggtcagagaagatttccctaagatgtaacatttcagctgagacctgaaggatgagcacagtttagccaggcgtctgggatagactgggtcactttacagaagcacagaatatggaagagtgactgtccctactaaagcattccacacagggtactgtgtggttttattgactgctgagactaccaagttgagcaaaccctttgaggctttcctgtcctttgccctggcaaacactcaagacacagtgagatttgtgcatgtctacagcaatcggcagcaggagtttgccgacaccttactaccagacagtgaggcgtttcaagggaaatcagcggtgtctattttagaaaggcgcaacacagcaggaagggtggtgtataaaaccctggaagacccttggattgggagtgagagtgacaaatttatcctcttgggctatctcgaccagctgcgtaaagatccagctcttctgtcctctgaagcagtgcttcctgacctgaccgatgaacttgcccctgtttttctccttcgatggttctactctgcttctgactacatctcagactgctgggatagcatttttcacaacaactggaaaggatcacccatggctgccattctgggcagcagagcctgggactgtctcttcatcagggaacctctggtgcccagcacagggcctgacacacgtggagtccagtgtatagatgtaaaaggaatgagtgaattaacctcaagagggatacccactcccacctactgatgagaccatgagcccctgaaggacagaaccacatctcattcgtgtttgtgattcctggcacccaacacagcacctgacaaatgacagcctttgatgggtgttggagggaaatgatgcccctgctgtccctgatcttctctgccctcttcatcctcttcggcactgtcatcgttcaggctttcagcgactctaatgatgagcgagagtcaagccctccagaaaaagaggaagcccaagagaagactgggaaaactgagccaagcttcaccaaagaaaacagcaggtttctctaacaaaacaccagactcacctccccggcacctgccccccagatcctgtcatctgataacgcagcattggaacatagagtgtagagaagaactctcatgcacctcctcccatgtaaactgtggctacagggaaaagtcactgtgatttgtgtttactaagaccctgtaggtgtttagatgccttagatttcataatgaaggcagaaggaaagaagcctatcagcaagattcctaaaaaaggctttgtggaggtaactgaactcacagatgtaacatacaccagtaacttggtacgtctgaggccaggccacatgaatgtggtcctcatcctgtcgaattctaccaagaccagcctactacagaaatttgctttggaggtctacacatttactgggagcagctgcctacacttctccttcctgagtctagataaacacagagaatggctagaatacttactagaatttgctcaagatgcagctccaatcccaaaccaatatgataagcatttcatggagcgtgactacactggttatgtactggctctgaatggccacaagaaatacttctgcctcttcaagccccaaaagacagtcgaagaggaggaagccatagggtcgtgcagtgatgttgactcttccctctacctgggtgaatctcgagggaaaccttcctgtggccttggatccaggcccatcaaaggaaagttgagcaagctctctttatggatggaacgcctgctggagggctccttacagaggttttatatcccatcatggcctgaactagactgagaggattttccaaagagatttgaactcttcagactttttaacatgcccctgtgaacaggttgaaaaggaaaggaataaacgggagttctgcatgtgagttctcaagaaaaggaaagggaggctgagcagtggctgaagcgatgcagccttgagacacgctgtgagcatcccatccgccgccccagcgctgctggtagccaggggaggggtctgcacagcgagaagtactgtgatgactttgagccgttgacataaagatcatacggtggtgaaacttcgacaagatcacagcccatcacgttcaggccttgacaacccctgatgatctccagagcctattcaagatcaagactgagttgtccacagtggtaatcatttacagtgaaaagcacccagtagagcttttcccagcccacgccaccctttgacttggaattggctttccctccataaacatttgttgactgccaggcacactggcaggcctcccagagaaacagataatgcgtacacagtccctgctcctcagggctgcatggtgtggtgatggagacaaggaaaccaatcgtttcaatgtcatgcaccaagggcttcaaggaaagcaagcccagaatggtatcagcataggtaatagcctggagaggtgaaaagcccagaaggttgctaagcagagggatgaggaatgtgtttcagaaatccctcatgagaagagaggatggttacagccatttcaagagagagagttatggccaccctcctttaagatcttagaggatgtaaggaagaaggttgagaagtacccatctagtaaactataatttccaatatctacttcaaccttttgggtgtcctccaagggcagtaccttgtaaaacacaaggaataaatgttttgtgagtg

SEQ ID NO: 374608 - DNA, 448 bp, Homo sapiens
tgtatgtttagtagagacagtgtttcaccatgttggtaaggctggtctcgaactcctgacctcaggtgatccacccacctcagcctcccaaagtgctgggattacaggcgtgtgccaccatgcccggccacttccctttttttatattggctgactgaccctttcccactggctaggaaaggatcacccatggctgccattctgggcagcagagcctgggactgtctcttcatcagggaacctctggtgcccagcacagggcctgacacacgtggagtccagtgtatagatgtaaaaggaatgagtgaattaacctcaagagggatacccactcccacctactgatgagaccatgagcccctgaaggacagaaccacatctcattcgtgtttgtgattcctggcacccaacacagcacctgacaaatgacagcctttgatgggtgttg

SEQ ID NO: 374609 - DNA, 596 bp, Homo sapiens
tgtatgtgtgtgagagagagagaggcaggcacactgaaattgcacgcttttctctttggtcttgtggggcttcatccatacagcaagatgctggctgtgacctttccaatccagacatctgagccattgcgacagggacctcttttcccacttcacttcgtgttttgttggttctgaacagaaaagcttgaactcagtgttattccctgagccctttcagttactgttctctagcccttgtgtattttccagaagagcaatgttaagttccaccgagcaagcgatgggggaatgggtgattgaagtgtcgcagctgctggagaggcactggctcccacagaaggccttctttttctctgtgttcaggccccatccaacacaaagcgttttcctattattttaagtctcactggggtatttattttctcagcaattaaatgtgtcaggaaatgccctgagtcctcaattctcttcttcctacaggagcagctgcctacacttctccttcctgagtctagataaacacagagaatggctagaatacttactagaatttgctcaagatgcagctccaatcccaaaccaatatgataagc

SEQ ID NO: 374610 - DNA, 6515 bp, Homo sapiens
acctttaagcgtcacgtgactcccctcgggcttgtcccctcctctttcccctccccaggcccaggcgagcgctggtgtggacgggaagctcccggcccggcgaactaactggagcacggagctgcagccggttgggccggtgtactttcccgctctggaaaggaagagaaatggaagtgagaaagttgagcatttcctggcagttcttgatagttctggttctgatcctgcaaattctgtctgcgttggattttgacccatacagagtcctaggggtcagccgaacagccagtcaggctgatattaaaaaggcttataagaagctcgcccgggaatggcatcctgacaaaaacaaagatcctggagcagaagacaagttcattcaaatcagtaaggcttacgagattctttcaaatgaagaaaagagatcaaattatgatcaatatggagacgctggagagaaccagggctaccagaagcagcaacagcagcgagagtatcgcttccgccatttccatgaaaatttttattttgatgaatccttttttcacttcccttttaattctgaacggcgggactcaattgacgaaaagtatttattgcacttttcacattatgtgaatgaagtggttccagatagcttcaagaaaccctacctcatcaagatcacctccgattggtgctttagctgcattcatatcgagcctgtgtggaaagaagtcattcaagaactggaagaattgggtgtaggaattggcgtggtccatgctgggtatgagagacgcctggcccatcacctaggggcacacagcacgccctctatcctaggaatcattaacgggaaaatctccttcttccacaatgcagttgtccgtgaaaatctgcgacaatttgtagaaagtcttcttccagggaacttggtggagaaagttacaaataaaaattacgtcagattcctctctggctggcagcaagagaataagcctcatgtccttctgtttgaccaaacgcccattgtgccactgttatacaagttgactgcctttgcatacaaagattatttatcatttggatatgtatatgtgggtttgagagggacggaagagatgacaaggcggtacaacatcaatatctacgcccctaccctcttggtctttaaagaacatataaacaggcctgccgatgttatccaggcccgaggtatgaagaagcaaatcattgacgacttcatcacccgaaacaaatatctattggcagccaggctcaccagccagaagttgttccatgaactctgccctgtgaaacggtcgcatcgacagaggaagtactgtgtggttttattgactgctgagactaccaagttgagcaaaccctttgaggctttcctgtcctttgccctggcaaacactcaagacacagtgagatttgtgcatgtctacagcaatcggcagcaggagtttgccgacaccttactaccagacagtgaggcgtttcaagggaaatcagcggtgtctattttagaaaggcgcaacacagcaggaagggtggtgtataaaaccctggaagacccttggattgggagtgagagtgacaaatttatcctcttgggctatctcgaccagctgcgtaaagatccagctcttctgtcctctgaagcagtgcttcctgacctgaccgatgaacttgcccctgtttttctccttcgatggttctactctgcttctgactacatctcagactgctgggatagcatttttcacaacaactggagggaaatgatgcccctgctgtccctgatcttctctgccctcttcatcctcttcggcactgtcatcgttcaggctttcagcgactctaatgatgagcgagagtcaagccctccagaaaaagaggaagcccaagagaagactgggaaaactgagccaagcttcaccaaagaaaacagcagcaagattcctaaaaaaggctttgtggaggtaactgaactcacagatgtaacatacaccagtaacttggtacgtctgaggccaggccacatgaatgtggtcctcatcctgtcgaattctaccaagaccagcctactacagaaatttgctttggaggtctacacatttactgggagcagctgcctacacttctccttcctgagtctagataaacacagagaatggctagaatacttactagaatttgctcaagatgcagctccaatcccaaaccaatatgataagcatttcatggagcgtgactacactggttatgtactggctctgaatggccacaagaaatacttctgcctcttcaagccccaaaagacagtcgaagaggaggaagccatagggtcgtgcagtgatgttgactcttccctctacctgggtgaatctcgagggaaaccttcctgtggccttggatccaggcccatcaaaggaaagttgagcaagctctctttatggatggaacgcctgctggagggctccttacagaggttttatatcccatcatggcctgaactagactgagaggattttccaaagagatttgaactcttcagactttttaacatgcccctgtgaacaggtattttcaggactcaaactaccacaatgaacagagtatagattttagattgctcttctagaaccatggctagaagaatctttcctttgtcctgttctaacctaggaatgaaaaacaccaccagtttgaatcgcctagatgaaaatcttttcctctgggtgttatttttccccactgaatgccacaccattgaaaatagactgctcatcccctcttcctttcttgtccttgtcccatgctcaccccaccctcctgtcctgtgtcttggagaagcacagggctccaccctgcaagcggcatctggcggaccctcatgagcctgtcgtgcaggccaggtcattggccccttccccaatcccggccctgctgtgctgctgccatggcgcatgctcctaactctgaacaacccacggcagcttctagccccgcatctggaaaaaggcccctttccaagcaatctcacgtttactggttgttctgggagtaagtggctaaatgtatattttgggggtatcccccaacaacagtttgttggccacaggttgaaaaggaaaggaataaacgggagttctgcatgtgagttctcaagaaaaggaaagggaggctgagcagtggctgaagcgatgcagccttgagacacgctgtgagcatcccatccgccgccccagcgctgctggtagccaggggaggggtctgcacagcgagaagtactgtgatgactttgagccgttgacatgtatgtcttcagatgcctttctgcctctgtcgattttagggtatggatattaggagccataacttgtaatcttgttctctgaacgtagagataagctgctataaagccagtagatgttaaactgaagagaaattattcccacctgctatgagtcaggcttaaggaatctcttcaatagtgtctctttagtaaaataccaaacatgtctttgtatcaaggaacttaaaatttctcaacaattgtattttgaacactgttaccctaaaagtgctgtctcttcaagtcatcttttgcaggaagtgagccaagatttgttctagactcccattttgcaaaaggcttactttccacttctgggctgtattttgatgtctcatcttcattgttttcactcttaacttagagctgcttcaccagtattggggtcagactggccatcagcacctgagcgtgctgagctccaggtatagtggaccccagggtgcctcataccagccagttagagagcataccttttatttttcagggcagaatgaccagtggttctgagtttgagtttggacagcttcaaagagtggtccgttcaaatgtcaaagcaaggtgcctttggtggctttgtgaagggtgaaaatcagtgatgggacatttactaagtatttcttttttttttttttttttttagttgttgagacagagtttcactcttgttgcccaggctggagtgaaatggtgcgatctcggttcaccgcaacctccacatcccaggttcaagtgattctcctgcctcagcctcctgagtagctaggattacaggcatgtgccaccatgtaattagcccggctaattttgtatttttagtagagacgggatttctccatgttgatcaggctggtcatgaactcctgacctcaggtgatctgcctgcctcagcctcccaaagtgctgctgggattacaggcgtgagccaccactcccggctaagttagtatttctttaatcttaatgctttaaactaagccacttggatcctgaataatttaaatcttgagctacattggtaagtaataaattatttaaggccaggaattcctgtagttttcatggagtctgtagctttattaaaaaataaatcactgccaggcttcattcttccatatgatcctctaaaaatggacacttcctctgaatgctgtatctcatggcacctggtccaactagaaatggtcaaggaattcatttggctccttgatacatcagtcctcaatattactttctaggtattttatggccagattgcttatatgagtggtcttttggtttggtagtaggtttttatttttaatttctgtactaatgaaattcctgactttaatttctgaaaaccaaaaactctccaagtgtatttatttatattttttttaatagagacgaggtcttgctatgttgcccaggctggtcccaaactcctggcctcaagcagtccttccaccttggcctcccaaagtgctgggattatcaatatgagccaccatgccagatttgttcatttttaaacatttttatctcttcaagtcatcttttgatcttttaaaaagcaccttcaaacagctgcaccttccatttgcactaggaaatgaaggtagtgatgggattggcaatgttcctggcagatgtttcagcccaaaagctcttctacagaccggtttagagctggtgccctatgagaatattagggagcttttattttaaattgaactttacccttgtccatgcaaggcattcctcctgaatgcatccatgaatttgtttacttttgcgtcaaacatatgagccattgtcatgctcagcctgtgccaccattgctctgtctgatgtatgtaatcatacaagacctgattttggttctaacacagtggtctttgactatcaacattgatgtttttagagatgggttcttctggttgatacagactatgcattgcgtttagcagatggggtaaaactggcctaaaacaagtctttgcagaatacatgccaatttccaaaaaaaaaaaaaaatttgttgctcaggtgttgcacaatttttatctaacactgaggctatcagctccaactaaacaacatttcagtgggtgaggctgccctaacttccattaggggccatggtctcactgccatcacttattagccatgagaatttggttgtagttttcaggtaggttggtttcttcctcatttgcagcttgttgatacttgttcctttttatttattaacatcccaatcaatttgcagctgccatcattacataaatatttttctgttataaaaagaagtgtgatctgtttttttagtgatttcctttgtttgggaatagagattggaagcacatactcagacctgttttgttaactagaattctttaaaagctgatgccaaacatctttacagaggaactgtagttcacatccacctgtctgacattgtcccctaaaaacaagtgcagtgtggcagctgctgaatctgtctgttcagtttgtcaaggaggataattatgcttgggagagatctgaaaagaaggtgaatattttgcacttttgatactcttaggaacaaataacttatttggcaaattgtttcttttttatgttttgggtgttgtttttgttttttgactttttttgtattgtgaacaggcactgaagctgatgttattttaagattacagaatggaaaaagaaataaactattttaatgtctgataattatggggtagcccttgcattgcaagatgatgatttgattatggacacattatcaacagaattgaatttgcatggaactcaagacacgcttaagatcaccacagcataactgcagatttcaggaattacagtcatagagggtacatcaacttgaagagtagattgagtcttacaggaagtgagttacaataagtaacattaagagcccagctgccagcctggcctgggattacaggcgtgagccactgggtccggcctgctttttttttttttttttttttttttttggagacggagtctcactctgtcacccaggctggagtgtagtggcatgacctcagctcactgcaacctccacctcccgggttcaagcaatgcccctgcctcagcttcctgagtagctgggactataggcacgcgccaccacgcccagctaact

SEQ ID NO: 374611 - DNA, 6487 bp, Homo sapiens
acctttaagcgtcacgtgactcccctcgggcttgtcccctcctctttcccctccccaggcccaggcgagcgctggtgtggacgggaagctcccggcccggcgaactaactggagcacggagctgcagccggttgggccggtgtactttcccgctctggaaaggaagagaaatggaagtgagaaagttgagcatttcctggcagttcttgatagttctggttctgatcctgcaaattctgtctgcgttggattttgacccatacagagtcctaggggtcagccgaacagccagtcaggctgatattaaaaaggcttataagaagctcgcccgggaatggcatcctgacaaaaacaaagatcctggagcagaagacaagttcattcaaatcagtaaggcttacgagattctttcaaatgaagaaaagagatcaaattatgatcaatatggagacgctggagagaaccagggctaccagaagcagcaacagcagcgagagtatcgcttccgccatttccatgaaaatttttattttgatgaatccttttttcacttcccttttaattctgaacggcgggactcaattgacgaaaagtatttattgcacttttcacattatgtgaatgaagtggttccagatagcttcaagaaaccctacctcatcaagatcacctccgattggtgctttagctgcattcatatcgagcctgtgtggaaagaagtcattcaagaactggaagaattgggtgtaggaattggcgtggtccatgctgggtatgagagacgcctggcccatcacctaggggcacacagcacgccctctatcctaggaatcattaacgggaaaatctccttcttccacaatgcagttgtccgtgaaaatctgcgacaatttgtagaaagtcttcttccagggaacttggtggagaaagttacaaataaaaattacgtcagattcctctctggctggcagcaagagaataagcctcatgtccttctgtttgaccaaacgcccattgtgccactgttatacaagttgactgcctttgcatacaaagattatttatcatttggatatgtatatgtgggtttgagagggacggaagagatgacaaggcggtacaacatcaatatctacgcccctaccctcttggtctttaaagaacatataaacaggcctgccgatgttatccaggcccgaggtatgaagaagcaaatcattgacgacttcatcacccgaaacaaatatctattggcagccaggctcaccagccagaagttgttccatgaactctgccctgtgaaacggtcgcatcgacagaggaagtactgtgtggttttattgactgctgagactaccaagttgagcaaaccctttgaggctttcctgtcctttgccctggcaaacactcaagacacagtgagatttgtgcatgtctacagcaatcggcagcaggagtttgccgacaccttactaccagacagtgaggcgtttcaagggaaatcagcggtgtctattttagaaaggcgcaacacagcaggaagggtggtgtataaaaccctggaagacccttggattgggagtgagagtgacaaatttatcctcttgggctatctcgaccagctgcgtaaagatccagctcttctgtcctctgaagcagtgcttcctgacctgaccgatgaacttgcccctgtttttctccttcgatggttctactctgcttctgactacatctcagactgctgggatagcatttttcacaacaactggagggaaatgatgcccctgctgtccctgatcttctctgccctcttcatcctcttcggcactgtcatcgttcaggctttcagcgactctaatgatgagcgagagtcaagccctccagaaaaagaggaagcccaagagaagactgggaaaactgagccaagcttcaccaaagaaaacagcagcaagattcctaaaaaaggctttgtggaggtaactgaactcacagatgtaacatacaccagtaacttggtacgtctgaggccaggccacatgaatgtggtcctcatcctgtcgaattctaccaagaccagcctactacagaaatttgctttggaggtctacacatttactgggagcagctgcctacacttctccttcctgagtctagataaacacagagaatggctagaatacttactagaatttgctcaagatgcagctccaatcccaaaccaatatgataagcatttcatggagcgtgactacactggttatgtactggctctgaatggccacaagaaatacttctgcctcttcaagccccaaaagacagtcgaagaggaggaagccatagggtcgtgcagtgatgttgactcttccctctacctgggtgaatctcgagggaaaccttcctgtggccttggatccaggcccatcaaaggaaagttgagcaagctctctttatggatggaacgcctgctggagggctccttacagaggttttatatcccatcatggcctgaactagactgagaggattttccaaagagatttgaactcttcagactttttaacatgcccctgtgaacaggtattttcaggactcaaactaccacaatgaacagagtatagattttagattgctcttctagaaccatggctagaagaatctttcctttgtcctgttctaacctaggaatgaaaaacaccaccagtttgaatcgcctagatgaaaatcttttcctctgggtgttatttttccccactgaatgccacaccattgaaaatagactgctcatcccctcttcctttcttgtccttgtcccatgctcaccccaccctcctgtcctgtgtcttggagaagcacagggctccaccctgcaagcggcatctggcggaccctcatgagcctgtcgtgcaggccaggtcattggccccttccccaatcccggccctgctgtgctgctgccatggcgcatgctcctaactctgaacaacccacggcagcttctagccccgcatctggaaaaaggcccctttccaagcaatctcacgtttactggttgttctgggagtaagtggctaaatgtatattttgggggtatcccccaacaacagtttgttggccacaggttgaaaaggaaaggaataaacgggagttctgcatgtgagttctcaagaaaaggaaagggaggctgagcagtggctgaagcgatgcagccttgagacacgctgtgagcatcccatccgccgccccagcgctgctggtagccaggggaggggtctgcacagcgagaagtactgtgatgactttgagccgttgacatgtatgtcttcagatgcctttctgcctctgtcgattttagggtatggatattaggagccataacttgtaatcttgttctctgaacgtagagataagctgctataaagccagtagatgttaaactgaagagaaattattcccacctgctatgagtcaggcttaaggaatctcttcaatagtgtctctttagtaaaataccaaacatgtctttgtatcaaggaacttaaaatttctcaacaattgtattttgaacactgttaccctaaaagtgctgtctcttcaagtcatcttttgcaggaagtgagccaagatttgttctagactcccattttgcaaaaggcttactttccacttctgggctgtattttgatgtctcatcttcattgttttcactcttaacttagagctgcttcaccagtattggggtcagactggccatcagcacctgagcgtgctgagctccaggtatagtggaccccagggtgcctcataccagccagttagagagcataccttttatttttcagggcagaatgaccagtggttctgagtttgagtttggacagcttcaaagagtggtccgttcaaatgtcaaagcaaggtgcctttggtggctttgtgaagggtgaaaatcagtgatgggacatttactaagtatttcttttttttttttttttttttagttgttgagacagagtttcactcttgttgcccaggctggagtgaaatggtgcgatctcggttcaccgcaacctccacatcccaggttcaagtgattctcctgcctcagcctcctgagtagctaggattacaggcatgtgccaccatgtaattagcccggctaattttgtatttttagtagagacgggatttctccatgttgatcaggctggtcatgaactcctgacctcaggtgatctgcctgcctcagcctcccaaagtgctgctgggattacaggcgtgagccaccactcccggctaagttagtatttctttaatcttaatgctttaaactaagccacttggatcctgaataatttaaatcttgagctacattggtaagtaataaattatttaaggccaggaattcctgtagttttcatggagtctgtagctttattaaaaaataaatcactgccaggcttcattcttccatatgatcctctaaaaatggacacttcctctgaatgctgtatctcatggcacctggtccaactagaaatggtcaaggaattcatttggctccttgatacatcagtcctcaatattactttctaggtattttatggccagattgcttatatgagtggtcttttggtttggtagtaggtttttatttttaatttctgtactaatgaaattcctgactttaatttctgaaaaccaaaaactctccaagtgtatttatttatattttttttaatagagacgaggtcttgctatgttgcccaggctggtcccaaactcctggcctcaagcagtccttccaccttggcctcccaaagtgctgggattatcaatatgagccaccatgccagatttgttcatttttaaacatttttatctcttcaagtcatcttttgatcttttaaaaagcaccttcaaacagctgcaccttccatttgcactaggaaatgaaggtagtgatgggattggcaatgttcctggcagatgtttcagcccaaaagctcttctacagaccggtttagagctggtgccctatgagaatattagggagcttttattttaaattgaactttacccttgtccatgcaaggcattcctcctgaatgcatccatgaatttgtttacttttgcgtcaaacatatgagccattgtcatgctcagcctgtgccaccattgctctgtctgatgtatgtaatcatacaagacctgattttggttctaacacagtggtctttgactatcaacattgatgtttttagagatgggttcttctggttgatacagactatgcattgcgtttagcagatggggtaaaactggcctaaaacaagtctttgcagaatacatgccaatttccaaaaaaaaaaaaaaatttgttgctcaggtgttgcacaatttttatctaacactgaggctatcagctccaactaaacaacatttcagtgggtgaggctgccctaacttccattaggggccatggtctcactgccatcacttattagccatgagaatttggttgtagttttcaggtaggttggtttcttcctcatttgcagcttgttgatacttgttcctttttatttattaacatcccaatcaatttgcagctgccatcattacataaatatttttctgttataaaaagaagtgtgatctgtttttttagtgatttcctttgtttgggaatagagattggaagcacatactcagacctgttttgttaactagaattctttaaaagctgatgccaaacatctttacagaggaactgtagttcacatccacctgtctgacattgtcccctaaaaacaagtgcagtgtggcagctgctgaatctgtctgttcagtttgtcaaggaggataattatgcttgggagagatctgaaaagaaggtgaatattttgcacttttgatactcttaggaacaaataacttatttggcaaattgtttcttttttatgttttgggtgttgtttttgttttttgactttttttgtattgtgaacaggcactgaagctgatgttattttaagattacagaatggaaaaagaaataaactattttaatgtctgataattatggggtagcccttgcattgcaagatgatgatttgattatggacacattatcaacagaattgaatttgcatggaactcaagacacgcttaagatcaccacagcataactgcagatttcaggaattacagtcatagagggtacatcaacttgaagagtagattgagtcttacaggaagtgagttacaataagtaacattaagagcccagctgccagcctggtccggcctgctttttttttttttttttttttttttttggagacggagtctcactctgtcacccaggctggagtgtagtggcatgacctcagctcactgcaacctccacctcccgggttcaagcaatgcccctgcctcagcttcctgagtagctgggactataggcacgcgccaccacgcccagctaact

SEQ ID NO: 374612 - DNA, 6442 bp, Homo sapiens
acctttaagcgtcacgtgactcccctcgggcttgtcccctcctctttcccctccccaggcccaggcgagcgctggtgtggacgggaagctcccggcccggcgaactaactggagcacggagctgcagccggttgggccggtgtactttcccgctctggaaaggaagagaaatggaagtgagaaagttgagcatttcctggcagttcttgatagttctggttctgatcctgcaaattctgtctgcgttggattttgacccatacagagtcctaggggtcagccgaacagccagtcaggctgatattaaaaaggcttataagaagctcgcccgggaatggcatcctgacaaaaacaaagatcctggagcagaagacaagttcattcaaatcagtaaggcttacgagattctttcaaatgaagaaaagagatcaaattatgatcaatatggagacgctggagagaaccagggctaccagaagcagcaacagcagcgagagtatcgcttccgccatttccatgaaaatttttattttgatgaatccttttttcacttcccttttaattctgaacggcgggactcaattgacgaaaagtatttattgcacttttcacattatgtgaatgaagtggttccagatagcttcaagaaaccctacctcatcaagatcacctccgattggtgctttagctgcattcatatcgagcctgtgtggaaagaagtcattcaagaactggaagaattgggtgtaggaattggcgtggtccatgctgggtatgagagacgcctggcccatcacctaggggcacacagcacgccctctatcctaggaatcattaacgggaaaatctccttcttccacaatgcagttgtccgtgaaaatctgcgacaatttgtagaaagtcttcttccagggaacttggtggagaaagttacaaataaaaattacgtcagattcctctctggctggcagcaagagaataagcctcatgtccttctgtttgaccaaacgcccattgtgccactgttatacaagttgactgcctttgcatacaaagattatttatcatttggatatgtatatgtgggtttgagagggacggaagagatgacaaggcggtacaacatcaatatctacgcccctaccctcttggtctttaaagaacatataaacaggcctgccgatgttatccaggcccgaggtatgaagaagcaaatcattgacgacttcatcacccgaaacaaatatctattggcagccaggctcaccagccagaagttgttccatgaactctgccctgtgaaacggtcgcatcgacagaggaagtactgtgtggttttattgactgctgagactaccaagttgagcaaaccctttgaggctttcctgtcctttgccctggcaaacactcaagacacagtgagatttgtgcatgtctacagcaatcggcagcaggagtttgccgacaccttactaccagacagtgaggcgtttcaagggaaatcagcggtgtctattttagaaaggcgcaacacagcaggaagggtggtgtataaaaccctggaagacccttggattgggagtgagagtgacaaatttatcctcttgggctatctcgaccagctgcgtaaagatccagctcttctgtcctctgaagcagtgcttcctgacctgaccgatgaacttgcccctgtttttctccttcgatggttctactctgcttctgactacatctcagactgctgggatagcatttttcacaacaactggagggaaatgatgcccctgctgtccctgatcttctctgccctcttcatcctcttcggcactgtcatcgttcaggctttcagcgactctaatgatgagcgagagtcaagccctccagaaaaagaggaagcccaagagaagactgggaaaactgagccaagcttcaccaaagaaaacagcagcaagattcctaaaaaaggctttgtggaggtaactgaactcacagatgtaacatacaccagtaacttggtacgtctgaggccaggccacatgaatgtggtcctcatcctgtcgaattctaccaagaccagcctactacagaaatttgctttggaggtctacacatttactgggagcagctgcctacacttctccttcctgagtctagataaacacagagaatggctagaatacttactagaatttgctcaagatgcagctccaatcccaaaccaatatgataagcatttcatggagcgtgactacactggttatgtactggctctgaatggccacaagaaatacttctgcctcttcaagccccaaaagacagtcgaagaggaggaagccatagggtcgtgcagtgatgttgactcttccctctacctgggtgaatctcgagggaaaccttcctgtggccttggatccaggcccatcaaaggaaagttgagcaagctctctttatggatggaacgcctgctggagggctccttacagaggttttatatcccatcatggcctgaactagactgagaggattttccaaagagatttgaactcttcagactttttaacatgcccctgtgaacaggtattttcaggactcaaactaccacaatgaacagagtatagattttagattgctcttctagaaccatggctagaagaatctttcctttgtcctgttctaacctaggaatgaaaaacaccaccagtttgaatcgcctagatgaaaatcttttcctctgggtgttatttttccccactgaatgccacaccattgaaaatagactgctcatcccctcttcctttcttgtccttgtcccatgctcaccccaccctcctgtcctgtgtcttggagaagcacagggctccaccctgcaagcggcatctggcggaccctcatgagcctgtcgtgcaggccaggtcattggccccttccccaatcccggccctgctgtgctgctgccatggcgcatgctcctaactctgaacaacccacggcagcttctagccccgcatctggaaaaaggcccctttccaagcaatctcacgtttactggttgttctgggagtaagtggctaaatgtatattttgggggtatcccccaacaacagtttgttggccacaggttgaaaaggaaaggaataaacgggagttctgcatgtgagttctcaagaaaaggaaagggaggctgagcagtggctgaagcgatgcagccttgagacacgctgtgagcatcccatccgccgccccagcgctgctggtagccaggggaggggtctgcacagcgagaagtactgtgatgactttgagccgttgacatgtatgtcttcagatgcctttctgcctctgtcgattttagggtatggatattaggagccataacttgtaatcttgttctctgaacgtagagataagctgctataaagccagtagatgttaaactgaagagaaattattcccacctgctatgagtcaggcttaaggaatctcttcaatagtgtctctttagtaaaataccaaacatgtctttgtatcaaggaacttaaaatttctcaacaattgtattttgaacactgttaccctaaaagtgctgtctcttcaagtcatcttttgcaggaagtgagccaagatttgttctagactcccattttgcaaaaggcttactttccacttctgggctgtattttgatgtctcatcttcattgttttcactcttaacttagagctgcttcaccagtattggggtcagactggccatcagcacctgagcgtgctgagctccaggtatagtggaccccagggtgcctcataccagccagttagagagcataccttttatttttcagggcagaatgaccagtggttctgagtttgagtttggacagcttcaaagagtggtccgttcaaatgtcaaagcaaggtgcctttggtggctttgtgaagggtgaaaatcagtgatgggacatttactaagtatttcttttttttttttttttttttagttgttgagacagagtttcactcttgttgcccaggctggagtgaaatggtgcgatctcggttcaccgcaacctccacatcccaggttcaagtgattctcctgcctcagcctcctgagtagctaggattacaggcatgtgccaccatgtaattagcccggctaattttgtatttttagtagagacgggatttctccatgttgatcaggctggtcatgaactcctgacctcaggtgatctgcctgcctcagcctcccaaagtgctgctgggattacaggcgtgagccaccactcccggctaagttagtatttctttaatcttaatgctttaaactaagccacttggatcctgaataatttaaatcttgagctacattggtaagtaataaattatttaaggccaggaattcctgtagttttcatggagtctgtagctttattaaaaaataaatcactgccaggcttcattcttccatatgatcctctaaaaatggacacttcctctgaatgctgtatctcatggcacctggtccaactagaaatggtcaaggaattcatttggctccttgatacatcagtcctcaatattactttctaggtattttatggccagattgcttatatgagtggtcttttggtttggtagtaggtttttatttttaatttctgtactaatgaaattcctgactttaatttctgaaaaccaaaaactctccaagtgtatttatttatattttttttaatagagacgaggtcttgctatgttgcccaggctggtcccaaactcctggcctcaagcagtccttccaccttggcctcccaaagtgctgggattatcaatatgagccaccatgccagatttgttcatttttaaacatttttatctcttcaagtcatcttttgatcttttaaaaagcaccttcaaacagctgcaccttccatttgcactaggaaatgaaggtagtgatgggattggcaatgttcctggcagatgtttcagcccaaaagctcttctacagaccggtttagagctggtgccctatgagaatattagggagcttttattttaaattgaactttacccttgtccatgcaaggcattcctcctgaatgcatccatgaatttgtttacttttgcgtcaaacatatgagccattgtcatgctcagcctgtgccaccattgctctgtctgatgtatgtaatcatacaagacctgattttggttctaacacagtggtctttgactatcaacattgatgtttttagagatgggttcttctggttgatacagactatgcattgcgtttagcagatggggtaaaactggcctaaaacaagtctttgcagaatacatgccaatttccaaaaaaaaaaaaaaatttgttgctcaggtgttgcacaatttttatctaacactgaggctatcagctccaactaaacaacatttcagtgggtgaggctgccctaacttccattaggggccatggtctcactgccatcacttattagccatgagaatttggttgtagttttcaggtaggttggtttcttcctcatttgcagcttgttgatacttgttcctttttatttattaacatcccaatcaatttgcagctgccatcattacataaatatttttctgttataaaaagaagtgtgatctgtttttttagtgatttcctttgtttgggaatagagattggaagcacatactcagacctgttttgttaactagaattctttaaaagctgatgccaaacatctttacagaggaactgtagttcacatccacctgtctgacattgtcccctaaaaacaagtgcagtgtggcagctgctgaatctgtctgttcagtttgtcaaggaggataattatgcttgggagagatctgaaaagaaggtgaatattttgcacttttgatactcttaggaacaaataacttatttggcaaattgtttcttttttatgttttgggtgttgtttttgttttttgactttttttgtattgtgaacaggcactgaagctgatgttattttaagattacagaatggaaaaagaaataaactattttaatgtctgataattatggggtagcccttgcattgcaagatgatgatttgattatggacacattatcaacagaattgaatttgcatggaactcaagacacgcttaagatcaccacagcataactgcagatttcaggaattacagtcatagagggtacatcaacttgaagagtagatcatcaaaattttaaaaagcggctgggcgcggtggctcatgcctgcaatcccagcactttaaggaggctgaggcgggcggatcaccttaggtcaggagttcaagaccagcctggccaatgtggtgaaaccctgtctctactaaaaatacaaaaattagccaggcgtggtggcaggcacctgtaatcccaggtactcaggaggct

SEQ ID NO: 374613 - DNA, 5357 bp, Homo sapiens
acctttaagcgtcacgtgactcccctcgggcttgtcccctcctctttcccctccccaggcccaggcgagcgctggtgtggacgggaagctcccggcccggcgaactaactggagcacggagctgcagccggttgggccggtgtactttcccgctctggaaaggaagagaaatggaagtgagaaagttgagcatttcctggcagttcttgatagttctggttctgatcctgcaaattctgtctgcgttggattttgacccatacagagtcctaggggtcagccgaacagccagtcaggctgatattaaaaaggcttataagaagctcgcccgggaatggcatcctgacaaaaacaaagatcctggagcagaagacaagttcattcaaatcagtaaggcttacgagattctttcaaatgaagaaaagagatcaaattatgatcaatatggagacgctggagagaaccagggctaccagaagcagcaacagcagcgagagtatcgcttccgccatttccatgaaaatttttattttgatgaatccttttttcacttcccttttaattctgaacggcgggactcaattgacgaaaagtatttattgcacttttcacattatgtgaatgaagtggttccagatagcttcaagaaaccctacctcatcaagatcacctccgattggtgctttagctgcattcatatcgagcctgtgtggaaagaagtcattcaagaactggaagaattgggtgtaggaattggcgtggtccatgctgggtatgagagacgcctggcccatcacctaggggcacacagcacgccctctatcctaggaatcattaacgggaaaatctccttcttccacaatgcagttgtccgtgaaaatctgcgacaatttgtagaaagtcttcttccagggaacttggtggagaaagttacaaataaaaattacgtcagattcctctctggctggcagcaagagaataagcctcatgtccttctgtttgaccaaacgcccattgtgccactgttatacaagttgactgcctttgcatacaaagattatttatcatttggatatgtatatgtgggtttgagagggacggaagagatgacaaggcggtacaacatcaatatctacgcccctaccctcttggtctttaaagaacatataaacaggcctgccgatgttatccaggcccgaggtatgaagaagcaaatcattgacgacttcatcacccgaaacaaatatctattggcagccaggctcaccagccagaagttgttccatgaactctgccctgtgaaacggtcgcatcgacagaggaagtactgtgtggttttattgactgctgagactaccaagttgagcaaaccctttgaggctttcctgtcctttgccctggcaaacactcaagacacagtgagatttgtgcatgtctacagcaatcggcagcaggagtttgccgacaccttactaccagacagtgaggcgtttcaagggaaatcagcggtgtctattttagaaaggcgcaacacagcaggaagggtggtgtataaaaccctggaagacccttggattgggagtgagagtgacaaatttatcctcttgggctatctcgaccagctgcgtaaagatccagctcttctgtcctctgaagcagtgcttcctgacctgaccgatgaacttgcccctgtttttctccttcgatggttctactctgcttctgactacatctcagactgctgggatagcatttttcacaacaactggagggaaatgatgcccctgctgtccctgatcttctctgccctcttcatcctcttcggcactgtcatcgttcaggctttcagcgactctaatgatgagcgagagtcaagccctccagaaaaagaggaagcccaagagaagactgggaaaactgagccaagcttcaccaaagaaaacagcagcaagattcctaaaaaaggctttgtggaggtaactgaactcacagatgtaacatacaccagtaacttggtacgtctgaggccaggccacatgaatgtggtcctcatcctgtcgaattctaccaagaccagcctactacagaaatttgctttggaggtctacacatttactgggagcagctgcctacacttctccttcctgagtctagataaacacagagaatggctagaatacttactagaatttgctcaagatgcagctccaatcccaaaccaatatgataagcatttcatggagcgtgactacactggttatgtactggctctgaatggccacaagaaatacttctgcctcttcaagccccaaaagacagtcgaagaggaggaagccatagggtcgtgcagtgatgttgactcttccctctacctgggtgaatctcgagggaaaccttcctgtggccttggatccaggcccatcaaaggaaagttgagcaagctctctttatggatggaacgcctgctggagggctccttacagaggttttatatcccatcatggcctgaactagactgagaggattttccaaagagatttgaactcttcagactttttaacatgcccctgtgaacaggtattttcaggactcaaactaccacaatgaacagagtatagattttagattgctcttctagaaccatggctagaagaatctttcctttgtcctgttctaacctaggaatgaaaaacaccaccagtttgaatcgcctagatgaaaatcttttcctctgggtgttatttttccccactgaatgccacaccattgaaaatagactgctcatcccctcttcctttcttgtccttgtcccatgctcaccccaccctcctgtcctgtgtcttggagaagcacagggctccaccctgcaagcggcatctggcggaccctcatgagcctgtcgtgcaggccaggtcattggccccttccccaatcccggccctgctgtgctgctgccatggcgcatgctcctaactctgaacaacccacggcagcttctagccccgcatctggaaaaaggcccctttccaagcaatctcacgtttactggttgttctgggagtaagtggctaaatgtatattttgggggtatcccccaacaacagtttgttggccacaggttgaaaaggaaaggaataaacgggagttctgcatgtgagttctcaagaaaaggaaagggaggctgagcagtggctgaagcgatgcagccttgagacacgctgtgagcatcccatccgccgccccagcgctgctggtagccaggggaggggtctgcacagcgagaagtactgtgatgactttgagccgttgacatgtatgtcttcagatgcctttctgcctctgtcgattttagggtatggatattaggagccataacttgtaatcttgttctctgaacgtagagataagctgctataaagccagtagatgttaaactgaagagaaattattcccacctgctatgagtcaggcttaaggaatctcttcaatagtgtctctttagtaaaataccaaacatgtctttgtatcaaggaacttaaaatttctcaacaattgtattttgaacactgttaccctaaaagtgctgtctcttcaagtcatcttttgcaggaagtgagccaagatttgttctagactcccattttgcaaaaggcttactttccacttctgggctgtattttgatgtctcatcttcattgttttcactcttaacttagagctgcttcaccagtattggggtcagactggccatcagcacctgagcgtgctgagctccaggtatagtggaccccagggtgcctcataccagccagttagagagcataccttttatttttcagggcagaatgaccagtggttctgagtttgagtttggacagcttcaaagagtggtccgttcaaatgtcaaagcaaggtgcctttggtggctttgtgaagggtgaaaatcagtgatgggacatttactaagtatttcttttttttttttttttttttagttgttgagacagagtttcactcttgttgcccaggctggagtgaaatggtgcgatctcggttcaccgcaacctccacatcccaggttcaagtgattctcctgcctcagcctcctgagtagctaggattacaggcatgtgccaccatgtaattagcccggctaattttgtatttttagtagagacgggatttctccatgttgatcaggctggtcatgaactcctgacctcaggtgatctgcctgcctcagcctcccaaagtgctgctgggattacaggcgtgagccaccactcccggctaagttagtatttctttaatcttaatgctttaaactaagccacttggatcctgaataatttaaatcttgagctacattggtaagtaataaattatttaaggccaggaattcctgtagttttcatggagtctgtagctttattaaaaaataaatcactgccaggcttcattcttccatatgatcctctaaaaatggacacttcctctgaatgctgtatctcatggcacctggtccaactagaaatggtcaaggaattcatttggctccttgatacatcagtcctcaatattactttctaggtattttatggccagattgcttatatgagtggtcttttggtttggtagtaggtttttatttttaatttctgtactaatgaaattcctgactttaatttctgaaaaccaaaaactctccaagtgtatttatttatattttttttaatagagacgaggtcttgctatgttgcccaggctggtcccaaactcctggcctcaagcagtccttccaccttggcctcccaaagtgctgggattatcaatatgagccaccatgccagatttgttcatttttaaacatttttatctcttcaagtcatcttttgatcttttaaaaagcaccttcaaacagctgcaccttccatttgcactaggaaatgaaggtagtgatgggattggcaatgttcctggcagatgtttcagcccaaaagctcttctacagaccggtttagagctggtgccctatgagaatattagggagcttttattttaaattgaactttacccttgtccatgcaaggcattcctcctgaatgcatccatgaatttgtttacttttgcgtcaaacatatgagccattgtcatgctcagcctgtgccaccattgctctgtctgatgtatgtaatcatacaagacctgattttggttctaacacagtggtctttgactatcaacattgatgtttttagagatgggttcttctggttgatacagactatgcattgcgtttagcagatggggtaaaactggcctaaaacaagtctttgcagaatacatgccaatttcca

SEQ ID NO: 374614 - DNA, 6419 bp, Homo sapiens
acctttaagcgtcacgtgactcccctcgggcttgtcccctcctctttcccctccccaggcccaggcgagcgctggtgtggacgggaagctcccggcccggcgaactaactggagcacggagctgcagccggttgggccggtgtactttcccgctctggaaaggaagagaaatggaagtgagaaagttgagcatttcctggcagttcttgatagttctggttctgatcctgcaaattctgtctgcgttggattttgacccatacagagtcctaggggtcagccgaacagccagtcaggctgatattaaaaaggcttataagaagctcgcccgggaatggcatcctgacaaaaacaaagatcctggagcagaagacaagttcattcaaatcagtaaggcttacgagattctttcaaatgaagaaaagagatcaaattatgatcaatatggagacgctggagagaaccagggctaccagaagcagcaacagcagcgagagtatcgcttccgccatttccatgaaaatttttattttgatgaatccttttttcacttcccttttaattctgaacggcgggactcaattgacgaaaagtatttattgcacttttcacattatgtgaatgaagtggttccagatagcttcaagaaaccctacctcatcaagatcacctccgattggtgctttagctgcattcatatcgagcctgtgtggaaagaagtcattcaagaactggaagaattgggtgtaggaattggcgtggtccatgctgggtatgagagacgcctggcccatcacctaggggcacacagcacgccctctatcctaggaatcattaacgggaaaatctccttcttccacaatgcagttgtccgtgaaaatctgcgacaatttgtagaaagtcttcttccagggaacttggtggagaaagttacaaataaaaattacgtcagattcctctctggctggcagcaagagaataagcctcatgtccttctgtttgaccaaacgcccattgtgccactgttatacaagttgactgcctttgcatacaaagattatttatcatttggatatgtatatgtgggtttgagagggacggaagagatgacaaggcggtacaacatcaatatctacgcccctaccctcttggtctttaaagaacatataaacaggcctgccgatgttatccaggcccgaggtatgaagaagcaaatcattgacgacttcatcacccgaaacaaatatctattggcagccaggctcaccagccagaagttgttccatgaactctgccctgtgaaacggtcgcatcgacagaggaagtactgtgtggttttattgactgctgagactaccaagttgagcaaaccctttgaggctttcctgtcctttgccctggcaaacactcaagacacagtgagatttgtgcatgtctacagcaatcggcagcaggagtttgccgacaccttactaccagacagtgaggcgtttcaagggaaatcagcggtgtctattttagaaaggcgcaacacagcaggaagggtggtgtataaaaccctggaagacccttggattgggagtgagagtgacaaatttatcctcttgggctatctcgaccagctgcgtaaagatccagctcttctgtcctctgaagcagtgcttcctgacctgaccgatgaacttgcccctgtttttctccttcgatggttctactctgcttctgactacatctcagactgctgggatagcatttttcacaacaactggagggaaatgatgcccctgctgtccctgatcttctctgccctcttcatcctcttcggcactgtcatcgttcaggctttcagcgactctaatgatgagcgagagtcaagccctccagaaaaagaggaagcccaagagaagactgggaaaactgagccaagcttcaccaaagaaaacagcagcaagattcctaaaaaaggctttgtggaggtaactgaactcacagatgtaacatacaccagtaacttggtacgtctgaggccaggccacatgaatgtggtcctcatcctgtcgaattctaccaagaccagcctactacagaaatttgctttggaggtctacacatttactgggagcagctgcctacacttctccttcctgagtctagataaacacagagaatggctagaatacttactagaatttgctcaagatgcagctccaatcccaaaccaatatgataagcatttcatggagcgtgactacactggttatgtactggctctgaatggccacaagaaatacttctgcctcttcaagccccaaaagacagtcgaagaggaggaagccatagggtcgtgcagtgatgttgactcttccctctacctgggtgaatctcgagggaaaccttcctgtggccttggatccaggcccatcaaaggaaagttgagcaagctctctttatggatggaacgcctgctggagggctccttacagaggttttatatcccatcatggcctgaactagactgagaggattttccaaagagatttgaactcttcagactttttaacatgcccctgtgaacaggtattttcaggactcaaactaccacaatgaacagagtatagattttagattgctcttctagaaccatggctagaagaatctttcctttgtcctgttctaacctaggaatgaaaaacaccaccagtttgaatcgcctagatgaaaatcttttcctctgggtgttatttttccccactgaatgccacaccattgaaaatagactgctcatcccctcttcctttcttgtccttgtcccatgctcaccccaccctcctgtcctgtgtcttggagaagcacagggctccaccctgcaagcggcatctggcggaccctcatgagcctgtcgtgcaggccaggtcattggccccttccccaatcccggccctgctgtgctgctgccatggcgcatgctcctaactctgaacaacccacggcagcttctagccccgcatctggaaaaaggcccctttccaagcaatctcacgtttactggttgttctgggagtaagtggctaaatgtatattttgggggtatcccccaacaacagtttgttggccacaggttgaaaaggaaaggaataaacgggagttctgcatgtgagttctcaagaaaaggaaagggaggctgagcagtggctgaagcgatgcagccttgagacacgctgtgagcatcccatccgccgccccagcgctgctggtagccaggggaggggtctgcacagcgagaagtactgtgatgactttgagccgttgacatgtatgtcttcagatgcctttctgcctctgtcgattttagggtatggatattaggagccataacttgtaatcttgttctctgaacgtagagataagctgctataaagccagtagatgttaaactgaagagaaattattcccacctgctatgagtcaggcttaaggaatctcttcaatagtgtctctttagtaaaataccaaacatgtctttgtatcaaggaacttaaaatttctcaacaattgtattttgaacactgttaccctaaaagtgctgtctcttcaagtcatcttttgcaggaagtgagccaagatttgttctagactcccattttgcaaaaggcttactttccacttctgggctgtattttgatgtctcatcttcattgttttcactcttaacttagagctgcttcaccagtattggggtcagactggccatcagcacctgagcgtgctgagctccaggtatagtggaccccagggtgcctcataccagccagttagagagcataccttttatttttcagggcagaatgaccagtggttctgagtttgagtttggacagcttcaaagagtggtccgttcaaatgtcaaagcaaggtgcctttggtggctttgtgaagggtgaaaatcagtgatgggacatttactaagtatttcttttttttttttttttttttagttgttgagacagagtttcactcttgttgcccaggctggagtgaaatggtgcgatctcggttcaccgcaacctccacatcccaggttcaagtgattctcctgcctcagcctcctgagtagctaggattacaggcatgtgccaccatgtaattagcccggctaattttgtatttttagtagagacgggatttctccatgttgatcaggctggtcatgaactcctgacctcaggtgatctgcctgcctcagcctcccaaagtgctgctgggattacaggcgtgagccaccactcccggctaagttagtatttctttaatcttaatgctttaaactaagccacttggatcctgaataatttaaatcttgagctacattggtaagtaataaattatttaaggccaggaattcctgtagttttcatggagtctgtagctttattaaaaaataaatcactgccaggcttcattcttccatatgatcctctaatggtcaaggaattcatttggctccttgatacatcagtcctcaatattactttctaggtattttatggccagattgcttatatgagtggtcttttggtttggtagtaggtttttatttttaatttctgtactaatgaaattcctgactttaatttctgaaaaccaaaaactctccaagtgtatttatttatattttttttaatagagacgaggtcttgctatgttgcccaggctggtcccaaactcctggcctcaagcagtccttccaccttggcctcccaaagtgctgggattatcaatatgagccaccatgccagatttgttcatttttaaacatttttatctcttcaagtcatcttttgatcttttaaaaagcaccttcaaacagctgcaccttccatttgcactaggaaatgaaggtagtgatgggattggcaatgttcctggcagatgtttcagcccaaaagctcttctacagaccggtttagagctggtgccctatgagaatattagggagcttttattttaaattgaactttacccttgtccatgcaaggcattcctcctgaatgcatccatgaatttgtttacttttgcgtcaaacatatgagccattgtcatgctcagcctgtgccaccattgctctgtctgatgtatgtaatcatacaagacctgattttggttctaacacagtggtctttgactatcaacattgatgtttttagagatgggttcttctggttgatacagactatgcattgcgtttagcagatggggtaaaactggcctaaaacaagtctttgcagaatacatgccaatttccaaaaaaaaaaaaaaatttgttgctcaggtgttgcacaatttttatctaacactgaggctatcagctccaactaaacaacatttcagtgggtgaggctgccctaacttccattaggggccatggtctcactgccatcacttattagccatgagaatttggttgtagttttcaggtaggttggtttcttcctcatttgcagcttgttgatacttgttcctttttatttattaacatcccaatcaatttgcagctgccatcattacataaatatttttctgttataaaaagaagtgtgatctgtttttttagtgatttcctttgtttgggaatagagattggaagcacatactcagacctgttttgttaactagaattctttaaaagctgatgccaaacatctttacagaggaactgtagttcacatccacctgtctgacattgtcccctaaaaacaagtgcagtgtggcagctgctgaatctgtctgttcagtttgtcaaggaggataattatgcttgggagagatctgaaaagaaggtgaatattttgcacttttgatactcttaggaacaaataacttatttggcaaattgtttcttttttatgttttgggtgttgtttttgttttttgactttttttgtattgtgaacaggcactgaagctgatgttattttaagattacagaatggaaaaagaaataaactattttaatgtctgataattatggggtagcccttgcattgcaagatgatgatttgattatggacacattatcaacagaattgaatttgcatggaactcaagacacgcttaagatcaccacagcataactgcagatttcaggaattacagtcatagagggtacatcaacttgaagagtagattgagtcttacaggaagtgagttacaataagtaacattaagagcccagctgccagcctggccaacatggtgaaaccccgtctccactaaaaatacaaaaattagccgggcgtggtgacgcatgaccgtaattccagctactcaggaggctgaggcagcagaattgcttgaacccaggaggcggagattgcagtgagctaagatcgggccactgcactccagcctgggggacagag

SEQ ID NO: 374615 - DNA, 5055 bp, Homo sapiens
acctttaagcgtcacgtgactcccctcgggcttgtcccctcctctttcccctccccaggcccaggcgagcgctggtgtggacgggaagctcccggcccggcgaactaactggagcacggagctgcagccggttgggccggtgtactttcccgctctggaaaggaagagaaatggaagtgagaaagttgagcatttcctggcagttcttgatagttctggttctgatcctgcaaattctgtctgcgttggattttgacccatacagagtcctaggggtcagccgaacagccagtcaggctgatattaaaaaggcttataagaagctcgcccgggaatggcatcctgacaaaaacaaagatcctggagcagaagacaagttcattcaaatcagtaaggcttacgagattctttcaaatgaagaaaagagatcaaattatgatcaatatggagacgctggagagaaccagggctaccagaagcagcaacagcagcgagagtatcgcttccgccatttccatgaaaatttttattttgatgaatccttttttcacttcccttttaattctgaacggcgggactcaattgacgaaaagtatttattgcacttttcacattatgtgaatgaagtggttccagatagcttcaagaaaccctacctcatcaagatcacctccgattggtgctttagctgcattcatatcgagcctgtgtggaaagaagtcattcaagaactggaagaattgggtgtaggaattggcgtggtccatgctgggtatgagagacgcctggcccatcacctaggggcacacagcacgccctctatcctaggaatcattaacgggaaaatctccttcttccacaatgcagttgtccgtgaaaatctgcgacaatttgtagaaagtcttcttccagggaacttggtggagaaagttacaaataaaaattacgtcagattcctctctggctggcagcaagagaataagcctcatgtccttctgtttgaccaaacgcccattgtgccactgttatacaagttgactgcctttgcatacaaagattatttatcatttggatatgtatatgtgggtttgagagggacggaagagatgacaaggcggtacaacatcaatatctacgcccctaccctcttggtctttaaagaacatataaacaggcctgccgatgttatccaggcccgaggtatgaagaagcaaatcattgacgacttcatcacccgaaacaaatatctattggcagccaggctcaccagccagaagttgttccatgaactctgccctgtgaaacggtcgcatcgacagaggaagtactgtgtggttttattgactgctgagactaccaagttgagcaaaccctttgaggctttcctgtcctttgccctggcaaacactcaagacacagtgagatttgtgcatgtctacagcaatcggcagcaggagtttgccgacaccttactaccagacagtgaggcgtttcaagggaaatcagcggtgtctattttagaaaggcgcaacacagcaggaagggtggtgtataaaaccctggaagacccttggattgggagtgagagtgacaaatttatcctcttgggctatctcgaccagctgcgtaaagatccagctcttctgtcctctgaagcagtgcttcctgacctgaccgatgaacttgcccctgtttttctccttcgatggttctactctgcttctgactacatctcagactgctgggatagcatttttcacaacaactggagggaaatgatgcccctgctgtccctgatcttctctgccctcttcatcctcttcggcactgtcatcgttcaggctttcagcgactctaatgatgagcgagagtcaagccctccagaaaaagaggaagcccaagagaagactgggaaaactgagccaagcttcaccaaagaaaacagcagcaagattcctaaaaaaggctttgtggaggtaactgaactcacagatgtaacatacaccagtaacttggtacgtctgaggccaggccacatgaatgtggtcctcatcctgtcgaattctaccaagaccagcctactacagaaatttgctttggaggtctacacatttactgggagcagctgcctacacttctccttcctgagtctagataaacacagagaatggctagaatacttactagaatttgctcaagatgcagctccaatcccaaaccaatatgataagcatttcatggagcgtgactacactggttatgtactggctctgaatggccacaagaaatacttctgcctcttcaagccccaaaagacagtcgaagaggaggaagccatagggtcgtgcagtgatgttgactcttccctctacctgggtgaatctcgagggaaaccttcctgtggccttggatccaggcccatcaaaggaaagttgagcaagctctctttatggatggaacgcctgctggagggctccttacagaggttttatatcccatcatggcctgaactagactgagaggattttccaaagagatttgaactcttcagactttttaacatgcccctgtgaacagttgttgagacagagtttcactcttgttgcccaggctggagtgaaatggtgcgatctcggttcaccgcaacctccacatcccaggttcaagtgattctcctgcctcagcctcctgagtagctaggattacaggcatgtgccaccatgtaattagcccggctaattttgtatttttagtagagacgggatttctccatgttgatcaggctggtcatgaactcctgacctcaggtgatctgcctgcctcagcctcccaaagtgctgctgggattacaggcgtgagccaccactcccggctaagttagtatttctttaatcttaatgctttaaactaagccacttggatcctgaataatttaaatcttgagctacattggtaagtaataaattatttaaggccaggaattcctgtagttttcatggagtctgtagctttattaaaaaataaatcactgccaggcttcattcttccatatgatcctctaaaaatggacacttcctctgaatgctgtatctcatggcacctggtccaactagaaatggtcaaggaattcatttggctccttgatacatcagtcctcaatattactttctaggtattttatggccagattgcttatatgagtggtcttttggtttggtagtaggtttttatttttaatttctgtactaatgaaattcctgactttaatttctgaaaaccaaaaactctccaagtgtatttatttatattttttttaatagagacgaggtcttgctatgttgcccaggctggtcccaaactcctggcctcaagcagtccttccaccttggcctcccaaagtgctgggattatcaatatgagccaccatgccagatttgttcatttttaaacatttttatctcttcaagtcatcttttgatcttttaaaaagcaccttcaaacagctgcaccttccatttgcactaggaaatgaaggtagtgatgggattggcaatgttcctggcagatgtttcagcccaaaagctcttctacagaccggtttagagctggtgccctatgagaatattagggagcttttattttaaattgaactttacccttgtccatgcaaggcattcctcctgaatgcatccatgaatttgtttacttttgcgtcaaacatatgagccattgtcatgctcagcctgtgccaccattgctctgtctgatgtatgtaatcatacaagacctgattttggttctaacacagtggtctttgactatcaacattgatgtttttagagatgggttcttctggttgatacagactatgcattgcgtttagcagatggggtaaaactggcctaaaacaagtctttgcagaatacatgccaatttccaaaaaaaaaaaaaaatttgttgctcaggtgttgcacaatttttatctaacactgaggctatcagctccaactaaacaacatttcagtgggtgaggctgccctaacttccattaggggccatggtctcactgccatcacttattagccatgagaatttggttgtagttttcaggtaggttggtttcttcctcatttgcagcttgttgatacttgttcctttttatttattaacatcccaatcaatttgcagctgccatcattacataaatatttttctgttataaaaagaagtgtgatctgtttttttagtgatttcctttgtttgggaatagagattggaagcacatactcagacctgttttgttaactagaattctttaaaagctgatgccaaacatctttacagaggaactgtagttcacatccacctgtctgacattgtcccctaaaaacaagtgcagtgtggcagctgctgaatctgtctgttcagtttgtcaaggaggataattatgcttgggagagatctgaaaagaaggtgaatattttgcacttttgatactcttaggaacaaataacttatttggcaaattgtttcttttttatgttttgggtgttgtttttgttttttgactttttttgtattgtgaacaggcactgaagctgatgttattttaagattacagaatggaaaaagaaataaactattttaatgtctgataattatggggtagcccttgcattgcaagatgatgatttgattatggacacattatcaacagaattgaatttgcatggaactcaagacacgcttaagatcaccacagcataactgcagatttcaggaattacagtcatagagggtacatcaacttgaagagtagattgagtcttacaggaagtgagttacaataagtaacattaagagcccagctgccagcctggccaacatggtgaaaccccgtctccactaaaaatacaaaaattagccgggcgtggtgacgcatgaccgtaattccagctactcaggaggctgaggcagcagaattgcttgaacccaggaggcggagattgcagtgagctaagatcgggccactgcactccagcctgggggacagag

SEQ ID NO: 374616 - DNA, 446 bp, Homo sapiens
attgatttttttcctattgggaatatgagggtatccacagtcaacgggaaacgaggggaggcccagtcaaccccagcaccccaaggatgattgcttgctcacgggaactgagcagactatgaactcaatagccatagactttggactcccagacaggtgtgacaagcaacagccgggcagatgagggactttacaccagaggccagcagataccacaaagcagatgccttcatgcctgcaggagcccaggggccctctcttcctcaacggccacagaacgaaacagccacactccccatcccccaacatcagatgccatcttagggaaagaagccagagggaggcaaggccatctgagagagtgagcgattatacaagagaagcaattagaatcatcaagtgattacacgagtaaaaatcatcaagtgatttacacaagtgattat

SEQ ID NO: 374617 - DNA, 618 bp, Homo sapiens
gttgccatgagctgagattgtaccactgcactccagcctgggtgacagagcaagactctgtctcaaaaaaaaaaaaaaaaaaaaaaaaaaagtaactgtgtgtgctgtggcagtggcatgggattggtagtggagaagaagcctccaagaagaagaatcaccagggtgtgaggctgcctgtgtgggtgtctggggactctcattccccagggctagacacaggatgagtttctccctctgtgccttggtagaggaagctcattgtgtgaatggattctgtggctaaggcatgactaactgtgccagttcaagaaagtgcagttacggttttttcaggttcagggaacttcacgatatgggaatttccacagggattttggtggccttcggaaacatcagctgggtttggctgtctctttttcatcaggggatgtgtaaagaatttagcttcctatgagaaggctttgtgttcttgttttggtatatccaggcttctaattttattctcccactgttggaagtcactgcatggtgattaagagcagggactcagagtctgtctgcctcttgccagctctgtgaacttgggcaagttaagttctccaagactctgtgaaa

SEQ ID NO: 374618 - DNA, 912 bp, Homo sapiens
gagatcacaccaccgcacctcagcctgggcaacagagcaagaccctgtctcaaaaaaaagggaaaatatgattatttaaattcatctagtcaacccaaactttttctatataatgaaacagcatattgaattttcctctcaaaagtttattcatttttgttattcccccaaatagcattcctttaaggacgatggcatttgcttccttcttccctgctctctcaaatagaggtggttgaaagtccttccagaattccctttcttgtttctcctactactttaggatcaccacagatgatgaagatggaaaagcttctctaaaacatgggctcattgttgaaaatgataggttttactcaaggggactaatcagtaatatgccagcctcatatcagggactggggacattttctgtcattgcagactctctgcatgataagtttttcagttctcaattcaagggaagacctttggttgactgcagtgcgtatgcctgactgtgttatatttcagctgtttctccttttccttctgaccccctttccttcccaaagaccataatgttctttcttagtttaggaaaagagtcacttgaaaatttgatcaagggctcatacttgaattattaactctttcttctgatgccctaaatacttacatttcttgatgtccacaccttttcacaaatgcttatcttattattccttcttacttactcttctgtgaataaagtctgatggatttattttttaccatttttaatgaataaatgatttcaaccattacttttccgtactatttttatgaataaatgatttcaaccattaaaaaaaaaaaacacacgcaaaacaataacaaaacacaaaaaaaaagggggggcgctaaagatcccggggggcaaaaaaacaacca

SEQ ID NO: 374619 - DNA, 175 bp, Homo sapiens
cagatctgaacttttcctttaaaatcagaaaaggtttaattttaatcgtgaaaatattatcatcattgggtaacagctgacactctattctgtttactactagctatttaatgatttgacttctatatgtcattcttcagtattcctaaaattcagtttttatgtatggtattat

SEQ ID NO: 374620 - DNA, 413 bp, Homo sapiens
ttatctctgctatcgaaagcacaaggaggaggaattgcagctggccactagggggagcctcattcacggatcttatggaatcaagtttaggaggaccaagtgtcgccacgtctaggcttcctgggcactttgacaccatccaggcttcttgtgaggaggaggtatcaacagctgtgcccactgggaggctttcagatgcagcatccaccaaggaatacaccgactaacacacatgacagcctgaactagcaacctgcatcaacacccctgcagaaaagcagtgcatttcaactgctcatttaataagtatttgaattcataattacaaaacatcttctgtaattaaaccaccatatggcatttaaaatattttggggggacaaagagtagcaaagaattatattggatattga

SEQ ID NO: 374621 - DNA, 399 bp, Homo sapiens
ttttaagggtcatcgaccggccataccgaacaacccactaccctccttgtcatagtcaactattgagccctgtgtcattcccctcatttctacaagatcccggcacctgggtcatggtcaccctctcccatactacctcagctgtgattctcagtgattttgctttccgtagagaaatccctgcaaagccctggactgcccattccatgacctcctcttttctggggattgttttcctccatcctaactcatccactctcccttatagtcatgcccaagacctttttacacaagtaactgcactctgttatctcaattctaagaatcctactttccaaccaccacttctcattttcagtttgccaattccaaaaattattgacccctctataaactaaa

SEQ ID NO: 374622 - DNA, 2292 bp, Homo sapiens
  misc_feature (5)..(5): n is a, c, g, or t
ggacnagcggggcgccgctgagccaagtgggccacccgggcacggccacgctcccgggtcacgtgacacggagggggccgaattctgctggaggcagcgccatatcctggaggtgaaggtaccacctcatggagacccccgcggccgccgcccccgctgggagcttattcccctccttcctgctcctggcctgcgggacgctggtggccgccttgctgggcgccgctcaccgcctggggctcttctatcagctgctgcacaaggtggacaaggcaagcgtccggcatggcggagagaacgtggccgctgtgctgagggcccatggtgtgcggttcatcttcacgctggtcggtgggcacatttccccgctgctggtggcctgtgagaaactgggcatccgtgtggtggacacacgccatgaggtcacggccgtctttgctgctgatgctatggcccgcctgtccgggacggtgggcgtggcggcagtgacagcaggccctggcctcaccaacacggtgactgcggtgaagaatgctcagatggctcagtccccaatcctgcttctgggtggggctgccagcactctgctgcagaaccggggtgcgctccaggctgttgatcagctgtcccttttccggccactctgtaagttttgtgtgtctgtgcggagggtgcgggacattgtgcccaccctgagggccgcgatggctgccgcccagtcgggcaccccaggtccggtgtttgtggagctgcccgttgacgtgctgtacccctacttcatggtccagaaggagatggtgccagccaagccacccaagggcctcgtgggccgagtggtctcctggtatttagagaattacctggccaacctctttgcaggagcctgggagcctcagcccgagggaccgctgcccctggacatcccccaggcttccccgcagcaggttcagcgctgtgtggagatcctgagccgggccaagaggcctctgatggtgctggggagtcaggccctgctcaccccaacgtctgccgacaagcttcgggctgccgtggagaccttgggtgttccctgcttccttggagggatggcacgggggctgttaggccgcaaccaccccctccacatccgggagaaccgcagtgcggccctgaagaaggcggatgtcattgtcctagcaggaactgtgtgtgacttccgcctatcctatggccgtgtcctcagccacagcagcaagatcatcatcgtcaatcgtaatcgggaagagatgttgctcaactcagacatcttctggaagccccaggaggctgtgcagggagatgtgggttccttcgtgctgaagttagtggagggccttcagggccagacctgggccccagactgggtggaggagctgcgggaagccgaccggcagaaggagcagacctttcgggagaaggcagcgatgcctgtggcccagcacctgaacccagtgcaggtgctgcagctggtggaggaaacgctacctgacaactcaattctggtggtggatggcggggacttcgtgggcactgctgcccatctggtacagccccgcggccccctgcgctggctcgatcctggggcctttgggactctgggagttggtgcaggatttgcacttggggccaagctgtgccggccagatgctgaggtctggtgcctgtttggggacggagcttttggctacagcctcatcgaatttgatacattcgtcagacacaagatcccagtgatggccttggtagggaatgatgctggctggacacagatttctcgggagcaggtgccctctctgggcagcaacgtggcctgtggcctggcctacactgattatcacaaggcagccatgggtctgggggcccggggcttgctgctctcacgggagaacgaggatcaggtggtcaaggtgctgcacgatgcccagcagcagtgccgagacggccacccggttgtggtcaacatcctcattgggaggacggacttccgcgatggctccattgctgtatagggccttgtgggtcaggacgcttggctgccttcctgcccctggactgtgtccagctggtttggagtctcatcattgcttgccctgggcctatcccatgaggcccagtgactccacaacctccctgaggaggggatggaggggtcaaatctcagagaggctctcttgtgagctcttggaccctcctcttcacggacccaactgtgccgtttgtcccctctcttatggagactgaataaaccacctctggcccatgtaggcccaagta

SEQ ID NO: 374623 - DNA, 1042 bp, Homo sapiens
acggagaggcatggcttcaccccgagcctaggcgcacaaagggcgtggtctggcagggttgggggcgtggccgcacagaaactggcggcaagggtcgtggccctggatcctgctgcgagaaggggcgcgatttcttctggagaggttccctgtcgcgcccaagtctgggaagtgccctttctctcttaggtaccacctcatggagacccccgcggccgccgcccccgctgggagcttattcccctccttcctgctcctggcctgcgggacgctggtggccgccttgctgggcgccgctcaccgcctggggctcttctatcagctgctgcacaaggtggacaaggcaagcgtccggcatggcggagagaacgtggccgctgtgctgagggcccatggtgtgcggttcatcttcacgctggtcggtgggcacatttccccgctgctggtggcctgtgagaaactgggcatccgtgtggtggacacacgccatgaggtcacggccgtctttgctgctgatgctatggcccgcctgtccgggacggtgggcgtggcggcagtgacagcaggccctggcctcaccaacacggtgactgcggtgaagaatgctcagatggctcagtccccaatcctgcttctgggtggggctgccagcactctgctgcagaaccggggtgcgctccaggctgttgatcagctgtcccttttccggccactccggttgtggtcaacatcctcattgggaggacggacttccgcgatggctccattgctgtatagggccttgtgggtcaggacgcttggctgccttcctgcccctggactgtgtccagctggtttggagtctcatcattgcttgccctgggcctatcccatgaggcccagtgactccacaacctccctgaggaggggatggaggggtcaaatctcagagaggctctcttgtgagctcttggaccctcctcttcacggacccaactgtgccgtttgtcccctctcttatggagactgaataaaccacctctggcccatgtaggcccaagta

SEQ ID NO: 374624 - DNA, 2568 bp, Homo sapiens
  misc_feature (5)..(5): n is a, c, g, or t
ggacnagcggggcgccgctgagccaagtgggccacccgggcacggccacgctcccgggtcacgtgacacggagggggccgaattctgctggaggcagcgccatatcctggaggtgaaggtgaatagcgtcgggggtcgagctggtgtgggagaaccacatcctgatgcgatgtgacctcgacccagcctggcccggggtcggggatcaggctcgggcccgtgcgctctttaagggagaggcgtgggttgcgtggagggtcgcgcccgctaacccgggggcgtgacctcgtgcctcttggtgacgtaacatggggcgggctcactactggggctgagatttggggtccggttgtggaaagagaggcggggcttccgcctgtccattgacaagtaggtaccacctcatggagacccccgcggccgccgcccccgctgggagcttattcccctccttcctgctcctggcctgcgggacgctggtggccgccttgctgggcgccgctcaccgcctggggctcttctatcagctgctgcacaaggtggacaaggcaagcgtccggcatggcggagagaacgtggccgctgtgctgagggcccatggtgtgcggttcatcttcacgctggtcggtgggcacatttccccgctgctggtggcctgtgagaaactgggcatccgtgtggtggacacacgccatgaggtcacggccgtctttgctgctgatgctatggcccgcctgtccgggacggtgggcgtggcggcagtgacagcaggccctggcctcaccaacacggtgactgcggtgaagaatgctcagatggctcagtccccaatcctgcttctgggtggggctgccagcactctgctgcagaaccggggtgcgctccaggctgttgatcagctgtcccttttccggccactctgtaagttttgtgtgtctgtgcggagggtgcgggacattgtgcccaccctgagggccgcgatggctgccgcccagtcgggcaccccaggtccggtgtttgtggagctgcccgttgacgtgctgtacccctacttcatggtccagaaggagatggtgccagccaagccacccaagggcctcgtgggccgagtggtctcctggtatttagagaattacctggccaacctctttgcaggagcctgggagcctcagcccgagggaccgctgcccctggacatcccccaggcttccccgcagcaggttcagcgctgtgtggagatcctgagccgggccaagaggcctctgatggtgctggggagtcaggccctgctcaccccaacgtctgccgacaagcttcgggctgccgtggagaccttgggtgttccctgcttccttggagggatggcacgggggctgttaggccgcaaccaccccctccacatccgggagaaccgcagtgcggccctgaagaaggcggatgtcattgtcctagcaggaactgtgtgtgacttccgcctatcctatggccgtgtcctcagccacagcagcaagatcatcatcgtcaatcgtaatcgggaagagatgttgctcaactcagacatcttctggaagccccaggaggctgtgcagggagatgtgggttccttcgtgctgaagttagtggagggccttcagggccagacctgggccccagactgggtggaggagctgcgggaagccgaccggcagaaggagcagacctttcgggagaaggcagcgatgcctgtggcccagcacctgaacccagtgcaggtgctgcagctggtggaggaaacgctacctgacaactcaattctggtggtggatggcggggacttcgtgggcactgctgcccatctggtacagccccgcggccccctgcgctggctcgatcctggggcctttgggactctgggagttggtgcaggatttgcacttggggccaagctgtgccggccagatgctgaggtctggtgcctgtttggggacggagcttttggctacagcctcatcgaatttgatacattcgtcagacacaagatcccagtgatggccttggtagggaatgatgctggctggacacagatttctcgggagcaggtgccctctctgggcagcaacgtggcctgtggcctggcctacactgattatcacaaggcagccatgggtctgggggcccggggcttgctgctctcacgggagaacgaggatcaggtggtcaaggtgctgcacgatgcccagcagcagtgccgagacggccacccggttgtggtcaacatcctcattgggaggacggacttccgcgatggctccattgctgtatagggccttgtgggtcaggacgcttggctgccttcctgcccctggactgtgtccagctggtttggagtctcatcattgcttgccctgggcctatcccatgaggcccagtgactccacaacctccctgaggaggggatggaggggtcaaatctcagagaggctctcttgtgagctcttggaccctcctcttcacggacccaactgtgccgtttgtcccctctcttatggagactgaataaaccacctctggcccatgtaggcccaagta

SEQ ID NO: 374625 - DNA, 2100 bp, Homo sapiens
  misc_feature (1)..(1): n is a, c, g, or t
naaccttacggctaggtacgaggctgggtgttggtcgcgcccaagtctgggaagtgccctttctctcttaggtggacaaggcaagcgtccggcatggcggagagaacgtggccgctgtgctgagggcccatggtgtgcggttcatcttcacgctggtcggtgggcacatttccccgctgctggtggcctgtgagaaactgggcatccgtgtggtggacacacgccatgaggtcacggccgtctttgctgctgatgctatggcccgcctgtccgggacggtgggcgtggcggcagtgacagcaggccctggcctcaccaacacggtgactgcggtgaagaatgctcagatggctcagtccccaatcctgcttctgggtggggctgccagcactctgctgcagaaccggggtgcgctccaggctgttgatcagctgtcccttttccggccactctgtaagttttgtgtgtctgtgcggagggtgcgggacattgtgcccaccctgagggccgcgatggctgccgcccagtcgggcaccccaggtccggtgtttgtggagctgcccgttgacgtgctgtacccctacttcatggtccagaaggagatggtgccagccaagccacccaagggcctcgtgggccgagtggtctcctggtatttagagaattacctggccaacctctttgcaggagcctgggagcctcagcccgagggaccgctgcccctggacatcccccaggcttccccgcagcaggttcagcgctgtgtggagatcctgagccgggccaagaggcctctgatggtgctggggagtcaggccctgctcaccccaacgtctgccgacaagcttcgggctgccgtggagaccttgggtgttccctgcttccttggagggatggcacgggggctgttaggccgcaaccaccccctccacatccgggagaaccgcagtgcggccctgaagaaggcggatgtcattgtcctagcaggaactgtgtgtgacttccgcctatcctatggccgtgtcctcagccacagcagcaagatcatcatcgtcaatcgtaatcgggaagagatgttgctcaactcagacatcttctggaagccccaggaggctgtgcagggagatgtgggttccttcgtgctgaagttagtggagggccttcagggccagacctgggccccagactgggtggaggagctgcgggaagccgaccggcagaaggagcagacctttcgggagaaggcagcgatgcctgtggcccagcacctgaacccagtgcaggtgctgcagctggtggaggaaacgctacctgacaactcaattctggtggtggatggcggggacttcgtgggcactgctgcccatctggtacagccccgcggccccctgcgctggctcgatcctggggcctttgggactctgggagttggtgcaggatttgcacttggggccaagctgtgccggccagatgctgaggtctggtgcctgtttggggacggagcttttggctacagcctcatcgaatttgatacattcgtcagacacaagatcccagtgatggccttggtagggaatgatgctggctggacacagatttctcgggagcaggtgccctctctgggcagcaacgtggcctgtggcctggcctacactgattatcacaaggcagccatgggtctgggggcccggggcttgctgctctcacgggagaacgaggatcaggtggtcaaggtgctgcacgatgcccagcagcagtgccgagacggccacccggttgtggtcaacatcctcattgggaggacggacttccgcgatggctccattgctgtatagggccttgtgggtcaggacgcttggctgccttcctgcccctggactgtgtccagctggtttggagtctcatcattgcttgccctgggcctatcccatgaggcccagtgactccacaacctccctgaggaggggatggaggggtcaaatctcagagaggctctcttgtgagctcttggaccctcctcttcacggacccaactgtgccgtttgtcccctctcttatggagactgaataaaccacctctggcccatgtaggcccaagta

SEQ ID NO: 374626 - DNA, 2451 bp, Homo sapiens
  misc_feature (5)..(5): n is a, c, g, or t
ggacnagcggggcgccgctgagccaagtgggccacccgggcacggccacgctcccgggtcacgtgacacggagggggccgaattctgctggaggcagcgccatatcctggaggtgaaggtaccacctcatggagacccccgcggccgccgcccccgctgggagcttattcccctccttcctgctcctggcctgcgggacgctggtggccgccttgctgggcgccgctcaccgcctggggctcttctatcagctgctgcacaaggtggacaaggcaagcgtccggcatggcggagagaacgtggccgctgtgctgagggcccatggtgtgcggttcatcttcacgctggtcggtgggcacatttccccgctgctggtggcctgtgagaaactgggcatccgtgtggtggacacacgccatgaggtcacggccgtctttgctgctgatgctatggcccgcctgtccgggacggtgggcgtggcggcagtgacagcaggccctggcctcaccaacacggtgactgcggtgaagaatgctcagatggctcagtccccaatcctgcttctgggtggggctgccagcactctgctgcagaaccggggtgcgctccaggctgttgatcagctgtcccttttccggccactctgtaagttttgtgtgtctgtgcggagggtgcgggacattgtgcccaccctgagggccgcgatggctgccgcccagtcgggcaccccaggtccggtgtttgtggagctgcccgttgacgtgctgtacccctacttcatggtccagaaggagatggtgccagccaagccacccaagggcctcgtgggccgagtggtctcctggtatttagagaattacctggccaacctctttgcaggagcctgggagcctcagcccgagggaccgctgcccctggacatcccccaggcttccccgcagcaggttcagcgctgtgtggagatcctgagccgggccaagaggcctctgatggtgctggggagtcaggccctgctcaccccaacgtctgccgacaagcttcgggctgccgtggagaccttgggtgttccctgcttccttggagggatggcacgggggctgttaggccgcaaccaccccctccacatccgggagaaccgcagtgcggccctgaagaaggcggatgtcattgtcctagcaggaactgtgtgtgacttccgcctatcctatggccgtgtcctcagccacagcagcaagatcatcatcgtcaatcgtaatcgggaagagatgttgctcaactcagacatcttctggaagccccaggaggctgtgcagggagatgtgggttccttcgtgctgaagttagtggagggccttcagggccagacctgggccccagactgggtggaggagctgcgggaagccgaccggcagaaggagcagacctttcgggagaaggcagcgatgcctgtggcccagcacctgaacccagtgcaggtgctgcagctggtggaggaaacgctacctgacaactcaattctggtggtggatggcggggacttcgtgggcactgctgcccatctggtacagccccgcggccccctgcgctggctcgatcctggtaaggaagggcccccgcctggggcagtgggcaccatccatcaggacgccttcacacccacctgctcttggtcctcttaggggcctttgggactctgggagttggtgcaggatttgcacttggggccaagctgtgccggccagatgctgaggtgaggcactggagttgggagacttgctgctctctaggtcctgatccaccctaaccatcctgggtcccctcccgactaggtctggtgcctgtttggggacggagcttttggctacagcctcatcgaatttgatacattcgtcagacacaagatcccagtgatggccttggtagggaatgatgctggctggacacagatttctcgggagcaggtgccctctctgggcagcaacgtggcctgtggcctggcctacactgattatcacaaggcagccatgggtctgggggcccggggcttgctgctctcacgggagaacgaggatcaggtggtcaaggtgctgcacgatgcccagcagcagtgccgagacggccacccggttgtggtcaacatcctcattgggaggacggacttccgcgatggctccattgctgtatagggccttgtgggtcaggacgcttggctgccttcctgcccctggactgtgtccagctggtttggagtctcatcattgcttgccctgggcctatcccatgaggcccagtgactccacaacctccctgaggaggggatggaggggtcaaatctcagagaggctctcttgtgagctcttggaccctcctcttcacggacccaactgtgccgtttgtcccctctcttatggagactgaataaaccacctctggcccatgtaggcccaagta

SEQ ID NO: 374627 - DNA, 2366 bp, Homo sapiens
  misc_feature (5)..(5): n is a, c, g, or t
ggacnagcggggcgccgctgagccaagtgggccacccgggcacggccacgctcccgggtcacgtgacacggagggggccgaattctgctggaggcagcgccatatcctggaggtgaaggtgaatagcgtcgggggtcgagctggtgtgggagaaccacatcctgatgcgatgtgacctcgacccagcctggcccggggtcggggatcaggctcgggcccgtgcgctctttaagggagaggcgtgggttgcgtggagggtcgcgcccgctaacccgggggcgtgacctcgtgcctcttggtgacgtaacatggggcgggctcactactggggctgagatttggggtccggttgtggaaagagaggcggggcttccgcctgtccattgacaagtaggtaccacctcatggagacccccgcggccgccgcccccgctgggagcttattcccctccttcctgctcctggcctgcgggacgctggtggccgccttgctgggcgccgctcaccgcctggggctcttctatcagctgctgcacaagggacggtgggcgtggcggcagtgacagcaggccctggcctcaccaacacggtgactgcggtgaagaatgctcagatggctcagtccccaatcctgcttctgggtggggctgccagcactctgctgcagaaccggggtgcgctccaggctgttgatcagctgtcccttttccggccactctgtaagttttgtgtgtctgtgcggagggtgcgggacattgtgcccaccctgagggccgcgatggctgccgcccagtcgggcaccccaggtccggtgtttgtggagctgcccgttgacgtgctgtacccctacttcatggtccagaaggagatggtgccagccaagccacccaagggcctcgtgggccgagtggtctcctggtatttagagaattacctggccaacctctttgcaggagcctgggagcctcagcccgagggaccgctgcccctggacatcccccaggcttccccgcagcaggttcagcgctgtgtggagatcctgagccgggccaagaggcctctgatggtgctggggagtcaggccctgctcaccccaacgtctgccgacaagcttcgggctgccgtggagaccttgggtgttccctgcttccttggagggatggcacgggggctgttaggccgcaaccaccccctccacatccgggagaaccgcagtgcggccctgaagaaggcggatgtcattgtcctagcaggaactgtgtgtgacttccgcctatcctatggccgtgtcctcagccacagcagcaagatcatcatcgtcaatcgtaatcgggaagagatgttgctcaactcagacatcttctggaagccccaggaggctgtgcagggagatgtgggttccttcgtgctgaagttagtggagggccttcagggccagacctgggccccagactgggtggaggagctgcgggaagccgaccggcagaaggagcagacctttcgggagaaggcagcgatgcctgtggcccagcacctgaacccagtgcaggtgctgcagctggtggaggaaacgctacctgacaactcaattctggtggtggatggcggggacttcgtgggcactgctgcccatctggtacagccccgcggccccctgcgctggctcgatcctggggcctttgggactctgggagttggtgcaggatttgcacttggggccaagctgtgccggccagatgctgaggtctggtgcctgtttggggacggagcttttggctacagcctcatcgaatttgatacattcgtcagacacaagatcccagtgatggccttggtagggaatgatgctggctggacacagatttctcgggagcaggtgccctctctgggcagcaacgtggcctgtggcctggcctacactgattatcacaaggcagccatgggtctgggggcccggggcttgctgctctcacgggagaacgaggatcaggtggtcaaggtgctgcacgatgcccagcagcagtgccgagacggccacccggttgtggtcaacatcctcattgggaggacggacttccgcgatggctccattgctgtatagggccttgtgggtcaggacgcttggctgccttcctgcccctggactgtgtccagctggtttggagtctcatcattgcttgccctgggcctatcccatgaggcccagtgactccacaacctccctgaggaggggatggaggggtcaaatctcagagaggctctcttgtgagctcttggaccctcctcttcacggacccaactgtgccgtttgtcccctctcttatggagactgaataaaccacctctggcccatgtaggcccaagta

SEQ ID NO: 374628 - DNA, 1978 bp, Homo sapiens
  misc_feature (5)..(5): n is a, c, g, or t
ggacnagcggggcgccgctgagccaagtgggccacccgggcacggccacgctcccgggtcacgtgacacggagggggccgaattctgctggaggcagcgccatatcctggaggtgaaggtaccacctcatggagacccccgcggccgccgcccccgctgggagcttattcccctccttcctgctcctggcctgcgggacgctggtggccgccttgctgggcgccgctcaccgcctggggctcttctatcagctgctgcacaaggtggacaaggcaagcgtccggcatggcggagagaacgtggccgctgtgctgagggcccatggtgtgcggttcatcttcacgctggtcggtgggcacatttccccgctgctggtggcctgtgagaaactgggcatccgtgtggtggacacacgccatgaggtcacggccgtctttgctgctgatgctatggcccgcctgtccgggacggtgggcgtggcggcagtgacagcaggccctggcctcaccaacacggtgactgcggtgaagaatgctcagatggctcagtccccaatcctgcttctgggtggggctgccagcactctgctgcagaaccggggtgcgctccaggctgttgatcagctgtcccttttccggccactctgtaagttttgtgtgtctgtgcggagggtgcgggacattgtgcccaccctgagggccgcgatggctgccgcccagtcgggcaccccaggtccggtgtttgtggagctgcccgttgacgtgctgtacccctacttcatggtccagaaggagatggtgccagccaagccacccaagggcctcgtgggccgagtggtctcctggtatttagagaattacctggccaacctctttgcaggagcctgggagcctcagcccgagggaccgctgcccctggacatcccccaggcttccccgcagcaggttcagcgctgtgtggagatcctgagccgggccaagaggcctctgatggtgctggggagtcaggccctgctcaccccaacgtctgccgacaagcttcgggctgccgtggagaccttgggtgttccctgcttccttggagggatggcacgggggctgttaggccgcaaccaccccctccacatccgggagaaccgcagtgcggccctgaagaaggcggatgtcattgtcctagcaggaactgtgtgtgacttccgcctatcctatggccgtgtcctcagccacagcagcaagatcatcatcgtcaatcgtaatcgggaagagatgttgctcaactcagacatcttctggaagccccaggaggctgtgcagggagatgtgggttccttcgtgctgaagttagtggagggccttcagggccagacctgggccccagactgggtggaggagctgcgggaagccgaccggcagaaggagcagacctttcgggagaaggcagcgatgcctgtggcccagcacctgaacccagtgcaggtgctgcagctggtggaggaaacgctacctgacaactcaattctggtggtggatggcggggacttcgtgggcactgctgcccatctggtacagccccgcggccccctgcgctggctcgatcctggtctggtgcctgtttggggacggagcttttggctacagcctcatcgaatttgatacattcgtcagacacaagatcccagtgatggccttggtagggaatgatgctggctggacacagatttctcgggagcaggtgccctctctgggcagcaacgtggcctgtggcctggcctacactgtctcatcattgcttgccctgggcctatcccatgaggcccagtgactccacaacctccctgaggaggggatggaggggtcaaatctcagagaggctctcttgtgagctcttggaccctcctcttcacggacccaactgtgccgtttgtcccctctcttatggagactgaataaaccacctctggcccatgtaggcccaagta

SEQ ID NO: 374629 - DNA, 1228 bp, Homo sapiens
  misc_feature (5)..(5): n is a, c, g, or t
ggacnagcggggcgccgctgagccaagtgggccacccgggcacggccacgctcccgggtcacgtgacacggagggggccgaattctgctggaggcagcgccatatcctggaggtgaaggtaccacctcatggagacccccgcggccgccgcccccgctgggagcttattcccctccttcctgctcctggcctgcgggacgctggtggccgccttgctgggcgccgctcaccgcctggggctcttctatcagctgctgcacaaggtggacaaggcaagcgtccggcatggcggagagaacgtggccgctgtgctgagggcccatggtgtgcggttcatcttcacgctggtcggtgggcacatttccccgctgctggtggcctgtgagaaactgggcatccgtgtggtggacacacgccatgaggtcacggccgtctttgctgctgatgctatggcccgcctgtccgggacggtgggcgtggcggcagtgacagcaggccctggcctcaccaacacggtgactgcggtgaagaatgctcagatggctcagtccccaatcctgcttctgggtggggctgccagcactctgctgcagaaccggggtgcgctccaggctgttgatcagctgtcccttttccggccactctgtaagttttgtgtgtctgtgcggagggtgcgggacattgtgcccaccctgagggccgcgatggctgccgcccagtcgggcaccccaggtccggtgtttgtggagctgcccgttgacgtgctgtacccctacttcatggtccagaaggagatggtgccagccaagccacccaagggcctcgtgggccgagtggtctcctggtatttagagaattacctggccaacctctttgcaggagcctgggagcctcagcccgagggaccgctgcccctggacatcccccaggcttccccgcagcaggttcagcgctgtgtggagatcctgagccgggccaagaggcctctgatggtgctggggagtcaggccctgctcaccccaacgtctgccgacaagcttcgggctgccgtggagaccttgggtgttccctgcttccttggagggatggcacgggggctgttaggccgcaaccaccccctccacatccgggagaaccgcagtgcggccctgaaggccctccactaacttcagcacgaaggaacccacatctccctgcacagcctcctggggcttccagaagatgtctg

SEQ ID NO: 374630 - DNA, 544 bp, Homo sapiens
gtgagggcattgcagagagggctggggactggttggactgtgggctagagtgtctgtgagggtaggggtttttcagaggtggaagaatggccaagagagtgggcatggctgtgatgggctctgtgttccagggacggtgggcgtggcggcagtgacagcaggccctggcctcaccaacacggtgactgcggtgaagaatgctcagatggctcagtccccaatcctgcttctgggtggggctgccagcactctgctgcaggtacccagtccttgggggccagtgggggcctaggggggcttgaagggctcatgcgataaccctgccacacctctgtctttgccagaaccggggtgcgctccaggctgttgatcagctgtcccttttccggccactctgtaagttttgtgtgtctgtgcggagggtgcgggacattgtgcccaccctgagggccgcgatggctgccgcccagtcgggcaccccaggtaggtggaggatggtgatgctgagcagtgctggggccgaggggctggggacatcctcgtg

SEQ ID NO: 374631 - DNA, 528 bp, Homo sapiens
aggatactggagggcagggaggagtcacagcagatggctccctgccatctgctctgcgtgcgttgtgcccctggccaaaccccctgggttatataaccctctcctctctccctgattgccctgccatcctggagacaggcagtgtaacagtggggcacttaagagcgtgggttctattgaactttcagtcttacttgggcaagccttgatgtcctcagctgtaagagggatgtaatgacaagaggatctgataagatgttatgccttggtttgagcctggcatgtagtataatatatgcctaaccaagaccaagcttctcttgacctctcaccctgctcctgcccccttacctggggcagggggattgccccctttcccagctgccctctgccctggcctttaactttattgctccacctgtccttgggcccagggtggacaaggcaagcgtccggcatggcggagagaacgtggccgctgtgctgagggcccatggtgtgcggttcatcttcacgctggtcggtggg

SEQ ID NO: 374632 - DNA, 2246 bp, Homo sapiens
  misc_feature (20)..(20): n is a, c, g, or t
  misc_feature (22)..(22): n is a, c, g, or t
taggcaagtacgaggccggngntgatcggccgaggattctgctggaggcagcgccatatcctggaggtgaaggtaccacctcatggagacccccgcggccgccgcccccgctgggagcttattcccctccttcctgctcctggcctgcgggacgctggtggccgccttgctgggcgccgctcaccgcctggggctcttctatcagctgctgcacaaggtggacaaggcaagcgtccggcatggcggagagaacgtggccgctgtgctgagggcccatggtgtgcggttcatcttcacgctggtcggtgggcacatttccccgctgctggtggcctgtgagaaactgggcatccgtgtggtggacacacgccatgaggtcacggccgtctttgctgctgatgctatggcccgcctgtccgggacggtgggcgtggcggcagtgacagcaggccctggcctcaccaacacggtgactgcggtgaagaatgctcagatggctcagtccccaatcctgcttctgggtggggctgccagcactctgctgcagaaccggggtgcgctccaggctgttgatcagctgtcccttttccggccactctgtaagttttgtgtgtctgtgcggagggtgcgggacattgtgcccaccctgagggccgcgatggctgccgcccagtcgggcaccccaggtccggtgtttgtggagctgcccgttgacgtgctgtacccctacttcatggtccagaaggagatggtgccagccaagccacccaagggcctcgtgggccgagtggtctcctggtatttagagaattacctggccaacctctttgcaggagcctgggagcctcagcccgagggaccgctgcccctggacatcccccaggcttccccgcagcaggttcagcgctgtgtggagatcctgagccgggccaagaggcctctgatggtgctggggagtcaggccctgctcaccccaacgtctgccgacaagcttcgggctgccgtggagaccttgggtgttccctgcttccttggagggatggcacgggggctgttaggccgcaaccaccccctccacatccgggagaaccgcagtgcggccctgaagaaggcggatgtcattgtcctagcaggaactgtgtgtgacttccgcctatcctatggccgtgtcctcagccacagcagcaagatcatcatcgtcaatcgtaatcgggaagagatgttgctcaactcagacatcttctggaagccccaggaggctgtgcagggagatgtgggttccttcgtgctgaagttagtggagggccttcagggccagacctgggccccagactgggtggaggagctgcgggaagccgaccggcagaaggagcagacctttcgggagaaggcagcgatgcctgtggcccagcacctgaacccagtgcaggtgctgcagctggtggaggaaacgctacctgacaactcaattctggtggtggatggcggggacttcgtgggcactgctgcccatctggtacagccccgcggccccctgcgctggctcgatcctggggcctttgggactctgggagttggtgcaggatttgcacttggggccaagctgtgccggccagatgctgaggtctggtgcctgtttggggacggagcttttggctacagcctcatcgaatttgatacattcgtcagacacaagatcccagtgatggccttggtagggaatgatgctggctggacacagatttctcgggagcaggtgccctctctgggcagcaacgtggcctgtggcctggcctacactgattatcacaaggcagccatgggtctgggggcccggggcttgctgctctcacgggagaacgaggatcaggtggtcaaggtgctgcacgatgcccagcagcagtgccgagacggccacccggttgtggtcaacatcctcattgggaggacggacttccgcgatggctccattgctgtatagggccttgtgggtcaggacgcttggctgccttcctgcccctggactgtgtccagctggtttggagtctcatcattgcttgccctgggcctatcccatgaggcccagtgactccacaacctccctgaggaggggatggaggggtcaaatctcagagaggctctcttgtgagctcttggaccctcctcttcacggacccaactgtgccgtttgtcccctctcttatggagactgaataaaccacctctggcccatgtaggcccaagta

SEQ ID NO: 374633 - DNA, 1149 bp, Homo sapiens
acggagaggcatggcttcaccccgagcctaggcgcacaaagggcgtggtctggcagggttgggggcgtggccgcacagaaactggcggcaagggtcgtggccctggatcctgctgcgagaaggggcgcgatttcttctggagaggttccctgtcgcgcccaagtctgggaagtgccctttctctcttaggtaccacctcatggagacccccgcggccgccgcccccgctgggagcttattcccctccttcctgctcctggcctgcgggacgctggtggccgccttgctgggcgccgctcaccgcctggggctcttctatcagctgctgcacaaggtggacaaggcaagcgtccggcatggcggagagaacgtggccgctgtgctgagggcccatggtgtgcggttcatcttcacgctggtcggtgggcacatttccccgctgctggtggcctgtgagaaactgggcatccgtgtggtggacacacgccatgaggtcacggccgtctttgctgctgatgctatggcccgcctgtccgggacggtgggcgtggcggcagtgacagcaggccctggcctcaccaacacggtgactgcggtgaagaatgctcagatggctcagtccccaatcctgcttctgggtggggctgccagcactctgctgcagaaccggggtgcgctccaggctgttgatcagctgtcccttttccggccactctgtaagttttgtgtgtctgtgcggagggtgcgggacattgtgcccaccctgagggccgcgatggctgccgcccagtcgggcaccccaggtccggtgtttgtggagctgcccgttgacgtgctgtacccctacttcatggtccagaaggagatggtgccagccaagccacccaagggcctcgtgggccgagtggtctcctggtatttagagatactggcaactctttgaggagctggagctcaggccgaggacgtggcctggattccccagttccgccgaggcacacagggggagacgacgcggcaaggccgagggcgaggaacgcggcccaatcggcaatcgtggggacggtccgctaggggacaggagaaacccacggacaggcaagactcagcatcctcaccaaatggataacactgggcgggggcggaggg

SEQ ID NO: 374634 - DNA, 2363 bp, Homo sapiens
acggagaggcatggcttcaccccgagcctaggcgcacaaagggcgtggtctggcagggttgggggcgtggccgcacagaaactggcggcaagggtcgtggccctggatcctgctgcgagaaggggcgcgatttcttctggagaggttccctgtcgcgcccaagtctgggaagtgccctttctctcttaggtaccacctcatggagacccccgcggccgccgcccccgctgggagcttattcccctccttcctgctcctggcctgcgggacgctggtggccgccttgctgggcgccgctcaccgcctggggctcttctatcagctgctgcacaaggtggacaaggcaagcgtccggcatggcggagagaacgtggccgctgtgctgagggcccatggtgtgcggttcatcttcacgctggtcggtgggcacatttccccgctgctggtggcctgtgagaaactgggcatccgtgtggtggacacacgccatgaggtcacggccgtctttgctgctgatgctatggcccgcctgtccgggacggtgggcgtggcggcagtgacagcaggccctggcctcaccaacacggtgactgcggtgaagaatgctcagatggctcagtccccaatcctgcttctgggtggggctgccagcactctgctgcagaaccggggtgcgctccaggctgttgatcagctgtcccttttccggccactctgtaagttttgtgtgtctgtgcggagggtgcgggacattgtgcccaccctgagggccgcgatggctgccgcccagtcgggcaccccaggtccggtgtttgtggagctgcccgttgacgtgctgtacccctacttcatggtccagaaggagatggtgccagccaagccacccaagggcctcgtgggccgagtggtctcctggtatttagagaattacctggccaacctctttgcaggagcctgggagcctcagcccgagggaccgctgcccctggacatcccccaggcttccccgcagcaggttcagcgctgtgtggagatcctgagccgggccaagaggcctctgatggtgctggggagtcaggccctgctcaccccaacgtctgccgacaagcttcgggctgccgtggagaccttgggtgttccctgcttccttggagggatggcacgggggctgttaggccgcaaccaccccctccacatccgggagaaccgcagtgcggccctgaagaaggcggatgtcattgtcctagcaggaactgtgtgtgacttccgcctatcctatggccgtgtcctcagccacagcagcaagatcatcatcgtcaatcgtaatcgggaagagatgttgctcaactcagacatcttctggaagccccaggaggctgtgcagggagatgtgggttccttcgtgctgaagttagtggagggccttcagggccagacctgggccccagactgggtggaggagctgcgggaagccgaccggcagaaggagcagacctttcgggagaaggcagcgatgcctgtggcccagcacctgaacccagtgcaggtgctgcagctggtggaggaaacgctacctgacaactcaattctggtggtggatggcggggacttcgtgggcactgctgcccatctggtacagccccgcggccccctgcgctggctcgatcctggggcctttgggactctgggagttggtgcaggatttgcacttggggccaagctgtgccggccagatgctgaggtctggtgcctgtttggggacggagcttttggctacagcctcatcgaatttgatacattcgtcagacacaagatcccagtgatggccttggtagggaatgatgctggctggacacagatttctcgggagcaggtgccctctctgggcagcaacgtggcctgtggcctggcctacactgattatcacaaggcagccatgggtctgggggcccggggcttgctgctctcacgggagaacgaggatcaggtggtcaaggtgctgcacgatgcccagcagcagtgccgagacggccacccggttgtggtcaacatcctcattgggaggacggacttccgcgatggctccattgctgtatagggccttgtgggtcaggacgcttggctgccttcctgcccctggactgtgtccagctggtttggagtctcatcattgcttgccctgggcctatcccatgaggcccagtgactccacaacctccctgaggaggggatggaggggtcaaatctcagagaggctctcttgtgagctcttggaccctcctcttcacggacccaactgtgccgtttgtcccctctcttatggagactgaataaaccacctctggcccatgtaggcccaagta

SEQ ID NO: 374635 - DNA, 2323 bp, Homo sapiens
  misc_feature (5)..(5): n is a, c, g, or t
  misc_feature (2312)..(2312): n is a, c, g, or t
  misc_feature (2317)..(2317): n is a, c, g, or t
ggacnagcggggcgccgctgagccaagtgggccacccgggcacggccacgctcccgggtcacgtgacacggagggggccgaattctgctggaggcagcgccatatcctggaggtgaaggtaccacctcatggagacccccgcggccgccgcccccgctgggagcttattcccctccttcctgctcctggcctgcgggacgctggtggccgccttgctgggcgccgctcaccgcctggggctcttctatcagctgctgcacaaggtggacaaggcaagcgtccggcatggcggagagaacgtggccgctgtgctgagggcccatggtgtgcggttcatcttcacgctggtcggtgggcacatttccccgctgctggtggcctgtgagaaactgggcatccgtgtggtggacacacgccatgaggtcacggccgtctttgctgctgatgctatggcccgcctgtccgggacggtgggcgtggcggcagtgacagcaggccctggcctcaccaacacggtgactgcggtgaagaatgctcagatggctcagtccccaatcctgcttctgggtggggctgccagcactctgctgcagaaccggggtgcgctccaggctgttgatcagctgtcccttttccggccactctgtaagttttgtgtgtctgtgcggagggtgcgggacattgtgcccaccctgagggccgcgatggctgccgcccagtcgggcaccccaggtccggtgtttgtggagctgcccgttgacgtgctgtacccctacttcatggtccagaaggagatggtgccagccaagccacccaagggcctcgtgggccgagtggtctcctggtatttagagaattacctggccaacctctttgcaggagcctgggagcctcagcccgagggaccgctgcccctggacatcccccaggcttccccgcagcaggttcagcgctgtgtggagatcctgagccgggccaagaggcctctgatggtgctggggagtcaggccctgctcaccccaacgtctgccgacaagcttcgggctgccgtggagaccttgggtgttccctgcttccttggagggatggcacgggggctgttaggccgcaaccaccccctccacatccgggagaaccgcagtgcggccctgaagaaggcggatgtcattgtcctagcaggaactgtgtgtgacttccgcctatcctatggccgtgtcctcagccacagcagcaagatcatcatcgtcaatcgtaatcgggaagagatgttgctcaactcagacatcttctggaagccccaggaggctgtgcagggagatgtgggttccttcgtgctgaagttagtggagggccttcagggccagacctgggccccagactgggtggaggagctgcgggaagccgaccggcagaaggagcagacctttcgggagaaggcagcgatgcctgtggcccagcacctgaacccagtgcaggtgctgcagctggtggaggaaacgctacctgacaactcaattctggtggtggatggcggggacttcgtgggcactgctgcccatctggtacagccccgcggccccctgcgctggctcgatcctggggcctttgggactctgggagttggtgcaggatttgcacttggggccaagctgtgccggccagatgctgaggtctggtgcctgtttggggacggagcttttggctacagcctcatcgaatttgatacattcgtcagacacaagatcccagtgatggccttggtagggaatgatgctggctggacacagatttctcgggagcaggtgccctctctgggcagcaacgtggcctgtggcctggcctacactgattatcacaaggcagccatgggtctgggggcccggggcttgctgctctcacgggagaacgaggatcaggtggtcaaggtgctgcacgatgcccagcagcagtgccgagacggccacccggttgtggtcaacatcctcattgggaggacggacttccgcgatggctccattgctgtatagggccttgtgggtcaggacgcttggctgccttcctgcccctggactgtgtccagctggtttggagtctcatcattgcttgccctgggcctatcccatgaggcccagtgactccacaacctccctgaggaggggatggaggggtcaaatctcagagaggctctcttgtgagctcttggaccctcctcttcacggacccaactgtgccgtttgtcccctctcttatggagactgaataaaccacctctggcccatgtaggcccaagtaaaaaaaaaaaagggaggagngaaanaaaaaa

SEQ ID NO: 374636 - DNA, 2108 bp, Homo sapiens
  misc_feature (1)..(1): n is a, c, g, or t
ngttacggactaagtagacctgggattaagaagcgccaaatcatggcaagtgcctttctctacatagagtgagacaatagtggacaaggcaagcgtccggcatggcggagagaacgtggccgctgtgctgagggcccatggtgtgcggttcatcttcacgctggtcggtgggcacatttccccgctgctggtggcctgtgagaaactgggcatccgtgtggtggacacacgccatgaggtcacggccgtctttgctgctgatgctatggcccgcctgtccgggacggtgggcgtggcggcagtgacagcaggccctggcctcaccaacacggtgactgcggtgaagaatgctcagatggctcagtccccaatcctgcttctgggtggggctgccagcactctgctgcagaaccggggtgcgctccaggctgttgatcagctgtcccttttccggccactctgtaagttttgtgtgtctgtgcggagggtgcgggacattgtgcccaccctgagggccgcgatggctgccgcccagtcgggcaccccaggtccggtgtttgtggagctgcccgttgacgtgctgtacccctacttcatggtccagaaggagatggtgccagccaagccacccaagggcctcgtgggccgagtggtctcctggtatttagagaattacctggccaacctctttgcaggagcctgggagcctcagcccgagggaccgctgcccctggacatcccccaggcttccccgcagcaggttcagcgctgtgtggagatcctgagccgggccaagaggcctctgatggtgctggggagtcaggccctgctcaccccaacgtctgccgacaagcttcgggctgccgtggagaccttgggtgttccctgcttccttggagggatggcacgggggctgttaggccgcaaccaccccctccacatccgggagaaccgcagtgcggccctgaagaaggcggatgtcattgtcctagcaggaactgtgtgtgacttccgcctatcctatggccgtgtcctcagccacagcagcaagatcatcatcgtcaatcgtaatcgggaagagatgttgctcaactcagacatcttctggaagccccaggaggctgtgcagggagatgtgggttccttcgtgctgaagttagtggagggccttcagggccagacctgggccccagactgggtggaggagctgcgggaagccgaccggcagaaggagcagacctttcgggagaaggcagcgatgcctgtggcccagcacctgaacccagtgcaggtgctgcagctggtggaggaaacgctacctgacaactcaattctggtggtggatggcggggacttcgtgggcactgctgcccatctggtacagccccgcggccccctgcgctggctcgatcctggggcctttgggactctgggagttggtgcaggatttgcacttggggccaagctgtgccggccagatgctgaggtctggtgcctgtttggggacggagcttttggctacagcctcatcgaatttgatacattcgtcagacacaagatcccagtgatggccttggtagggaatgatgctggctggacacagatttctcgggagcaggtgccctctctgggcagcaacgtggcctgtggcctggcctacactgattatcacaaggcagccatgggtctgggggcccggggcttgctgctctcacgggagaacgaggatcaggtggtcaaggtgctgcacgatgcccagcagcagtgccgagacggccacccggttgtggtcaacatcctcattgggaggacggacttccgcgatggctccattgctgtatagggccttgtgggtcaggacgcttggctgccttcctgcccctggactgtgtccagctggtttggagtctcatcattgcttgccctgggcctatcccatgaggcccagtgactccacaacctccctgaggaggggatggaggggtcaaatctcagagaggctctcttgtgagctcttggaccctcctcttcacggacccaactgtgccgtttgtcccctctcttatggagactgaataaaccacctctggcccatgtaggcccaagta

SEQ ID NO: 374637 - DNA, 2429 bp, Homo sapiens
  misc_feature (5)..(5): n is a, c, g, or t
ggacnagcggggcgccgctgagccaagtgggccacccgggcacggccacgctcccgggtcacgtgacacggagggggccgaattctgctggaggcagcgccatatcctggaggtgaaggtaccacctcatggagacccccgcggccgccgcccccgctgggagcttattcccctccttcctgctcctggcctgcgggacgctggtggccgccttgctgggcgccgctcaccgcctggggctcttctatcagctgctgcacaaggtggacaaggcaagcgtccggcatggcggagagaacgtggccgctgtgctgagggcccatggtgtgcggttcatcttcacgctggtcggtgggcacatttccccgctgctggtggcctgtgagaaactgggcatccgtgtggtggacacacgccatgaggtcacggccgtctttgctgctgatgctatggcccgcctgtccgggacggtgggcgtggcggcagtgacagcaggccctggcctcaccaacacggtgactgcggtgaagaatgctcagatggctcagtccccaatcctgcttctgggtggggctgccagcactctgctgcagaaccggggtgcgctccaggctgttgatcagctgtcccttttccggccactctgtaagttttgtgtgtctgtgcggagggtgcgggacattgtgcccaccctgagggccgcgatggctgccgcccagtcgggcaccccaggtccggtgtttgtggagctgcccgttgacgtgctgtacccctacttcatggtccagaaggagatggtgccagccaagccacccaagggcctcgtgggccgagtggtctcctggtatttagagaattacctggccaacctctttgcaggagcctgggagcctcagcccgagggaccgctgcccctggacatcccccaggcttccccgcagcaggttcagcgctgtgtggagatcctgagccgggccaagaggcctctgatggtgctggggagtcaggccctgctcaccccaacgtctgccgacaagcttcgggctgccgtggagaccttgggtgttccctgcttccttggagggatggcacgggggctgttaggccgcaaccaccccctccacatccgggagaaccgcagtgcggccctgaagaaggcggatgtcattgtcctagcaggaactgtgtgtgacttccgcctatcctatggccgtgtcctcagccacagcagcaagatcatcatcgtcaatcgtaatcgggaagagatgttgctcaactcagacatcttctggaagccccaggaggctgtgcagggagatgtgggttccttcgtgctgaagttagtggagggccttcagggccagacctgggccccagactgggtggaggagctgcgggaagccgaccggcagaaggagcagacctttcgggagaaggcagcgatgcctgtggcccagcacctgaacccagtgcaggtgctgcagctggtggaggaaacgctacctgacaactcaattctggtggtggatggcggggacttcgtgggcactgctgcccatctggtacagccccgcggccccctgcgctggctcgatcctggggcctttgggactctgggagttggtgcaggatttgcacttggggccaagctgtgccggccagatgctgaggtctggtgcctgtttggggacggagcttttggctacagcctcatcgaatttgatacattcgtcagacacaagatcccagtgatggccttggtagggaatgatgctggctggacacagatttctcgggagcaggtgccctctctgggcagcaacgtggcctgtggcctggcctacactgattatcacaaggcagccatgggtctgggggcccggggcttgctgctctcacgggagaacgaggatcaggtggtcaaggtgctgcacgatgcccagcagcagtgccgagacggccacccggttgtggtcaacatcctcattgggaggacggacttccgcgatggctccattgctgtatagggccttgtgggtcaggacgcttggctgccttcctgcccctggactgtgtccagctggtttggagtctcatcattgcttgccctgggcctatcccatgaggcccagtgactccacaacctccctgaggaggggatggaggggtcaaatctcagagaggctctcttgtgagctcttggaccctcctcttcacggacccaactgtgccgtttgtcccctctcttatggagactgaataaaccacctctggcccatgtaggcccaagtacaaaaaaaaaaagggggggcccccggagatctagaacgaggagagcttctcgagattaatccaccttgggggtcgcatggcagcccgcgatatggagagcagacagttgcggagggtgtcaccaaagcaggggccac

SEQ ID NO: 374638 - DNA, 1902 bp, Homo sapiens
ctgcctcggcctctcaaaagtgctgggattacagaccagagctactgcgcccggcctgatagatgcttctgtaggaacaaatggtggggtggacacagagggaggcttgaaaacgtgcatgtgatcacgttccctcccacactgcccactgccctcaggacagagagcacactcgttggccccttagcctgtcttcctgccgtatctctcccctccccttattttagtccccttggacttgaacttggttcatcattctgaggatgttgactcccctgcagcctaggcgacaggacactcttgtattaagcagagaagtagcaccgttgcatctgtgttgggaaggtccactcagcagccatggacggcaggccggaagggggctgggtggaggccaggggggctgctcaaaatggccaggacagaagcgaggaggcctgaactggagatgaacagcggcagagcctcaccttctcagagcctccatttgatcatttgaaaaatggggtggtgaaagatacatcacggggctgtttgttagttcacttcagtaacgttcgctgtgcgcttccacgtgcctggatttgagagatgtgcttggtggatgtagctcttttcattgagtgtttcccaggcagaaggaggtggagggaggggacgaggccagcttgggtttgtcacctgccttgtgctccttaacccttgtttcttgggccttgtcttcccttttcacctgggctgccctcccctggttctggcaggttctggggtgtttcacctgttttttttctaggagcacccctggcctgcttcccgtctgcctgctcggatgctgctgctggcttcctgctgttttgaggcctctgatgctggaagaacaggaggaagccagctccccacagctgtgtcctcttccttccccaggagatgtgggttccttcgtgctgaagttagtggagggccttcagggccagacctgggccccagactgggtggaggagctgcgggaagccgaccggcagaaggagcagacctttcgggagaaggcagcgatgcctgtggcccagcacctgaacccagtgcaggtgctgcagctggtggaggaaacgctacctgacaactcaattctggtggtggatggcggggacttcgtgggcactgctgcccatctggtacagccccgcggccccctgcgctggctcgatcctggggcctttgggactctgggagttggtgcaggatttgcacttggggccaagctgtgccggccagatgctgaggtctggtgcctgtttggggacggagcttttggctacagcctcatcgaatttgatacattcgtcagacacaagatcccagtgatggccttggtagggaatgatgctggctggacacagatttctcgggagcaggtgccctctctgggcagcaacgtggcctgtggcctggcctacactgattatcacaaggcagccatgggtctgggggcccggggcttgctgctctcacgggagaacgaggatcaggtggtcaaggtgctgcacgatgcccagcagcagtgccgagacggccacccggttgtggtcaacatcctcattgggaggacggacttccgcgatggctccattgctgtatagggccttgtgggtcaggacgcttggctgccttcctgcccctggactgtgtccagctggtttggagtctcatcattgcttgccctgggcctatcccatgaggcccagtgactccacaacctccctgaggaggggatggaggggtcaaatctcagagaggctctcttgtgagctcttggaccctcctcttcacggacccaactgtgccgtttgtcccctctcttatggagactgaataaaccacctctggcccatgtaggcccaagta

SEQ ID NO: 374639 - DNA, 402 bp, Homo sapiens
tcatggtgtgtcactttcaaggaaaggggacctaggctgcacctctctccatgggaggcatgtcaaggtgaccttgtacaaatggatgtagggtgggagatattatggccatctgggaaaatataacctgcctctgccctatcctgttggccaaagcatgtcatgaggccagtcccgattcagggggtgtggggagctgcaaggtcactgtaggtggcacaggtgcagggagactcggtgaggaacagggactcatttgcatccagtccaccacagtggatcaagtaaggtagacgacatggggcctctgcctactgcattcctgtcccccacaccaggaactgtgtgtgacttccgcctatcctatggccgtgtcctcagccacagcagcaagatcatcat

SEQ ID NO: 374640 - DNA, 646 bp, Homo sapiens
tggtgaagctgtggccagctcagccacgtgacaccttgtacttgcttccctccttgcctgcctcgcttccattttccttccctctgttggccttgggagtgtgcctcgtagggtctcagaaaacaataccccgaaatgaaggcctccctcggaagcaaacatttctctctgaccttctcctgccctcctgtctctggtcccttattctcccccaaggctagctataaaaactacaatccctcttcaccaaaagcctgccctaaaacctaaaaatattactctaactttcctctttctttctgtgtaaaattggccataggaaattatttgacctttgtctgattgtaggtcagaagacccccatccagagagagtcctgcgccatatgaggaaggaaggaatgctgcgcagagaggccgaaaagaatcttgacagacaggcctcgctgggttccccactcagtctatcagcattagatcaggctcttttgtccaaccgtatttctacacggccatccatactttgttgaactgaagcctaaaaatggacagtttctcctgtatctttgggtgttcattctgaaggttcttgtatctcataaaaccatggtcaaataaatttgtgtatttgtttgccttttctccta

SEQ ID NO: 374641 - DNA, 2541 bp, Homo sapiens
agagccgggccaggcgaggtaacaggctacgtggggttcatgttctctctggttgttccctccccgtttgtacttcatttccattcacacggctgcacttcccagttttccaggatctctcctctgaaaccaggcaagggtttgttcccaaatcccacccattgcctctccagccccagacttgcttactggaccacacataggtggtgggcattggtgacttgtccctagggtcaggggaccagaaacttcccagaggggctggatggagcacggcagcactcagggcacaatggagagcggattcaaagggcaaaggagccgaggaaagcccctctgcccgagcctccccagcgccggccgggctccgctccggagcagccccgccgtctggcagagacatgctgttttgtttaaatcctccacattctttgccatttccccattggccggatggggctaccctccccgccgcggccgctgctgatgtcagcctcgctcgcgctcgctcctcccgcacccacctcccggccccaggcacactgcatcggcgcggacgctccggccccggcgaggtggctgcaaactcgcgggcacgcacggcgcccggggagccgagggactcgggggaggggacgcgcgcggaaggcgccagcttcctcccgcccgcccctggcagccgcgagccgaggttggaggcgcccggggccccagccgggcagagccgagcggcggcggcggcggcggcttcccttttctccccgagccgagccccggagcggcgcggggaccggccctaaaaagagcaggaaatcttgtttaccgcccgcggagagaagccgatcgagcctttgtctggaaagtcagcatctccggctccggctgcaatgtgttcctggtgacattagcatcgggcagacccgccggaggaggggggtcgccaggttcccgtctgctttcggaggcggatcgagcgggtgacttttgtgcattcgttttaatttttggaaatctctcttttttcctccctcgctcgctgccgggcatgtcctgatctggcggccgctcctaccaccctgggcagccgagcagagtcgtccccagcgggtctccctccctgcctccctgactttgcaacaccgcgttccgggaggaccggcctcggcgagggaggaggcgggggagctgcgaacacccagacccaaaccctgacatgctctggggcggagaggaggaagccaggagctgagcgcgccgcgggggctgcttcgccctccggctccgagcgccgggctccgggcgccctgccctgcgcctgggcagcagccttgctggtcttgggggcgccccccgcttcccgccccgggggtccgcggccggcaggaccatgctgctgaaagagtaccggatctgcatgccgctcaccgtagacgagtacaaaattggacagctgtacatgatcagcaaacacagccatgaacagagtgaccggggagaaggggtggaggtcgtccagaatgagccctttgaggaccctcaccatggcaatgggcagttcaccgagaagcgggtgtatctcaacagcaaactgcctagttgggctagagctgttgtccccaaaatattttatgtgacagagaaggcttggaactattatccctacacaattacagaatacacatgttcctttctgccgaaattctccattcatatagaaaccaagtatgaggacaacaaaggaagcaatgacaccattttcgacaatgaagccaaagacgtggagagagaagtttgctttattgatattgcctgcgatgaaattccagagcgctactacaaagaatctgaggatcctaagcacttcaagtcagagaagacaggacggggacagttgagggaaggctggagagatagtcatcagcctatcatgtgctcctacaagctggtgactgtgaagtttgaggtctgggggcttcagaccagagtggaacaatttgtacacaaggtggtccgagacattctgctgattggacatagacaggcttttgcatgggttgatgagtggtatgatatgacaatggatgatgttcgggaatacgagaaaaacatgcatgaacaaaccaacataaaagtttgcaatcagcattcctcccctgtggatgacatagagagtcatgcccaaacaagtacatgacaatggatgaagtccgagaatttgaacgagccactcaggaagccaccaacaagaaaatcggcattttcccacctgcaatttctatctccagcatccccctgctgccttcttccgtccgcagtgcgccttctagtgctccatccacccctctctccacagacgcacccgaatttctgtccgttcccaaagatcggccccggaaaaagtctgccccagaaactctcacacttccagaccctgagaaaaaagccaccctgaatttacccggcatgcactcttcagataagccatgtcggcccaaatctgagtaactttatataaatatctcatggggttttatattttca

SEQ ID NO: 374642 - DNA, 771 bp, Homo sapiens
aaaaatcctgatgatttacctgtttaccctataaaggtatactttcatgatctaaagttgacaataatgacaataatatgtgtcatttcagggccattgattgttttaattaccttctctttatgaaaaacatgaccagttaattatagctccaaataccccacaccagacccacaacaacacagatgcacacgggtgcacacacatacacacacacaggcacatatttcccccgtctagttctgtattctactgttaagtccttattgagaatacttaaaatactcactgtgaagagtgctttggaaaatcttaaatggataatcataaagggatattgttttcagggtgtagcttccaatagaaaaaattgggggtttggtatttcaatgatactttgggtgtataatcgggagaggcccctttatgatagggttcccatagttcctgtaaaaacaagggtagtgatgaatctatttgcctctcttataaataactgctcgtttttctttctgtttttctccttgaagacatgacaatggatgaagtccgagaatttgaacgagccactcaggaagccaccaacaagaaaatcggcattttcccacctgcaatttctatctccagcatccccctgctgccttcttccgtccgcagtgcgccttctagtgctccatccaccttcttcaaagagacccgattctgtcgtccaaaatggccggaaagttgcctttaactcagactgagcctaataccggtggtttctgtggc

SEQ ID NO: 374643 - DNA, 478 bp, Homo sapiens
  misc_feature (41)..(43): n is a, c, g, or t
  misc_feature (47)..(47): n is a, c, g, or t
  misc_feature (49)..(49): n is a, c, g, or t
  misc_feature (54)..(54): n is a, c, g, or t
  misc_feature (56)..(57): n is a, c, g, or t
  misc_feature (61)..(61): n is a, c, g, or t
  misc_feature (70)..(70): n is a, c, g, or t
  misc_feature (76)..(76): n is a, c, g, or t
  misc_feature (80)..(80): n is a, c, g, or t
  misc_feature (99)..(99): n is a, c, g, or t
  misc_feature (109)..(109): n is a, c, g, or t
  misc_feature (112)..(112): n is a, c, g, or t
  misc_feature (248)..(248): n is a, c, g, or t
ggtgatccgcccgcctagcctcccaaagtgttgggattacnnncgtnanccacngnncccngcctctttngggttntagntccaactctctgcttcatntgactcatgnttncacctcctttgtccacttgggttttaaattgtaagtctggaagttactagaacaatcccagaattagctcacacactttcactctgtttttccctttcttcctggggttatgttttacccagcattcctaggtgtntgtggtgggagattccgcccctacgttatcttaatttgttgccatatttctgaaccaggaatcccatttaccacattgagttctggacatcaaggttctccgggcatcactttctatgctgtgtcatcagtgaagcccataaacttacccgttatcagaaaagcgaagatttcgagatcttgttgagacggtaggtatatagtatgtcctgaggggtttagaaaaaatag

SEQ ID NO: 374644 - DNA, 6755 bp, Homo sapiens
agagccgggccaggcgaggtaacaggctacgtggggttcatgttctctctggttgttccctccccgtttgtacttcatttccattcacacggctgcacttcccagttttccaggatctctcctctgaaaccaggcaagggtttgttcccaaatcccacccattgcctctccagccccagacttgcttactggaccacacataggtggtgggcattggtgacttgtccctagggtcaggggaccagaaacttcccagaggggctggatggagcacggcagcactcagggcacaatggagagcggattcaaagggcaaaggagccgaggaaagcccctctgcccgagcctccccagcgccggccgggctccgctccggagcagccccgccgtctggcagagacatgctgttttgtttaaatcctccacattctttgccatttccccattggccggatggggctaccctccccgccgcggccgctgctgatgtcagcctcgctcgcgctcgctcctcccgcacccacctcccggccccaggcacactgcatcggcgcggacgctccggccccggcgaggtggctgcaaactcgcgggcacgcacggcgcccggggagccgagggactcgggggaggggacgcgcgcggaaggcgccagcttcctcccgcccgcccctggcagccgcgagccgaggttggaggcgcccggggccccagccgggcagagccgagcggcggcggcggcggcggcttcccttttctccccgagccgagccccggagcggcgcggggaccggccctaaaaagagcaggaaatcttgtttaccgcccgcggagagaagccgatcgagcctttgtctggaaagtcagcatctccggctccggctgcaatgtgttcctggtgacattagcatcgggcagacccgccggaggaggggggtcgccaggttcccgtctgctttcggaggcggatcgagcgggtgacttttgtgcattcgttttaatttttggaaatctctcttttttcctccctcgctcgctgccgggcatgtcctgatctggcggccgctcctaccaccctgggcagccgagcagagtcgtccccagcgggtctccctccctgcctccctgactttgcaacaccgcgttccgggaggaccggcctcggcgagggaggaggcgggggagctgcgaacacccagacccaaaccctgacatgctctggggcggagaggaggaagccaggagctgagcgcgccgcgggggctgcttcgccctccggctccgagcgccgggctccgggcgccctgccctgcgcctgggcagcagccttgctggtcttgggggcgccccccgcttcccgccccgggggtccgcggccggcaggaccatgctgctgaaagagtaccggatctgcatgccgctcaccgtagacgagtacaaaattggacagctgtacatgatcagcaaacacagccatgaacagagtgaccggggagaaggggtggaggtcgtccagaatgagccctttgaggaccctcaccatggcaatgggcagttcaccgagaagcgggtgtatctcaacagcaaactgcctagttgggctagagctgttgtccccaaaatattttatgtgacagagaaggcttggaactattatccctacacaattacagaatacacatgttcctttctgccgaaattctccattcatatagaaaccaagtatgaggacaacaaaggaagcaatgacaccattttcgacaatgaagccaaagacgtggagagagaagtttgctttattgatattgcctgcgatgaaattccagagcgctactacaaagaatctgaggatcctaagcacttcaagtcagagaagacaggacggggacagttgagggaaggctggagagatagtcatcagcctatcatgtgctcctacaagctggtgactgtgaagtttgaggtctgggggcttcagaccagagtggaacaatttgtacacaaggtggtccgagacattctgctgattggacatagacaggcttttgcatgggttgatgagtggtatacatgacaatggatgaagtccgagaatttgaacgagccactcaggaagccaccaacaagaaaatcggcattttcccacctgcaatttctatctccagcatccccctgctgccttcttccgtccgcagtgcgccttctagtgctccatccacccctctctccacagacgcacccgaatttctgtccgttcccaaagatcggccccggaaaaagtctgccccagaaactctcacacttccagaccctgagaaaaaagccaccctgaatttacccggcatgcactcttcagataagccatgtcggcccaaatctgagtaactttatataaatatctcatggggttttatattttcatttgttgttgttgtttttttttaagaatcttctgatagagaaaaagactgctttgtcactcaaacatgttccttcgacctttcagtgtgcatgtgactcagtaacttcacatagaatatgattccctaagtatgctacacagcatcatattagatgtaagatgtaagacttgcaaaggacagaaggaatcttctgtaaccacatagctgtatgccagagaggaagccttgttattgggcatttgatgaggtttggcatggacttcaaggataaatgaatgaaaactttgcaccacttttgttacaaggtacggtagaaaatagtgaagtcagtttcctctcatcaaatctaaaattctccaaaatactctcaggcataacatacttagctgttaaattttgaactgctaattactaatacttgaataccaatagttactgagattcctattttgtggttagtctgactcaggatttggagcctaattaactctaaacttttgaaaattttaatcatcaagctatagaggctccaagtgcaattaataataactcatttataccttccacagaatttaataaagattctacttgtttctgtcttttaataactttccccttttgtgcccttgtggcctcagaaatccttaagaattgcatggatgaatgtgaccataactgattttggaatggttcagtttaggaaccaagaggcccaggtgaggcaacatcttttttctctacaggtaccaacaaaccttgacttgtcagcttccatcatcaattaagattctcagaatttgcaattaattgaatagaattcatttactatctgcccactcaaagaagtacaagggtagagtaagctaactgggctttaacatggtcagaatgtctggtgcatgaactataaaaaagagaactgtctcccatccccttccttgttttactcttagtaacatccagaattccctggaacagattgcctaccaccagaccttagaaaagactgtcattctcttgctccttacttgaaatacaaatattgggaatgtcacagacatcaagcaactactgtcaagtgggaggagagaatgagcagaattgctgactcctatttgtagagtgaaaaggaggagtgataatagatgcccttctgtctagctttcctttcttcaactagtggtaatgcaagattagaatcaaggttgacaggaggcaaggtcactcactgaagtgacagaaagacaattctcctttgctccaaagagagaaatctgtcacctttgcacctcactgcctttaaacacagacgggagggcaggcccaaatctcagcattgacttttgtcctccaagagaggaagagaagaagtaattgggcaacttggaggcccacgccccagctagccttcctgatcgtaacctccaacctcaggaaagggaccttcccaaaacacagatcccaaaggaaacaaaatagaccaaggagcataatctgcttctctcacacagcctctctgccagtggaccctgcctgcttccctctcagtgctcagcactctgtgtagtgtctttcaggttgatacactctcccaaggtgcaggcgctggccccatgagcccagcaccaaagttttctaagtcataggtcagactgtcaagatcatttctttatctataggttgatatttagcttaaaaaaaaagaataaacctagaactcaaaggaaacctgttgcaaatagcttagatcaacagtgtatctcttccctaagaatgatagtatcttagtaagacaccttctatgcatggtatggaagcatgatttttgcttgtgggaaaacctaatattttatcagacccctcggacttctcaatccctccctctccacacagtagtacttaatgaaaatgttttgctttagagagcaaaatgctactttcagaagacactgaaatagtatatgtatttgcttaccatttgcaagctaaaatcaaggtgggatggggtcattattttcacatagaatgtatttattttgtgcaggctgttaaacacatctggcacctagtttttccattaagagcattgctattttccctttttataaagtagcttctgctgtcaaggttaacaattctatatgctttaggaagctaagttctaatttccttttgtgagtttcatttcttttataaccagtatgttaccacagacatcagttgcaaagctacgatgatagtgtgattcttagccgaaaaaaaagcgtgtgctcttaaagtatgttcagtttttctgtctacatatgctttgtgtgagttaaaaagggggtgggtggtgtaaatattcctttagctgctttgcatatttaacccagtcatcaaaaggcataaatgacttcaatattttatatatcttggttttcaagtatcatttcacattctctatacatgactttgttattgtggaatacaagcctgcaatgggtgtatatatacagaacattaataattcttagaaggatggaagccaaatggctgcatgatggaaattagaagaaaaaaaaagcagaaacttgaatttgctaagcatgtttggggggaaatagaatccttaactcagtgcctctgtctgcgatatggaaaccttcaactttgttcaccaaaattgtattatacctgtgtatatatatatatatatataaatataaatatagtatagtgaatcagacaccatcagttttaagtctctggtagccaaacttaaataaataatccatagaatatcacatacgttcactccatcttcatctctgaagttagtggagaccatcaaaatgactgtacatttcataactctgggaagatttcaaatgtgaagtgcccctgtgcattttcttggccatagcacggcattcttgctttagctgtgctttcctgggatgagaagatcttggtgtatttaacacataagctttgttagaaatcacctctgaagatcatttcattttctcactttgggttgttgcaagacaaagcaaaggaaaaggaacacaatgaaggaggccgtgacatttttagttgccaccgttgtaactcaaacaatatgggtttgttggtgaactgatttatcaaggcttctgttacggttttgcatctgtgtgtgaggaaaattttaatttatttggaagtatttattagccatgttgttggtcctgaaaataaatctctaagtagcacagttgtgggtatattatgcagacacttaccacaatacctgcaaaagtaactgtggttttctttcaagacactgtaataaacagtgaactaagagaatagattctgatacatctcgataaatcattctctgcaaaagtttcagggctaatgtatttatgtgtatttttaaattctactttctttggcatctcttcatggctcagcgacaacaaagtaataggtcattggctggcttacgtcgataggaattttactcttaagaagggccagtgtatagctgactctacatataatgtgtaatcagataatccaatagagaggaattgtccaaatagttttagtacctttctgatcatctgactcagtaggctaggagacaatctgtcatctgagccatagttcttgagatttaaaaagtctgtccagtgactgcaatctgattatgaataaactattttaactattcattcttgctgaaactgaagtgtacacaatagcacactgttggcatgctgaggcaaaacattgggttcttttgtgttctaccttcaaaacaatctgtttgcatttgaaatataagtgtttaagctttttaggagttagtgtaataagagaatgtgaatatgttgggaaattttcagatgccattaataattgtaattttgttgttaaattaacaaggactttaggataagcctcttgatgtttttgctttaaattgaaagcatgtctgtcaaattgcaagtctcccttcagtttctatatatcacccaggagagggtctctgagttggtgttgtacctgtaccactcacatgtagctcaagtgtaatttgtagtgtttacattcaagctgggatcttgattggttaaattaatccacataccactgccactgctgaaggaccaggtgttggaatacacagcattacagactataagcaaagcaaacaaaagttgatccttacatatgccatccttctgtgtcattttgtggctgttctgtgtttttcttcctagttatttattattgttaataacttactttttcttacattctgttgtaaataaaatacaaagcaatcttctttgcaag

SEQ ID NO: 374645 - DNA, 2421 bp, Homo sapiens
agagccgggccaggcgaggtaacaggctacgtggggttcatgttctctctggttgttccctccccgtttgtacttcatttccattcacacggctgcacttcccagttttccaggatctctcctctgaaaccaggcaagggtttgttcccaaatcccacccattgcctctccagccccagacttgcttactggaccacacataggtggtgggcattggtgacttgtccctagggtcaggggaccagaaacttcccagaggggctggatggagcacggcagcactcagggcacaatggagagcggattcaaagggcaaaggagccgaggaaagcccctctgcccgagcctccccagcgccggccgggctccgctccggagcagccccgccgtctggcagagacatgctgttttgtttaaatcctccacattctttgccatttccccattggccggatggggctaccctccccgccgcggccgctgctgatgtcagcctcgctcgcgctcgctcctcccgcacccacctcccggccccaggcacactgcatcggcgcggacgctccggccccggcgaggtggctgcaaactcgcgggcacgcacggcgcccggggagccgagggactcgggggaggggacgcgcgcggaaggcgccagcttcctcccgcccgcccctggcagccgcgagccgaggttggaggcgcccggggccccagccgggcagagccgagcggcggcggcggcggcggcttcccttttctccccgagccgagccccggagcggcgcggggaccggccctaaaaagagcaggaaatcttgtttaccgcccgcggagagaagccgatcgagcctttgtctggaaagtcagcatctccggctccggctgcaatgtgttcctggtgacattagcatcgggcagacccgccggaggaggggggtcgccaggttcccgtctgctttcggaggcggatcgagcgggtgacttttgtgcattcgttttaatttttggaaatctctcttttttcctccctcgctcgctgccgggcatgtcctgatctggcggccgctcctaccaccctgggcagccgagcagagtcgtccccagcgggtctccctccctgcctccctgactttgcaacaccgcgttccgggaggaccggcctcggcgagggaggaggcgggggagctgcgaacacccagacccaaaccctgacatgctctggggcggagaggaggaagccaggagctgagcgcgccgcgggggctgcttcgccctccggctccgagcgccgggctccgggcgccctgccctgcgcctgggcagcagccttgctggtcttgggggcgccccccgcttcccgccccgggggtccgcggccggcaggaccatgctgctgaaagagtaccggatctgcatgccgctcaccgtagacgagtacaaaattggacagctgtacatgatcagcaaacacagccatgaacagagtgaccggggagaaggggtggaggtcgtccagaatgagccctttgaggaccctcaccatggcaatgggcagttcaccgagaagcgggtgtatctcaacagcaaactgcctagttgggctagagctgttgtccccaaaatattttatgtgacagagaaggcttggaactattatccctacacaattacagaatacacatgttcctttctgccgaaattctccattcatatagaaaccaagtatgaggacaacaaaggaagcaatgacaccattttcgacaatgaagccaaagacgtggagagagaagtttgctttattgatattgcctgcgatgaaattccagagcgctactacaaagaatctgaggatcctaagcacttcaagtcagagaagacaggacggggacagttgagggaaggctggagagatagtcatcagcctatcatgtgctcctacaagctggtgactgtgaagtttgaggtctgggggcttcagaccagagtggaacaatttgtacacaaggtggtccgagacattctgctgattggacatagacaggcttttgcatgggttgatgagtggtatacatgacaatggatgaagtccgagaatttgaacgagccactcaggaagccaccaacaagaaaatcggcattttcccacctgcaatttctatctccagcatccccctgctgccttcttccgtccgcagtgcgccttctagtgctccatccacccctctctccacagacgcacccgaatttctgtccgttcccaaagatcggccccggaaaaagtctgccccagaaactctcacacttccagaccctgagaaaaaagccaccctgaatttacccggcatgcactcttcagataagccatgtcggcccaaatctgagtaactttatataaatatctcatggggttttatattttca

SEQ ID NO: 374646 - DNA, 5860 bp, Homo sapiens
caccaggcccggctaatttttttgtattttttagtagagatggggtttcatcatgttagccaggatggtctagatctccttacctcatgatccgtccgcctcagcctcccaaagcgttgggattacaggcatgagccaccgcgctggctatctggctgttctttaggcttcctctttgtctttgaaattctggagcctcagtcctgtgtgcatggattcatttttaatttattctgcttagaacttggtattctttacacggagaattcatgacttttacaattctggaatcccatttaccacattgagttctggacatcaaggttctccgggcatcactttctatgctgtgtcatcagtgaagcccataaacttacccgttatcagaaaagcgaagatttcgagatcttgttgagacagtacaaaattggacagctgtacatgatcagcaaacacagccatgaacagagtgaccggggagaaggggtggaggtcgtccagaatgagccctttgaggaccctcaccatggcaatgggcagttcaccgagaagcgggtgtatctcaacagcaaactgcctagttgggctagagctgttgtccccaaaatattttatgtgacagagaaggcttggaactattatccctacacaattacagaatacacatgttcctttctgccgaaattctccattcatatagaaaccaagtatgaggacaacaaaggaagcaatgacaccattttcgacaatgaagccaaagacgtggagagagaagtttgctttattgatattgcctgcgatgaaattccagagcgctactacaaagaatctgaggatcctaagcacttcaagtcagagaagacaggacggggacagttgagggaaggctggagagatagtcatcagcctatcatgtgctcctacaagctggtgactgtgaagtttgaggtctgggggcttcagaccagagtggaacaatttgtacacaaggtggtccgagacattctgctgattggacatagacaggcttttgcatgggttgatgagtggtatgatatgacaatggatgatgttcgggaatacgagaaaaacatgcatgaacaaaccaacataaaagtttgcaatcagcattcctcccctgtggatgacatagagagtcatgcccaaacaagtacatgacaatggatgaagtccgagaatttgaacgagccactcaggaagccaccaacaagaaaatcggcattttcccacctgcaatttctatctccagcatccccctgctgccttcttccgtccgcagtgcgccttctagtgctccatccacccctctctccacagacgcacccgaatttctgtccgttcccaaagatcggccccggaaaaagtctgccccagaaactctcacacttccagaccctgagaaaaaagccaccctgaatttacccggcatgcactcttcagataagccatgtcggcccaaatctgagtaactttatataaatatctcatggggttttatattttcatttgttgttgttgtttttttttaagaatcttctgatagagaaaaagactgctttgtcactcaaacatgttccttcgacctttcagtgtgcatgtgactcagtaacttcacatagaatatgattccctaagtatgctacacagcatcatattagatgtaagatgtaagacttgcaaaggacagaaggaatcttctgtaaccacatagctgtatgccagagaggaagccttgttattgggcatttgatgaggtttggcatggacttcaaggataaatgaatgaaaactttgcaccacttttgttacaaggtacggtagaaaatagtgaagtcagtttcctctcatcaaatctaaaattctccaaaatactctcaggcataacatacttagctgttaaattttgaactgctaattactaatacttgaataccaatagttactgagattcctattttgtggttagtctgactcaggatttggagcctaattaactctaaacttttgaaaattttaatcatcaagctatagaggctccaagtgcaattaataataactcatttataccttccacagaatttaataaagattctacttgtttctgtcttttaataactttccccttttgtgcccttgtggcctcagaaatccttaagaattgcatggatgaatgtgaccataactgattttggaatggttcagtttaggaaccaagaggcccaggtgaggcaacatcttttttctctacaggtaccaacaaaccttgacttgtcagcttccatcatcaattaagattctcagaatttgcaattaattgaatagaattcatttactatctgcccactcaaagaagtacaagggtagagtaagctaactgggctttaacatggtcagaatgtctggtgcatgaactataaaaaagagaactgtctcccatccccttccttgttttactcttagtaacatccagaattccctggaacagattgcctaccaccagaccttagaaaagactgtcattctcttgctccttacttgaaatacaaatattgggaatgtcacagacatcaagcaactactgtcaagtgggaggagagaatgagcagaattgctgactcctatttgtagagtgaaaaggaggagtgataatagatgcccttctgtctagctttcctttcttcaactagtggtaatgcaagattagaatcaaggttgacaggaggcaaggtcactcactgaagtgacagaaagacaattctcctttgctccaaagagagaaatctgtcacctttgcacctcactgcctttaaacacagacgggagggcaggcccaaatctcagcattgacttttgtcctccaagagaggaagagaagaagtaattgggcaacttggaggcccacgccccagctagccttcctgatcgtaacctccaacctcaggaaagggaccttcccaaaacacagatcccaaaggaaacaaaatagaccaaggagcataatctgcttctctcacacagcctctctgccagtggaccctgcctgcttccctctcagtgctcagcactctgtgtagtgtctttcaggttgatacactctcccaaggtgcaggcgctggccccatgagcccagcaccaaagttttctaagtcataggtcagactgtcaagatcatttctttatctataggttgatatttagcttaaaaaaaaagaataaacctagaactcaaaggaaacctgttgcaaatagcttagatcaacagtgtatctcttccctaagaatgatagtatcttagtaagacaccttctatgcatggtatggaagcatgatttttgcttgtgggaaaacctaatattttatcagacccctcggacttctcaatccctccctctccacacagtagtacttaatgaaaatgttttgctttagagagcaaaatgctactttcagaagacactgaaatagtatatgtatttgcttaccatttgcaagctaaaatcaaggtgggatggggtcattattttcacatagaatgtatttattttgtgcaggctgttaaacacatctggcacctagtttttccattaagagcattgctattttccctttttataaagtagcttctgctgtcaaggttaacaattctatatgctttaggaagctaagttctaatttccttttgtgagtttcatttcttttataaccagtatgttaccacagacatcagttgcaaagctacgatgatagtgtgattcttagccgaaaaaaaagcgtgtgctcttaaagtatgttcagtttttctgtctacatatgctttgtgtgagttaaaaagggggtgggtggtgtaaatattcctttagctgctttgcatatttaacccagtcatcaaaaggcataaatgacttcaatattttatatatcttggttttcaagtatcatttcacattctctatacatgactttgttattgtggaatacaagcctgcaatgggtgtatatatacagaacattaataattcttagaaggatggaagccaaatggctgcatgatggaaattagaagaaaaaaaaagcagaaacttgaatttgctaagcatgtttggggggaaatagaatccttaactcagtgcctctgtctgcgatatggaaaccttcaactttgttcaccaaaattgtattatacctgtgtatatatatatatatatataaatataaatatagtatagtgaatcagacaccatcagttttaagtctctggtagccaaacttaaataaataatccatagaatatcacatacgttcactccatcttcatctctgaagttagtggagaccatcaaaatgactgtacatttcataactctgggaagatttcaaatgtgaagtgcccctgtgcattttcttggccatagcacggcattcttgctttagctgtgctttcctgggatgagaagatcttggtgtatttaacacataagctttgttagaaatcacctctgaagatcatttcattttctcactttgggttgttgcaagacaaagcaaaggaaaaggaacacaatgaaggaggccgtgacatttttagttgccaccgttgtaactcaaacaatatgggtttgttggtgaactgatttatcaaggcttctgttacggttttgcatctgtgtgtgaggaaaattttaatttatttggaagtatttattagccatgttgttggtcctgaaaataaatctctaagtagcacagttgtgggtatattatgcagacacttaccacaatacctgcaaaagtaactgtggttttctttcaagacactgtaataaacagtgaactaagagaatagattctgatacatctcgataaatcattctctgcaaaagtttcagggctaatgtatttatgtgtatttttaaattctactttctttggcatctcttcatggctcagcgacaacaaagtaataggtcattggctggcttacgtcgataggaattttactcttaagaagggccagtgtatagctgactctacatataatgtgtaatcagataatccaatagagaggaattgtccaaatagttttagtacctttctgatcatctgactcagtaggctaggagacaatctgtcatctgagccatagttcttgagatttaaaaagtctgtccagtgactgcaatctgattatgaataaactattttaactattcattcttgctgaaactgaagtgtacacaatagcacactgttggcatgctgaggcaaaacattgggttcttttgtgttctaccttcaaaacaatctgtttgcatttgaaatataagtgtttaagctttttaggagttagtgtaataagagaatgtgaatatgttgggaaattttcagatgccattaataattgtaattttgttgttaaattaacaaggactttaggataagcctcttgatgtttttgctttaaattgaaagcatgtctgtcaaattgcaagtctcccttcagtttctatatatcacccaggagagggtctctgagttggtgttgtacctgtaccactcacatgtagctcaagtgtaatttgtagtgtttacattcaagctgggatcttgattggttaaattaatccacataccactgccactgctgaaggaccaggtgttggaatacacagcattacagactataagcaaagcaaacaaaagttgatccttacatatgccatccttctgtgtcattttgtggctgttctgtgtttttcttcctagttatttattattgttaataacttactttttcttacattctgttgtaaataaaatacaaagcaatcttctttgcaag

SEQ ID NO: 374647 - DNA, 5726 bp, Homo sapiens
ttcccaaggtttggtcggctgccaaagcttacagactgccagccacccggccgagcatttgccaaggtgatgtaaaatattcacgggaacacgccgtctcgatgttctactcacaactggttctctccctagctcccgaggaaaagtaacatgaggcccatgtggctgctttctcttctcagcagaaggtgctgatgttattagtggcttgccaagctatggttggagggggatgtcaggggcacgctgtggggctgacctttctgtctctgactctgttttgtagtacaaaattggacagctgtacatgatcagcaaacacagccatgaacagagtgaccggggagaaggggtggaggtcgtccagaatgagccctttgaggaccctcaccatggcaatgggcagttcaccgagaagcgggtgtatctcaacagcaaactgcctagttgggctagagctgttgtccccaaaatattttatgtgacagagaaggcttggaactattatccctacacaattacagaatacacatgttcctttctgccgaaattctccattcatatagaaaccaagtatgaggacaacaaaggaagcaatgacaccattttcgacaatgaagccaaagacgtggagagagaagtttgctttattgatattgcctgcgatgaaattccagagcgctactacaaagaatctgaggatcctaagcacttcaagtcagagaagacaggacggggacagttgagggaaggctggagagatagtcatcagcctatcatgtgctcctacaagctggtgactgtgaagtttgaggtctgggggcttcagaccagagtggaacaatttgtacacaaggtggtccgagacattctgctgattggacatagacaggcttttgcatgggttgatgagtggtatgatatgacaatggatgatgttcgggaatacgagaaaaacatgcatgaacaaaccaacataaaagtttgcaatcagcattcctcccctgtggatgacatagagagtcatgcccaaacaagtacatgacaatggatgaagtccgagaatttgaacgagccactcaggaagccaccaacaagaaaatcggcattttcccacctgcaatttctatctccagcatccccctgctgccttcttccgtccgcagtgcgccttctagtgctccatccacccctctctccacagacgcacccgaatttctgtccgttcccaaagatcggccccggaaaaagtctgccccagaaactctcacacttccagaccctgagaaaaaagccaccctgaatttacccggcatgcactcttcagataagccatgtcggcccaaatctgagtaactttatataaatatctcatggggttttatattttcatttgttgttgttgtttttttttaagaatcttctgatagagaaaaagactgctttgtcactcaaacatgttccttcgacctttcagtgtgcatgtgactcagtaacttcacatagaatatgattccctaagtatgctacacagcatcatattagatgtaagatgtaagacttgcaaaggacagaaggaatcttctgtaaccacatagctgtatgccagagaggaagccttgttattgggcatttgatgaggtttggcatggacttcaaggataaatgaatgaaaactttgcaccacttttgttacaaggtacggtagaaaatagtgaagtcagtttcctctcatcaaatctaaaattctccaaaatactctcaggcataacatacttagctgttaaattttgaactgctaattactaatacttgaataccaatagttactgagattcctattttgtggttagtctgactcaggatttggagcctaattaactctaaacttttgaaaattttaatcatcaagctatagaggctccaagtgcaattaataataactcatttataccttccacagaatttaataaagattctacttgtttctgtcttttaataactttccccttttgtgcccttgtggcctcagaaatccttaagaattgcatggatgaatgtgaccataactgattttggaatggttcagtttaggaaccaagaggcccaggtgaggcaacatcttttttctctacaggtaccaacaaaccttgacttgtcagcttccatcatcaattaagattctcagaatttgcaattaattgaatagaattcatttactatctgcccactcaaagaagtacaagggtagagtaagctaactgggctttaacatggtcagaatgtctggtgcatgaactataaaaaagagaactgtctcccatccccttccttgttttactcttagtaacatccagaattccctggaacagattgcctaccaccagaccttagaaaagactgtcattctcttgctccttacttgaaatacaaatattgggaatgtcacagacatcaagcaactactgtcaagtgggaggagagaatgagcagaattgctgactcctatttgtagagtgaaaaggaggagtgataatagatgcccttctgtctagctttcctttcttcaactagtggtaatgcaagattagaatcaaggttgacaggaggcaaggtcactcactgaagtgacagaaagacaattctcctttgctccaaagagagaaatctgtcacctttgcacctcactgcctttaaacacagacgggagggcaggcccaaatctcagcattgacttttgtcctccaagagaggaagagaagaagtaattgggcaacttggaggcccacgccccagctagccttcctgatcgtaacctccaacctcaggaaagggaccttcccaaaacacagatcccaaaggaaacaaaatagaccaaggagcataatctgcttctctcacacagcctctctgccagtggaccctgcctgcttccctctcagtgctcagcactctgtgtagtgtctttcaggttgatacactctcccaaggtgcaggcgctggccccatgagcccagcaccaaagttttctaagtcataggtcagactgtcaagatcatttctttatctataggttgatatttagcttaaaaaaaaagaataaacctagaactcaaaggaaacctgttgcaaatagcttagatcaacagtgtatctcttccctaagaatgatagtatcttagtaagacaccttctatgcatggtatggaagcatgatttttgcttgtgggaaaacctaatattttatcagacccctcggacttctcaatccctccctctccacacagtagtacttaatgaaaatgttttgctttagagagcaaaatgctactttcagaagacactgaaatagtatatgtatttgcttaccatttgcaagctaaaatcaaggtgggatggggtcattattttcacatagaatgtatttattttgtgcaggctgttaaacacatctggcacctagtttttccattaagagcattgctattttccctttttataaagtagcttctgctgtcaaggttaacaattctatatgctttaggaagctaagttctaatttccttttgtgagtttcatttcttttataaccagtatgttaccacagacatcagttgcaaagctacgatgatagtgtgattcttagccgaaaaaaaagcgtgtgctcttaaagtatgttcagtttttctgtctacatatgctttgtgtgagttaaaaagggggtgggtggtgtaaatattcctttagctgctttgcatatttaacccagtcatcaaaaggcataaatgacttcaatattttatatatcttggttttcaagtatcatttcacattctctatacatgactttgttattgtggaatacaagcctgcaatgggtgtatatatacagaacattaataattcttagaaggatggaagccaaatggctgcatgatggaaattagaagaaaaaaaaagcagaaacttgaatttgctaagcatgtttggggggaaatagaatccttaactcagtgcctctgtctgcgatatggaaaccttcaactttgttcaccaaaattgtattatacctgtgtatatatatatatatatataaatataaatatagtatagtgaatcagacaccatcagttttaagtctctggtagccaaacttaaataaataatccatagaatatcacatacgttcactccatcttcatctctgaagttagtggagaccatcaaaatgactgtacatttcataactctgggaagatttcaaatgtgaagtgcccctgtgcattttcttggccatagcacggcattcttgctttagctgtgctttcctgggatgagaagatcttggtgtatttaacacataagctttgttagaaatcacctctgaagatcatttcattttctcactttgggttgttgcaagacaaagcaaaggaaaaggaacacaatgaaggaggccgtgacatttttagttgccaccgttgtaactcaaacaatatgggtttgttggtgaactgatttatcaaggcttctgttacggttttgcatctgtgtgtgaggaaaattttaatttatttggaagtatttattagccatgttgttggtcctgaaaataaatctctaagtagcacagttgtgggtatattatgcagacacttaccacaatacctgcaaaagtaactgtggttttctttcaagacactgtaataaacagtgaactaagagaatagattctgatacatctcgataaatcattctctgcaaaagtttcagggctaatgtatttatgtgtatttttaaattctactttctttggcatctcttcatggctcagcgacaacaaagtaataggtcattggctggcttacgtcgataggaattttactcttaagaagggccagtgtatagctgactctacatataatgtgtaatcagataatccaatagagaggaattgtccaaatagttttagtacctttctgatcatctgactcagtaggctaggagacaatctgtcatctgagccatagttcttgagatttaaaaagtctgtccagtgactgcaatctgattatgaataaactattttaactattcattcttgctgaaactgaagtgtacacaatagcacactgttggcatgctgaggcaaaacattgggttcttttgtgttctaccttcaaaacaatctgtttgcatttgaaatataagtgtttaagctttttaggagttagtgtaataagagaatgtgaatatgttgggaaattttcagatgccattaataattgtaattttgttgttaaattaacaaggactttaggataagcctcttgatgtttttgctttaaattgaaagcatgtctgtcaaattgcaagtctcccttcagtttctatatatcacccaggagagggtctctgagttggtgttgtacctgtaccactcacatgtagctcaagtgtaatttgtagtgtttacattcaagctgggatcttgattggttaaattaatccacataccactgccactgctgaaggaccaggtgttggaatacacagcattacagactataagcaaagcaaacaaaagttgatccttacatatgccatccttctgtgtcattttgtggctgttctgtgtttttcttcctagttatttattattgttaataacttactttttcttacattctgttgtaaataaaatacaaagcaatcttctttgcaag

SEQ ID NO: 374648 - DNA, 2032 bp, Homo sapiens
agagccgggccaggcgaggtaacaggctacgtggggttcatgttctctctggttgttccctccccgtttgtacttcatttccattcacacggctgcacttcccagttttccaggatctctcctctgaaaccaggcaagggtttgttcccaaatcccacccattgcctctccagccccagacttgcttactggaccacacataggtggtgggcattggtgacttgtccctagggtcaggggaccagaaacttcccagaggggctggatggagcacggcagcactcagggcacaatggagagcggattcaaagggcaaaggagccgaggaaagcccctctgcccgagcctccccagcgccggccgggctccgctccggagcagccccgccgtctggcagagacatgctgttttgtttaaatcctccacattctttgccatttccccattggccggatggggctaccctccccgccgcggccgctgctgatgtcagcctcgctcgcgctcgctcctcccgcacccacctcccggccccaggcacactgcatcggcgcggacgctccggccccggcgaggtggctgcaaactcgcgggcacgcacggcgcccggggagccgagggactcgggggaggggacgcgcgcggaaggcgccagcttcctcccgcccgcccctggcagccgcgagccgaggttggaggcgcccggggccccagccgggcagagccgagcggcggcggcggcggcggcttcccttttctccccgagccgagccccggagcggcgcggggaccggccctaaaaagagcaggaaatcttgtttaccgcccgcggagagaagccgatcgagcctttgtctggaaagtcagcatctccggctccggctgcaatgtgttcctggtgacattagcatcgggcagacccgccggaggaggggggtcgccaggttcccgtctgctttcggaggcggatcgagcgggtgacttttgtgcattcgttttaatttttggaaatctctcttttttcctccctcgctcgctgccgggcatgtcctgatctggcggccgctcctaccaccctgggcagccgagcagagtcgtccccagcgggtctccctccctgcctccctgactttgcaacaccgcgttccgggaggaccggcctcggcgagggaggaggcgggggagctgcgaacacccagacccaaaccctgacatgctctggggcggagaggaggaagccaggagctgagcgcgccgcgggggctgcttcgccctccggctccgagcgccgggctccgggcgccctgccctgcgcctgggcagcagccttgctggtcttgggggcgccccccgcttcccgccccgggggtccgcggccggcaggaccatgctgctgaaagagtaccggatctgcatgccgctcaccgtagacgagtacaaaattggacagctgtacatgatcagcaaacacagccatgaacagagtgaccggggagaaggggtggaggtcgtccagaatgagccctttgaggaccctcaccatggcaatgggcagttcaccgagaagcgggtgtatctcaacagcaaactgcctagttgggctagagctgttgtccccaaaatattttatgtgacagagaaggcttggaactattatccctacacaattacagaatacacatgttcctttctgccgaaattctccattcatatagaaaccaagtatgaggacaacaaaggaagcaatgacaccattttcgacaatgaagccaaagacgtggagagagaagtttgctttattgatattgcctgcgatgaaattccagagcgctactacaaagaatctgaggtaagcaacagttgggatgagatgtggaagattcattcattcattcattccacaactatttcttaagtgcctcctaacttgggaggatgccatctctcgtcgtgtggattcaatttgctttcgtatcttgctggttctttttgcaagtctcaaaattaagtctctaactcttcagggaccatc

SEQ ID NO: 374649 - DNA, 5224 bp, Homo sapiens
aacaaaggaacatgtgtattctgtaattgtgtagggataatagttccaagccttctctgtcacataaaatattttggggacaacaaaggaagcaatgacaccattttcgacaatgaagccaaagacgtggagagagaagtttgctttattgatattgcctgcgatgaaattccagagcgctactacaaagaatctgaggatcctaagcacttcaagtcagagaagacaggacggggacagttgagggaaggctggagagatagtcatcagcctatcatgtgctcctacaagctggtgactgtgaagtttgaggtctgggggcttcagaccagagtggaacaatttgtacacaaggtggtccgagacattctgctgattggacatagacaggcttttgcatgggttgatgagtggtatgatatgacaatggatgatgttcgggaatacgagaaaaacatgcatgaacaaaccaacataaaagtttgcaatcagcattcctcccctgtggatgacatagagagtcatgcccaaacaagtacatgacaatggatgaagtccgagaatttgaacgagccactcaggaagccaccaacaagaaaatcggcattttcccacctgcaatttctatctccagcatccccctgctgccttcttccgtccgcagtgcgccttctagtgctccatccacccctctctccacagacgcacccgaatttctgtccgttcccaaagatcggccccggaaaaagtctgccccagaaactctcacacttccagaccctgagaaaaaagccaccctgaatttacccggcatgcactcttcagataagccatgtcggcccaaatctgagtaactttatataaatatctcatggggttttatattttcatttgttgttgttgtttttttttaagaatcttctgatagagaaaaagactgctttgtcactcaaacatgttccttcgacctttcagtgtgcatgtgactcagtaacttcacatagaatatgattccctaagtatgctacacagcatcatattagatgtaagatgtaagacttgcaaaggacagaaggaatcttctgtaaccacatagctgtatgccagagaggaagccttgttattgggcatttgatgaggtttggcatggacttcaaggataaatgaatgaaaactttgcaccacttttgttacaaggtacggtagaaaatagtgaagtcagtttcctctcatcaaatctaaaattctccaaaatactctcaggcataacatacttagctgttaaattttgaactgctaattactaatacttgaataccaatagttactgagattcctattttgtggttagtctgactcaggatttggagcctaattaactctaaacttttgaaaattttaatcatcaagctatagaggctccaagtgcaattaataataactcatttataccttccacagaatttaataaagattctacttgtttctgtcttttaataactttccccttttgtgcccttgtggcctcagaaatccttaagaattgcatggatgaatgtgaccataactgattttggaatggttcagtttaggaaccaagaggcccaggtgaggcaacatcttttttctctacaggtaccaacaaaccttgacttgtcagcttccatcatcaattaagattctcagaatttgcaattaattgaatagaattcatttactatctgcccactcaaagaagtacaagggtagagtaagctaactgggctttaacatggtcagaatgtctggtgcatgaactataaaaaagagaactgtctcccatccccttccttgttttactcttagtaacatccagaattccctggaacagattgcctaccaccagaccttagaaaagactgtcattctcttgctccttacttgaaatacaaatattgggaatgtcacagacatcaagcaactactgtcaagtgggaggagagaatgagcagaattgctgactcctatttgtagagtgaaaaggaggagtgataatagatgcccttctgtctagctttcctttcttcaactagtggtaatgcaagattagaatcaaggttgacaggaggcaaggtcactcactgaagtgacagaaagacaattctcctttgctccaaagagagaaatctgtcacctttgcacctcactgcctttaaacacagacgggagggcaggcccaaatctcagcattgacttttgtcctccaagagaggaagagaagaagtaattgggcaacttggaggcccacgccccagctagccttcctgatcgtaacctccaacctcaggaaagggaccttcccaaaacacagatcccaaaggaaacaaaatagaccaaggagcataatctgcttctctcacacagcctctctgccagtggaccctgcctgcttccctctcagtgctcagcactctgtgtagtgtctttcaggttgatacactctcccaaggtgcaggcgctggccccatgagcccagcaccaaagttttctaagtcataggtcagactgtcaagatcatttctttatctataggttgatatttagcttaaaaaaaaagaataaacctagaactcaaaggaaacctgttgcaaatagcttagatcaacagtgtatctcttccctaagaatgatagtatcttagtaagacaccttctatgcatggtatggaagcatgatttttgcttgtgggaaaacctaatattttatcagacccctcggacttctcaatccctccctctccacacagtagtacttaatgaaaatgttttgctttagagagcaaaatgctactttcagaagacactgaaatagtatatgtatttgcttaccatttgcaagctaaaatcaaggtgggatggggtcattattttcacatagaatgtatttattttgtgcaggctgttaaacacatctggcacctagtttttccattaagagcattgctattttccctttttataaagtagcttctgctgtcaaggttaacaattctatatgctttaggaagctaagttctaatttccttttgtgagtttcatttcttttataaccagtatgttaccacagacatcagttgcaaagctacgatgatagtgtgattcttagccgaaaaaaaagcgtgtgctcttaaagtatgttcagtttttctgtctacatatgctttgtgtgagttaaaaagggggtgggtggtgtaaatattcctttagctgctttgcatatttaacccagtcatcaaaaggcataaatgacttcaatattttatatatcttggttttcaagtatcatttcacattctctatacatgactttgttattgtggaatacaagcctgcaatgggtgtatatatacagaacattaataattcttagaaggatggaagccaaatggctgcatgatggaaattagaagaaaaaaaaagcagaaacttgaatttgctaagcatgtttggggggaaatagaatccttaactcagtgcctctgtctgcgatatggaaaccttcaactttgttcaccaaaattgtattatacctgtgtatatatatatatatatataaatataaatatagtatagtgaatcagacaccatcagttttaagtctctggtagccaaacttaaataaataatccatagaatatcacatacgttcactccatcttcatctctgaagttagtggagaccatcaaaatgactgtacatttcataactctgggaagatttcaaatgtgaagtgcccctgtgcattttcttggccatagcacggcattcttgctttagctgtgctttcctgggatgagaagatcttggtgtatttaacacataagctttgttagaaatcacctctgaagatcatttcattttctcactttgggttgttgcaagacaaagcaaaggaaaaggaacacaatgaaggaggccgtgacatttttagttgccaccgttgtaactcaaacaatatgggtttgttggtgaactgatttatcaaggcttctgttacggttttgcatctgtgtgtgaggaaaattttaatttatttggaagtatttattagccatgttgttggtcctgaaaataaatctctaagtagcacagttgtgggtatattatgcagacacttaccacaatacctgcaaaagtaactgtggttttctttcaagacactgtaataaacagtgaactaagagaatagattctgatacatctcgataaatcattctctgcaaaagtttcagggctaatgtatttatgtgtatttttaaattctactttctttggcatctcttcatggctcagcgacaacaaagtaataggtcattggctggcttacgtcgataggaattttactcttaagaagggccagtgtatagctgactctacatataatgtgtaatcagataatccaatagagaggaattgtccaaatagttttagtacctttctgatcatctgactcagtaggctaggagacaatctgtcatctgagccatagttcttgagatttaaaaagtctgtccagtgactgcaatctgattatgaataaactattttaactattcattcttgctgaaactgaagtgtacacaatagcacactgttggcatgctgaggcaaaacattgggttcttttgtgttctaccttcaaaacaatctgtttgcatttgaaatataagtgtttaagctttttaggagttagtgtaataagagaatgtgaatatgttgggaaattttcagatgccattaataattgtaattttgttgttaaattaacaaggactttaggataagcctcttgatgtttttgctttaaattgaaagcatgtctgtcaaattgcaagtctcccttcagtttctatatatcacccaggagagggtctctgagttggtgttgtacctgtaccactcacatgtagctcaagtgtaatttgtagtgtttacattcaagctgggatcttgattggttaaattaatccacataccactgccactgctgaaggaccaggtgttggaatacacagcattacagactataagcaaagcaaacaaaagttgatccttacatatgccatccttctgtgtcattttgtggctgttctgtgtttttcttcctagttatttattattgttaataacttactttttcttacattctgttgtaaataaaatacaaagcaatcttctttgcaag

SEQ ID NO: 374650 - DNA, 5361 bp, Homo sapiens
  misc_feature (79)..(79): n is a, c, g, or t
gacctgaggatcccaacataagcacatggcatgtgatagggacggtgacgcctgccgttccggagccggcagagcaggntggagctggcgtgtggaaaaagcagcgggctgccatgtgtccgagccgagcactggtctacgcgctgacgttcgagaaccccctcgtctgccacccccatgccttgctagtgtacccaaccctgccagagtgcctgcagcggcagtgggacccaggtagagcaggacctgggcgatgaagctgatcaccccccagggcccatgaggaagttgctgaggacactttttgaggatgctggatacttaaagaatctgaggatcctaagcacttcaagtcagagaagacaggacggggacagttgagggaaggctggagagatagtcatcagcctatcatgtgctcctacaagctggtgactgtgaagtttgaggtctgggggcttcagaccagagtggaacaatttgtacacaaggtggtccgagacattctgctgattggacatagacaggcttttgcatgggttgatgagtggtatgatatgacaatggatgatgttcgggaatacgagaaaaacatgcatgaacaaaccaacataaaagtttgcaatcagcattcctcccctgtggatgacatagagagtcatgcccaaacaagtacatgacaatggatgaagtccgagaatttgaacgagccactcaggaagccaccaacaagaaaatcggcattttcccacctgcaatttctatctccagcatccccctgctgccttcttccgtccgcagtgcgccttctagtgctccatccacccctctctccacagacgcacccgaatttctgtccgttcccaaagatcggccccggaaaaagtctgccccagaaactctcacacttccagaccctgagaaaaaagccaccctgaatttacccggcatgcactcttcagataagccatgtcggcccaaatctgagtaactttatataaatatctcatggggttttatattttcatttgttgttgttgtttttttttaagaatcttctgatagagaaaaagactgctttgtcactcaaacatgttccttcgacctttcagtgtgcatgtgactcagtaacttcacatagaatatgattccctaagtatgctacacagcatcatattagatgtaagatgtaagacttgcaaaggacagaaggaatcttctgtaaccacatagctgtatgccagagaggaagccttgttattgggcatttgatgaggtttggcatggacttcaaggataaatgaatgaaaactttgcaccacttttgttacaaggtacggtagaaaatagtgaagtcagtttcctctcatcaaatctaaaattctccaaaatactctcaggcataacatacttagctgttaaattttgaactgctaattactaatacttgaataccaatagttactgagattcctattttgtggttagtctgactcaggatttggagcctaattaactctaaacttttgaaaattttaatcatcaagctatagaggctccaagtgcaattaataataactcatttataccttccacagaatttaataaagattctacttgtttctgtcttttaataactttccccttttgtgcccttgtggcctcagaaatccttaagaattgcatggatgaatgtgaccataactgattttggaatggttcagtttaggaaccaagaggcccaggtgaggcaacatcttttttctctacaggtaccaacaaaccttgacttgtcagcttccatcatcaattaagattctcagaatttgcaattaattgaatagaattcatttactatctgcccactcaaagaagtacaagggtagagtaagctaactgggctttaacatggtcagaatgtctggtgcatgaactataaaaaagagaactgtctcccatccccttccttgttttactcttagtaacatccagaattccctggaacagattgcctaccaccagaccttagaaaagactgtcattctcttgctccttacttgaaatacaaatattgggaatgtcacagacatcaagcaactactgtcaagtgggaggagagaatgagcagaattgctgactcctatttgtagagtgaaaaggaggagtgataatagatgcccttctgtctagctttcctttcttcaactagtggtaatgcaagattagaatcaaggttgacaggaggcaaggtcactcactgaagtgacagaaagacaattctcctttgctccaaagagagaaatctgtcacctttgcacctcactgcctttaaacacagacgggagggcaggcccaaatctcagcattgacttttgtcctccaagagaggaagagaagaagtaattgggcaacttggaggcccacgccccagctagccttcctgatcgtaacctccaacctcaggaaagggaccttcccaaaacacagatcccaaaggaaacaaaatagaccaaggagcataatctgcttctctcacacagcctctctgccagtggaccctgcctgcttccctctcagtgctcagcactctgtgtagtgtctttcaggttgatacactctcccaaggtgcaggcgctggccccatgagcccagcaccaaagttttctaagtcataggtcagactgtcaagatcatttctttatctataggttgatatttagcttaaaaaaaaagaataaacctagaactcaaaggaaacctgttgcaaatagcttagatcaacagtgtatctcttccctaagaatgatagtatcttagtaagacaccttctatgcatggtatggaagcatgatttttgcttgtgggaaaacctaatattttatcagacccctcggacttctcaatccctccctctccacacagtagtacttaatgaaaatgttttgctttagagagcaaaatgctactttcagaagacactgaaatagtatatgtatttgcttaccatttgcaagctaaaatcaaggtgggatggggtcattattttcacatagaatgtatttattttgtgcaggctgttaaacacatctggcacctagtttttccattaagagcattgctattttccctttttataaagtagcttctgctgtcaaggttaacaattctatatgctttaggaagctaagttctaatttccttttgtgagtttcatttcttttataaccagtatgttaccacagacatcagttgcaaagctacgatgatagtgtgattcttagccgaaaaaaaagcgtgtgctcttaaagtatgttcagtttttctgtctacatatgctttgtgtgagttaaaaagggggtgggtggtgtaaatattcctttagctgctttgcatatttaacccagtcatcaaaaggcataaatgacttcaatattttatatatcttggttttcaagtatcatttcacattctctatacatgactttgttattgtggaatacaagcctgcaatgggtgtatatatacagaacattaataattcttagaaggatggaagccaaatggctgcatgatggaaattagaagaaaaaaaaagcagaaacttgaatttgctaagcatgtttggggggaaatagaatccttaactcagtgcctctgtctgcgatatggaaaccttcaactttgttcaccaaaattgtattatacctgtgtatatatatatatatatataaatataaatatagtatagtgaatcagacaccatcagttttaagtctctggtagccaaacttaaataaataatccatagaatatcacatacgttcactccatcttcatctctgaagttagtggagaccatcaaaatgactgtacatttcataactctgggaagatttcaaatgtgaagtgcccctgtgcattttcttggccatagcacggcattcttgctttagctgtgctttcctgggatgagaagatcttggtgtatttaacacataagctttgttagaaatcacctctgaagatcatttcattttctcactttgggttgttgcaagacaaagcaaaggaaaaggaacacaatgaaggaggccgtgacatttttagttgccaccgttgtaactcaaacaatatgggtttgttggtgaactgatttatcaaggcttctgttacggttttgcatctgtgtgtgaggaaaattttaatttatttggaagtatttattagccatgttgttggtcctgaaaataaatctctaagtagcacagttgtgggtatattatgcagacacttaccacaatacctgcaaaagtaactgtggttttctttcaagacactgtaataaacagtgaactaagagaatagattctgatacatctcgataaatcattctctgcaaaagtttcagggctaatgtatttatgtgtatttttaaattctactttctttggcatctcttcatggctcagcgacaacaaagtaataggtcattggctggcttacgtcgataggaattttactcttaagaagggccagtgtatagctgactctacatataatgtgtaatcagataatccaatagagaggaattgtccaaatagttttagtacctttctgatcatctgactcagtaggctaggagacaatctgtcatctgagccatagttcttgagatttaaaaagtctgtccagtgactgcaatctgattatgaataaactattttaactattcattcttgctgaaactgaagtgtacacaatagcacactgttggcatgctgaggcaaaacattgggttcttttgtgttctaccttcaaaacaatctgtttgcatttgaaatataagtgtttaagctttttaggagttagtgtaataagagaatgtgaatatgttgggaaattttcagatgccattaataattgtaattttgttgttaaattaacaaggactttaggataagcctcttgatgtttttgctttaaattgaaagcatgtctgtcaaattgcaagtctcccttcagtttctatatatcacccaggagagggtctctgagttggtgttgtacctgtaccactcacatgtagctcaagtgtaatttgtagtgtttacattcaagctgggatcttgattggttaaattaatccacataccactgccactgctgaaggaccaggtgttggaatacacagcattacagactataagcaaagcaaacaaaagttgatccttacatatgccatccttctgtgtcattttgtggctgttctgtgtttttcttcctagttatttattattgttaataacttactttttcttacattctgttgtaaataaaatacaaagcaatcttctttgcaag

SEQ ID NO: 374651 - DNA, 5217 bp, Homo sapiens
aaaaatcctgatgatttacctgtttaccctataaaggtatactttcatgatctaaagttgacaataatgacaataatatgtgtcatttcagggccattgattgttttaattaccttctctttatgaaaaacatgaccagttaattatagctccaaataccccacaccagacccacaacaacacagatgcacacgggtgcacacacatacacacacacaggcacatatttcccccgtctagttctgtattctactgttaagtccttattgagaatacttaaaatactcactgtgaagagtgctttggaaaatcttaaatggataatcataaagggatattgttttcagggtgtagcttccaatagaaaaaattgggggtttggtatttcaatgatactttgggtgtataatcgggagaggcccctttatgatagggttcccatagttcctgtaaaaacaagggtagtgatgaatctatttgcctctcttataaataactgctcgtttttctttctgtttttctccttgaagacatgacaatggatgaagtccgagaatttgaacgagccactcaggaagccaccaacaagaaaatcggcattttcccacctgcaatttctatctccagcatccccctgctgccttcttccgtccgcagtgcgccttctagtgctccatccacccctctctccacagacgcacccgaatttctgtccgttcccaaagatcggccccggaaaaagtctgccccagaaactctcacacttccagaccctgagaaaaaagccaccctgaatttacccggcatgcactcttcagataagccatgtcggcccaaatctgagtaactttatataaatatctcatggggttttatattttcatttgttgttgttgtttttttttaagaatcttctgatagagaaaaagactgctttgtcactcaaacatgttccttcgacctttcagtgtgcatgtgactcagtaacttcacatagaatatgattccctaagtatgctacacagcatcatattagatgtaagatgtaagacttgcaaaggacagaaggaatcttctgtaaccacatagctgtatgccagagaggaagccttgttattgggcatttgatgaggtttggcatggacttcaaggataaatgaatgaaaactttgcaccacttttgttacaaggtacggtagaaaatagtgaagtcagtttcctctcatcaaatctaaaattctccaaaatactctcaggcataacatacttagctgttaaattttgaactgctaattactaatacttgaataccaatagttactgagattcctattttgtggttagtctgactcaggatttggagcctaattaactctaaacttttgaaaattttaatcatcaagctatagaggctccaagtgcaattaataataactcatttataccttccacagaatttaataaagattctacttgtttctgtcttttaataactttccccttttgtgcccttgtggcctcagaaatccttaagaattgcatggatgaatgtgaccataactgattttggaatggttcagtttaggaaccaagaggcccaggtgaggcaacatcttttttctctacaggtaccaacaaaccttgacttgtcagcttccatcatcaattaagattctcagaatttgcaattaattgaatagaattcatttactatctgcccactcaaagaagtacaagggtagagtaagctaactgggctttaacatggtcagaatgtctggtgcatgaactataaaaaagagaactgtctcccatccccttccttgttttactcttagtaacatccagaattccctggaacagattgcctaccaccagaccttagaaaagactgtcattctcttgctccttacttgaaatacaaatattgggaatgtcacagacatcaagcaactactgtcaagtgggaggagagaatgagcagaattgctgactcctatttgtagagtgaaaaggaggagtgataatagatgcccttctgtctagctttcctttcttcaactagtggtaatgcaagattagaatcaaggttgacaggaggcaaggtcactcactgaagtgacagaaagacaattctcctttgctccaaagagagaaatctgtcacctttgcacctcactgcctttaaacacagacgggagggcaggcccaaatctcagcattgacttttgtcctccaagagaggaagagaagaagtaattgggcaacttggaggcccacgccccagctagccttcctgatcgtaacctccaacctcaggaaagggaccttcccaaaacacagatcccaaaggaaacaaaatagaccaaggagcataatctgcttctctcacacagcctctctgccagtggaccctgcctgcttccctctcagtgctcagcactctgtgtagtgtctttcaggttgatacactctcccaaggtgcaggcgctggccccatgagcccagcaccaaagttttctaagtcataggtcagactgtcaagatcatttctttatctataggttgatatttagcttaaaaaaaaagaataaacctagaactcaaaggaaacctgttgcaaatagcttagatcaacagtgtatctcttccctaagaatgatagtatcttagtaagacaccttctatgcatggtatggaagcatgatttttgcttgtgggaaaacctaatattttatcagacccctcggacttctcaatccctccctctccacacagtagtacttaatgaaaatgttttgctttagagagcaaaatgctactttcagaagacactgaaatagtatatgtatttgcttaccatttgcaagctaaaatcaaggtgggatggggtcattattttcacatagaatgtatttattttgtgcaggctgttaaacacatctggcacctagtttttccattaagagcattgctattttccctttttataaagtagcttctgctgtcaaggttaacaattctatatgctttaggaagctaagttctaatttccttttgtgagtttcatttcttttataaccagtatgttaccacagacatcagttgcaaagctacgatgatagtgtgattcttagccgaaaaaaaagcgtgtgctcttaaagtatgttcagtttttctgtctacatatgctttgtgtgagttaaaaagggggtgggtggtgtaaatattcctttagctgctttgcatatttaacccagtcatcaaaaggcataaatgacttcaatattttatatatcttggttttcaagtatcatttcacattctctatacatgactttgttattgtggaatacaagcctgcaatgggtgtatatatacagaacattaataattcttagaaggatggaagccaaatggctgcatgatggaaattagaagaaaaaaaaagcagaaacttgaatttgctaagcatgtttggggggaaatagaatccttaactcagtgcctctgtctgcgatatggaaaccttcaactttgttcaccaaaattgtattatacctgtgtatatatatatatatatataaatataaatatagtatagtgaatcagacaccatcagttttaagtctctggtagccaaacttaaataaataatccatagaatatcacatacgttcactccatcttcatctctgaagttagtggagaccatcaaaatgactgtacatttcataactctgggaagatttcaaatgtgaagtgcccctgtgcattttcttggccatagcacggcattcttgctttagctgtgctttcctgggatgagaagatcttggtgtatttaacacataagctttgttagaaatcacctctgaagatcatttcattttctcactttgggttgttgcaagacaaagcaaaggaaaaggaacacaatgaaggaggccgtgacatttttagttgccaccgttgtaactcaaacaatatgggtttgttggtgaactgatttatcaaggcttctgttacggttttgcatctgtgtgtgaggaaaattttaatttatttggaagtatttattagccatgttgttggtcctgaaaataaatctctaagtagcacagttgtgggtatattatgcagacacttaccacaatacctgcaaaagtaactgtggttttctttcaagacactgtaataaacagtgaactaagagaatagattctgatacatctcgataaatcattctctgcaaaagtttcagggctaatgtatttatgtgtatttttaaattctactttctttggcatctcttcatggctcagcgacaacaaagtaataggtcattggctggcttacgtcgataggaattttactcttaagaagggccagtgtatagctgactctacatataatgtgtaatcagataatccaatagagaggaattgtccaaatagttttagtacctttctgatcatctgactcagtaggctaggagacaatctgtcatctgagccatagttcttgagatttaaaaagtctgtccagtgactgcaatctgattatgaataaactattttaactattcattcttgctgaaactgaagtgtacacaatagcacactgttggcatgctgaggcaaaacattgggttcttttgtgttctaccttcaaaacaatctgtttgcatttgaaatataagtgtttaagctttttaggagttagtgtaataagagaatgtgaatatgttgggaaattttcagatgccattaataattgtaattttgttgttaaattaacaaggactttaggataagcctcttgatgtttttgctttaaattgaaagcatgtctgtcaaattgcaagtctcccttcagtttctatatatcacccaggagagggtctctgagttggtgttgtacctgtaccactcacatgtagctcaagtgtaatttgtagtgtttacattcaagctgggatcttgattggttaaattaatccacataccactgccactgctgaaggaccaggtgttggaatacacagcattacagactataagcaaagcaaacaaaagttgatccttacatatgccatccttctgtgtcattttgtggctgttctgtgtttttcttcctagttatttattattgttaataacttactttttcttacattctgttgtaaataaaatacaaagcaatcttctttgcaag

SEQ ID NO: 374652 - DNA, 1559 bp, Homo sapiens
agagccgggccaggcgaggtaacaggctacgtggggttcatgttctctctggttgttccctccccgtttgtacttcatttccattcacacggctgcacttcccagttttccaggatctctcctctgaaaccaggcaagggtttgttcccaaatcccacccattgcctctccagccccagacttgcttactggaccacacataggtggtgggcattggtgacttgtccctagggtcaggggaccagaaacttcccagaggggctggatggagcacggcagcactcagggcacaatggagagcggattcaaagggcaaaggagccgaggaaagcccctctgcccgagcctccccagcgccggccgggctccgctccggagcagccccgccgtctggcagagacatgctgttttgtttaaatcctccacattctttgccatttccccattggccggatggggctaccctccccgccgcggccgctgctgatgtcagcctcgctcgcgctcgctcctcccgcacccacctcccggccccaggcacactgcatcggcgcggacgctccggccccggcgaggtggctgcaaactcgcgggcacgcacggcgcccggggagccgagggactcgggggaggggacgcgcgcggaaggcgccagcttcctcccgcccgcccctggcagccgcgagccgaggttggaggcgcccggggccccagccgggcagagccgagcggcggcggcggcggcggcttcccttttctccccgagccgagccccggagcggcgcggggaccggccctaaaaagagcaggaaatcttgtttaccgcccgcggagagaagccgatcgagcctttgtctggaaagtcagcatctccggctccggctgcaatgtgttcctggtgacattagcatcgggcagacccgccggaggaggggggtcgccaggttcccgtctgctttcggaggcggatcgagcgggtgacttttgtgcattcgttttaatttttggaaatctctcttttttcctccctcgctcgctgccgggcatgtcctgatctggcggccgctcctaccaccctgggcagccgagcagagtcgtccccagcgggtctccctccctgcctccctgactttgcaacaccgcgttccgggaggaccggcctcggcgagggaggaggcgggggagctgcgaacacccagacccaaaccctgacatgctctggggcggagaggaggaagccaggagctgagcgcgccgcgggggctgcttcgccctccggctccgagcgccgggctccgggcgccctgccctgcgcctgggcagcagccttgctggtcttgggggcgccccccgcttcccgccccgggggtccgcggccggcaggaccatgctgctgaaagagtaccggatctgcatgccgctcaccgtagacgaggtaagcgccgcgcccggcccggcctcgcccgctccgggacccccgccgctaccgccgcctcctggccggcgagccccgggcgagcggcaggaaacccaggtggacgttaccccgcaaacccgaa

SEQ ID NO: 374653 - DNA, 6875 bp, Homo sapiens
agagccgggccaggcgaggtaacaggctacgtggggttcatgttctctctggttgttccctccccgtttgtacttcatttccattcacacggctgcacttcccagttttccaggatctctcctctgaaaccaggcaagggtttgttcccaaatcccacccattgcctctccagccccagacttgcttactggaccacacataggtggtgggcattggtgacttgtccctagggtcaggggaccagaaacttcccagaggggctggatggagcacggcagcactcagggcacaatggagagcggattcaaagggcaaaggagccgaggaaagcccctctgcccgagcctccccagcgccggccgggctccgctccggagcagccccgccgtctggcagagacatgctgttttgtttaaatcctccacattctttgccatttccccattggccggatggggctaccctccccgccgcggccgctgctgatgtcagcctcgctcgcgctcgctcctcccgcacccacctcccggccccaggcacactgcatcggcgcggacgctccggccccggcgaggtggctgcaaactcgcgggcacgcacggcgcccggggagccgagggactcgggggaggggacgcgcgcggaaggcgccagcttcctcccgcccgcccctggcagccgcgagccgaggttggaggcgcccggggccccagccgggcagagccgagcggcggcggcggcggcggcttcccttttctccccgagccgagccccggagcggcgcggggaccggccctaaaaagagcaggaaatcttgtttaccgcccgcggagagaagccgatcgagcctttgtctggaaagtcagcatctccggctccggctgcaatgtgttcctggtgacattagcatcgggcagacccgccggaggaggggggtcgccaggttcccgtctgctttcggaggcggatcgagcgggtgacttttgtgcattcgttttaatttttggaaatctctcttttttcctccctcgctcgctgccgggcatgtcctgatctggcggccgctcctaccaccctgggcagccgagcagagtcgtccccagcgggtctccctccctgcctccctgactttgcaacaccgcgttccgggaggaccggcctcggcgagggaggaggcgggggagctgcgaacacccagacccaaaccctgacatgctctggggcggagaggaggaagccaggagctgagcgcgccgcgggggctgcttcgccctccggctccgagcgccgggctccgggcgccctgccctgcgcctgggcagcagccttgctggtcttgggggcgccccccgcttcccgccccgggggtccgcggccggcaggaccatgctgctgaaagagtaccggatctgcatgccgctcaccgtagacgagtacaaaattggacagctgtacatgatcagcaaacacagccatgaacagagtgaccggggagaaggggtggaggtcgtccagaatgagccctttgaggaccctcaccatggcaatgggcagttcaccgagaagcgggtgtatctcaacagcaaactgcctagttgggctagagctgttgtccccaaaatattttatgtgacagagaaggcttggaactattatccctacacaattacagaatacacatgttcctttctgccgaaattctccattcatatagaaaccaagtatgaggacaacaaaggaagcaatgacaccattttcgacaatgaagccaaagacgtggagagagaagtttgctttattgatattgcctgcgatgaaattccagagcgctactacaaagaatctgaggatcctaagcacttcaagtcagagaagacaggacggggacagttgagggaaggctggagagatagtcatcagcctatcatgtgctcctacaagctggtgactgtgaagtttgaggtctgggggcttcagaccagagtggaacaatttgtacacaaggtggtccgagacattctgctgattggacatagacaggcttttgcatgggttgatgagtggtatgatatgacaatggatgatgttcgggaatacgagaaaaacatgcatgaacaaaccaacataaaagtttgcaatcagcattcctcccctgtggatgacatagagagtcatgcccaaacaagtacatgacaatggatgaagtccgagaatttgaacgagccactcaggaagccaccaacaagaaaatcggcattttcccacctgcaatttctatctccagcatccccctgctgccttcttccgtccgcagtgcgccttctagtgctccatccacccctctctccacagacgcacccgaatttctgtccgttcccaaagatcggccccggaaaaagtctgccccagaaactctcacacttccagaccctgagaaaaaagccaccctgaatttacccggcatgcactcttcagataagccatgtcggcccaaatctgagtaactttatataaatatctcatggggttttatattttcatttgttgttgttgtttttttttaagaatcttctgatagagaaaaagactgctttgtcactcaaacatgttccttcgacctttcagtgtgcatgtgactcagtaacttcacatagaatatgattccctaagtatgctacacagcatcatattagatgtaagatgtaagacttgcaaaggacagaaggaatcttctgtaaccacatagctgtatgccagagaggaagccttgttattgggcatttgatgaggtttggcatggacttcaaggataaatgaatgaaaactttgcaccacttttgttacaaggtacggtagaaaatagtgaagtcagtttcctctcatcaaatctaaaattctccaaaatactctcaggcataacatacttagctgttaaattttgaactgctaattactaatacttgaataccaatagttactgagattcctattttgtggttagtctgactcaggatttggagcctaattaactctaaacttttgaaaattttaatcatcaagctatagaggctccaagtgcaattaataataactcatttataccttccacagaatttaataaagattctacttgtttctgtcttttaataactttccccttttgtgcccttgtggcctcagaaatccttaagaattgcatggatgaatgtgaccataactgattttggaatggttcagtttaggaaccaagaggcccaggtgaggcaacatcttttttctctacaggtaccaacaaaccttgacttgtcagcttccatcatcaattaagattctcagaatttgcaattaattgaatagaattcatttactatctgcccactcaaagaagtacaagggtagagtaagctaactgggctttaacatggtcagaatgtctggtgcatgaactataaaaaagagaactgtctcccatccccttccttgttttactcttagtaacatccagaattccctggaacagattgcctaccaccagaccttagaaaagactgtcattctcttgctccttacttgaaatacaaatattgggaatgtcacagacatcaagcaactactgtcaagtgggaggagagaatgagcagaattgctgactcctatttgtagagtgaaaaggaggagtgataatagatgcccttctgtctagctttcctttcttcaactagtggtaatgcaagattagaatcaaggttgacaggaggcaaggtcactcactgaagtgacagaaagacaattctcctttgctccaaagagagaaatctgtcacctttgcacctcactgcctttaaacacagacgggagggcaggcccaaatctcagcattgacttttgtcctccaagagaggaagagaagaagtaattgggcaacttggaggcccacgccccagctagccttcctgatcgtaacctccaacctcaggaaagggaccttcccaaaacacagatcccaaaggaaacaaaatagaccaaggagcataatctgcttctctcacacagcctctctgccagtggaccctgcctgcttccctctcagtgctcagcactctgtgtagtgtctttcaggttgatacactctcccaaggtgcaggcgctggccccatgagcccagcaccaaagttttctaagtcataggtcagactgtcaagatcatttctttatctataggttgatatttagcttaaaaaaaaagaataaacctagaactcaaaggaaacctgttgcaaatagcttagatcaacagtgtatctcttccctaagaatgatagtatcttagtaagacaccttctatgcatggtatggaagcatgatttttgcttgtgggaaaacctaatattttatcagacccctcggacttctcaatccctccctctccacacagtagtacttaatgaaaatgttttgctttagagagcaaaatgctactttcagaagacactgaaatagtatatgtatttgcttaccatttgcaagctaaaatcaaggtgggatggggtcattattttcacatagaatgtatttattttgtgcaggctgttaaacacatctggcacctagtttttccattaagagcattgctattttccctttttataaagtagcttctgctgtcaaggttaacaattctatatgctttaggaagctaagttctaatttccttttgtgagtttcatttcttttataaccagtatgttaccacagacatcagttgcaaagctacgatgatagtgtgattcttagccgaaaaaaaagcgtgtgctcttaaagtatgttcagtttttctgtctacatatgctttgtgtgagttaaaaagggggtgggtggtgtaaatattcctttagctgctttgcatatttaacccagtcatcaaaaggcataaatgacttcaatattttatatatcttggttttcaagtatcatttcacattctctatacatgactttgttattgtggaatacaagcctgcaatgggtgtatatatacagaacattaataattcttagaaggatggaagccaaatggctgcatgatggaaattagaagaaaaaaaaagcagaaacttgaatttgctaagcatgtttggggggaaatagaatccttaactcagtgcctctgtctgcgatatggaaaccttcaactttgttcaccaaaattgtattatacctgtgtatatatatatatatatataaatataaatatagtatagtgaatcagacaccatcagttttaagtctctggtagccaaacttaaataaataatccatagaatatcacatacgttcactccatcttcatctctgaagttagtggagaccatcaaaatgactgtacatttcataactctgggaagatttcaaatgtgaagtgcccctgtgcattttcttggccatagcacggcattcttgctttagctgtgctttcctgggatgagaagatcttggtgtatttaacacataagctttgttagaaatcacctctgaagatcatttcattttctcactttgggttgttgcaagacaaagcaaaggaaaaggaacacaatgaaggaggccgtgacatttttagttgccaccgttgtaactcaaacaatatgggtttgttggtgaactgatttatcaaggcttctgttacggttttgcatctgtgtgtgaggaaaattttaatttatttggaagtatttattagccatgttgttggtcctgaaaataaatctctaagtagcacagttgtgggtatattatgcagacacttaccacaatacctgcaaaagtaactgtggttttctttcaagacactgtaataaacagtgaactaagagaatagattctgatacatctcgataaatcattctctgcaaaagtttcagggctaatgtatttatgtgtatttttaaattctactttctttggcatctcttcatggctcagcgacaacaaagtaataggtcattggctggcttacgtcgataggaattttactcttaagaagggccagtgtatagctgactctacatataatgtgtaatcagataatccaatagagaggaattgtccaaatagttttagtacctttctgatcatctgactcagtaggctaggagacaatctgtcatctgagccatagttcttgagatttaaaaagtctgtccagtgactgcaatctgattatgaataaactattttaactattcattcttgctgaaactgaagtgtacacaatagcacactgttggcatgctgaggcaaaacattgggttcttttgtgttctaccttcaaaacaatctgtttgcatttgaaatataagtgtttaagctttttaggagttagtgtaataagagaatgtgaatatgttgggaaattttcagatgccattaataattgtaattttgttgttaaattaacaaggactttaggataagcctcttgatgtttttgctttaaattgaaagcatgtctgtcaaattgcaagtctcccttcagtttctatatatcacccaggagagggtctctgagttggtgttgtacctgtaccactcacatgtagctcaagtgtaatttgtagtgtttacattcaagctgggatcttgattggttaaattaatccacataccactgccactgctgaaggaccaggtgttggaatacacagcattacagactataagcaaagcaaacaaaagttgatccttacatatgccatccttctgtgtcattttgtggctgttctgtgtttttcttcctagttatttattattgttaataacttactttttcttacattctgttgtaaataaaatacaaagcaatcttctttgcaag

SEQ ID NO: 374654 - DNA, 5867 bp, Homo sapiens
gtcctccaagcgcggctctgctgtccttctcccgatcctgcgaagccgcgagctccagtattcaggaagtggtgactcagataggattattccggccccggcttccctttcttccccttcttcctccccacctttgtggtgattccacgactgctgagcgtctctgtccagggacagcgagggagcccaaagccaagcaaggcaacgtgaaactcactagtgtggtttggtgtggcaacacacatgaaatcagccacccagaccgtctttatatttaaatctggtgcctcgaaactatcagatatgtttttgagccactacttggtgagaggggcgatgtgctttgggagagaaaaagatgcataactgagaacatggctgagctcacaggggctgtccgtatttgccatctggaccaagggttaagtacaaaattggacagctgtacatgatcagcaaacacagccatgaacagagtgaccggggagaaggggtggaggtcgtccagaatgagccctttgaggaccctcaccatggcaatgggcagttcaccgagaagcgggtgtatctcaacagcaaactgcctagttgggctagagctgttgtccccaaaatattttatgtgacagagaaggcttggaactattatccctacacaattacagaatacacatgttcctttctgccgaaattctccattcatatagaaaccaagtatgaggacaacaaaggaagcaatgacaccattttcgacaatgaagccaaagacgtggagagagaagtttgctttattgatattgcctgcgatgaaattccagagcgctactacaaagaatctgaggatcctaagcacttcaagtcagagaagacaggacggggacagttgagggaaggctggagagatagtcatcagcctatcatgtgctcctacaagctggtgactgtgaagtttgaggtctgggggcttcagaccagagtggaacaatttgtacacaaggtggtccgagacattctgctgattggacatagacaggcttttgcatgggttgatgagtggtatgatatgacaatggatgatgttcgggaatacgagaaaaacatgcatgaacaaaccaacataaaagtttgcaatcagcattcctcccctgtggatgacatagagagtcatgcccaaacaagtacatgacaatggatgaagtccgagaatttgaacgagccactcaggaagccaccaacaagaaaatcggcattttcccacctgcaatttctatctccagcatccccctgctgccttcttccgtccgcagtgcgccttctagtgctccatccacccctctctccacagacgcacccgaatttctgtccgttcccaaagatcggccccggaaaaagtctgccccagaaactctcacacttccagaccctgagaaaaaagccaccctgaatttacccggcatgcactcttcagataagccatgtcggcccaaatctgagtaactttatataaatatctcatggggttttatattttcatttgttgttgttgtttttttttaagaatcttctgatagagaaaaagactgctttgtcactcaaacatgttccttcgacctttcagtgtgcatgtgactcagtaacttcacatagaatatgattccctaagtatgctacacagcatcatattagatgtaagatgtaagacttgcaaaggacagaaggaatcttctgtaaccacatagctgtatgccagagaggaagccttgttattgggcatttgatgaggtttggcatggacttcaaggataaatgaatgaaaactttgcaccacttttgttacaaggtacggtagaaaatagtgaagtcagtttcctctcatcaaatctaaaattctccaaaatactctcaggcataacatacttagctgttaaattttgaactgctaattactaatacttgaataccaatagttactgagattcctattttgtggttagtctgactcaggatttggagcctaattaactctaaacttttgaaaattttaatcatcaagctatagaggctccaagtgcaattaataataactcatttataccttccacagaatttaataaagattctacttgtttctgtcttttaataactttccccttttgtgcccttgtggcctcagaaatccttaagaattgcatggatgaatgtgaccataactgattttggaatggttcagtttaggaaccaagaggcccaggtgaggcaacatcttttttctctacaggtaccaacaaaccttgacttgtcagcttccatcatcaattaagattctcagaatttgcaattaattgaatagaattcatttactatctgcccactcaaagaagtacaagggtagagtaagctaactgggctttaacatggtcagaatgtctggtgcatgaactataaaaaagagaactgtctcccatccccttccttgttttactcttagtaacatccagaattccctggaacagattgcctaccaccagaccttagaaaagactgtcattctcttgctccttacttgaaatacaaatattgggaatgtcacagacatcaagcaactactgtcaagtgggaggagagaatgagcagaattgctgactcctatttgtagagtgaaaaggaggagtgataatagatgcccttctgtctagctttcctttcttcaactagtggtaatgcaagattagaatcaaggttgacaggaggcaaggtcactcactgaagtgacagaaagacaattctcctttgctccaaagagagaaatctgtcacctttgcacctcactgcctttaaacacagacgggagggcaggcccaaatctcagcattgacttttgtcctccaagagaggaagagaagaagtaattgggcaacttggaggcccacgccccagctagccttcctgatcgtaacctccaacctcaggaaagggaccttcccaaaacacagatcccaaaggaaacaaaatagaccaaggagcataatctgcttctctcacacagcctctctgccagtggaccctgcctgcttccctctcagtgctcagcactctgtgtagtgtctttcaggttgatacactctcccaaggtgcaggcgctggccccatgagcccagcaccaaagttttctaagtcataggtcagactgtcaagatcatttctttatctataggttgatatttagcttaaaaaaaaagaataaacctagaactcaaaggaaacctgttgcaaatagcttagatcaacagtgtatctcttccctaagaatgatagtatcttagtaagacaccttctatgcatggtatggaagcatgatttttgcttgtgggaaaacctaatattttatcagacccctcggacttctcaatccctccctctccacacagtagtacttaatgaaaatgttttgctttagagagcaaaatgctactttcagaagacactgaaatagtatatgtatttgcttaccatttgcaagctaaaatcaaggtgggatggggtcattattttcacatagaatgtatttattttgtgcaggctgttaaacacatctggcacctagtttttccattaagagcattgctattttccctttttataaagtagcttctgctgtcaaggttaacaattctatatgctttaggaagctaagttctaatttccttttgtgagtttcatttcttttataaccagtatgttaccacagacatcagttgcaaagctacgatgatagtgtgattcttagccgaaaaaaaagcgtgtgctcttaaagtatgttcagtttttctgtctacatatgctttgtgtgagttaaaaagggggtgggtggtgtaaatattcctttagctgctttgcatatttaacccagtcatcaaaaggcataaatgacttcaatattttatatatcttggttttcaagtatcatttcacattctctatacatgactttgttattgtggaatacaagcctgcaatgggtgtatatatacagaacattaataattcttagaaggatggaagccaaatggctgcatgatggaaattagaagaaaaaaaaagcagaaacttgaatttgctaagcatgtttggggggaaatagaatccttaactcagtgcctctgtctgcgatatggaaaccttcaactttgttcaccaaaattgtattatacctgtgtatatatatatatatatataaatataaatatagtatagtgaatcagacaccatcagttttaagtctctggtagccaaacttaaataaataatccatagaatatcacatacgttcactccatcttcatctctgaagttagtggagaccatcaaaatgactgtacatttcataactctgggaagatttcaaatgtgaagtgcccctgtgcattttcttggccatagcacggcattcttgctttagctgtgctttcctgggatgagaagatcttggtgtatttaacacataagctttgttagaaatcacctctgaagatcatttcattttctcactttgggttgttgcaagacaaagcaaaggaaaaggaacacaatgaaggaggccgtgacatttttagttgccaccgttgtaactcaaacaatatgggtttgttggtgaactgatttatcaaggcttctgttacggttttgcatctgtgtgtgaggaaaattttaatttatttggaagtatttattagccatgttgttggtcctgaaaataaatctctaagtagcacagttgtgggtatattatgcagacacttaccacaatacctgcaaaagtaactgtggttttctttcaagacactgtaataaacagtgaactaagagaatagattctgatacatctcgataaatcattctctgcaaaagtttcagggctaatgtatttatgtgtatttttaaattctactttctttggcatctcttcatggctcagcgacaacaaagtaataggtcattggctggcttacgtcgataggaattttactcttaagaagggccagtgtatagctgactctacatataatgtgtaatcagataatccaatagagaggaattgtccaaatagttttagtacctttctgatcatctgactcagtaggctaggagacaatctgtcatctgagccatagttcttgagatttaaaaagtctgtccagtgactgcaatctgattatgaataaactattttaactattcattcttgctgaaactgaagtgtacacaatagcacactgttggcatgctgaggcaaaacattgggttcttttgtgttctaccttcaaaacaatctgtttgcatttgaaatataagtgtttaagctttttaggagttagtgtaataagagaatgtgaatatgttgggaaattttcagatgccattaataattgtaattttgttgttaaattaacaaggactttaggataagcctcttgatgtttttgctttaaattgaaagcatgtctgtcaaattgcaagtctcccttcagtttctatatatcacccaggagagggtctctgagttggtgttgtacctgtaccactcacatgtagctcaagtgtaatttgtagtgtttacattcaagctgggatcttgattggttaaattaatccacataccactgccactgctgaaggaccaggtgttggaatacacagcattacagactataagcaaagcaaacaaaagttgatccttacatatgccatccttctgtgtcattttgtggctgttctgtgtttttcttcctagttatttattattgttaataacttactttttcttacattctgttgtaaataaaatacaaagcaatcttctttgcaag

SEQ ID NO: 374655 - DNA, 5879 bp, Homo sapiens
  misc_feature (41)..(43): n is a, c, g, or t
  misc_feature (47)..(47): n is a, c, g, or t
  misc_feature (49)..(49): n is a, c, g, or t
  misc_feature (54)..(54): n is a, c, g, or t
  misc_feature (56)..(57): n is a, c, g, or t
  misc_feature (61)..(61): n is a, c, g, or t
  misc_feature (70)..(70): n is a, c, g, or t
  misc_feature (76)..(76): n is a, c, g, or t
  misc_feature (80)..(80): n is a, c, g, or t
  misc_feature (99)..(99): n is a, c, g, or t
  misc_feature (109)..(109): n is a, c, g, or t
  misc_feature (112)..(112): n is a, c, g, or t
  misc_feature (248)..(248): n is a, c, g, or t
ggtgatccgcccgcctagcctcccaaagtgttgggattacnnncgtnanccacngnncccngcctctttngggttntagntccaactctctgcttcatntgactcatgnttncacctcctttgtccacttgggttttaaattgtaagtctggaagttactagaacaatcccagaattagctcacacactttcactctgtttttccctttcttcctggggttatgttttacccagcattcctaggtgtntgtggtgggagattccgcccctacgttatcttaatttgttgccatatttctgaaccaggaatcccatttaccacattgagttctggacatcaaggttctccgggcatcactttctatgctgtgtcatcagtgaagcccataaacttacccgttatcagaaaagcgaagatttcgagatcttgttgagacagtacaaaattggacagctgtacatgatcagcaaacacagccatgaacagagtgaccggggagaaggggtggaggtcgtccagaatgagccctttgaggaccctcaccatggcaatgggcagttcaccgagaagcgggtgtatctcaacagcaaactgcctagttgggctagagctgttgtccccaaaatattttatgtgacagagaaggcttggaactattatccctacacaattacagaatacacatgttcctttctgccgaaattctccattcatatagaaaccaagtatgaggacaacaaaggaagcaatgacaccattttcgacaatgaagccaaagacgtggagagagaagtttgctttattgatattgcctgcgatgaaattccagagcgctactacaaagaatctgaggatcctaagcacttcaagtcagagaagacaggacggggacagttgagggaaggctggagagatagtcatcagcctatcatgtgctcctacaagctggtgactgtgaagtttgaggtctgggggcttcagaccagagtggaacaatttgtacacaaggtggtccgagacattctgctgattggacatagacaggcttttgcatgggttgatgagtggtatgatatgacaatggatgatgttcgggaatacgagaaaaacatgcatgaacaaaccaacataaaagtttgcaatcagcattcctcccctgtggatgacatagagagtcatgcccaaacaagtacatgacaatggatgaagtccgagaatttgaacgagccactcaggaagccaccaacaagaaaatcggcattttcccacctgcaatttctatctccagcatccccctgctgccttcttccgtccgcagtgcgccttctagtgctccatccacccctctctccacagacgcacccgaatttctgtccgttcccaaagatcggccccggaaaaagtctgccccagaaactctcacacttccagaccctgagaaaaaagccaccctgaatttacccggcatgcactcttcagataagccatgtcggcccaaatctgagtaactttatataaatatctcatggggttttatattttcatttgttgttgttgtttttttttaagaatcttctgatagagaaaaagactgctttgtcactcaaacatgttccttcgacctttcagtgtgcatgtgactcagtaacttcacatagaatatgattccctaagtatgctacacagcatcatattagatgtaagatgtaagacttgcaaaggacagaaggaatcttctgtaaccacatagctgtatgccagagaggaagccttgttattgggcatttgatgaggtttggcatggacttcaaggataaatgaatgaaaactttgcaccacttttgttacaaggtacggtagaaaatagtgaagtcagtttcctctcatcaaatctaaaattctccaaaatactctcaggcataacatacttagctgttaaattttgaactgctaattactaatacttgaataccaatagttactgagattcctattttgtggttagtctgactcaggatttggagcctaattaactctaaacttttgaaaattttaatcatcaagctatagaggctccaagtgcaattaataataactcatttataccttccacagaatttaataaagattctacttgtttctgtcttttaataactttccccttttgtgcccttgtggcctcagaaatccttaagaattgcatggatgaatgtgaccataactgattttggaatggttcagtttaggaaccaagaggcccaggtgaggcaacatcttttttctctacaggtaccaacaaaccttgacttgtcagcttccatcatcaattaagattctcagaatttgcaattaattgaatagaattcatttactatctgcccactcaaagaagtacaagggtagagtaagctaactgggctttaacatggtcagaatgtctggtgcatgaactataaaaaagagaactgtctcccatccccttccttgttttactcttagtaacatccagaattccctggaacagattgcctaccaccagaccttagaaaagactgtcattctcttgctccttacttgaaatacaaatattgggaatgtcacagacatcaagcaactactgtcaagtgggaggagagaatgagcagaattgctgactcctatttgtagagtgaaaaggaggagtgataatagatgcccttctgtctagctttcctttcttcaactagtggtaatgcaagattagaatcaaggttgacaggaggcaaggtcactcactgaagtgacagaaagacaattctcctttgctccaaagagagaaatctgtcacctttgcacctcactgcctttaaacacagacgggagggcaggcccaaatctcagcattgacttttgtcctccaagagaggaagagaagaagtaattgggcaacttggaggcccacgccccagctagccttcctgatcgtaacctccaacctcaggaaagggaccttcccaaaacacagatcccaaaggaaacaaaatagaccaaggagcataatctgcttctctcacacagcctctctgccagtggaccctgcctgcttccctctcagtgctcagcactctgtgtagtgtctttcaggttgatacactctcccaaggtgcaggcgctggccccatgagcccagcaccaaagttttctaagtcataggtcagactgtcaagatcatttctttatctataggttgatatttagcttaaaaaaaaagaataaacctagaactcaaaggaaacctgttgcaaatagcttagatcaacagtgtatctcttccctaagaatgatagtatcttagtaagacaccttctatgcatggtatggaagcatgatttttgcttgtgggaaaacctaatattttatcagacccctcggacttctcaatccctccctctccacacagtagtacttaatgaaaatgttttgctttagagagcaaaatgctactttcagaagacactgaaatagtatatgtatttgcttaccatttgcaagctaaaatcaaggtgggatggggtcattattttcacatagaatgtatttattttgtgcaggctgttaaacacatctggcacctagtttttccattaagagcattgctattttccctttttataaagtagcttctgctgtcaaggttaacaattctatatgctttaggaagctaagttctaatttccttttgtgagtttcatttcttttataaccagtatgttaccacagacatcagttgcaaagctacgatgatagtgtgattcttagccgaaaaaaaagcgtgtgctcttaaagtatgttcagtttttctgtctacatatgctttgtgtgagttaaaaagggggtgggtggtgtaaatattcctttagctgctttgcatatttaacccagtcatcaaaaggcataaatgacttcaatattttatatatcttggttttcaagtatcatttcacattctctatacatgactttgttattgtggaatacaagcctgcaatgggtgtatatatacagaacattaataattcttagaaggatggaagccaaatggctgcatgatggaaattagaagaaaaaaaaagcagaaacttgaatttgctaagcatgtttggggggaaatagaatccttaactcagtgcctctgtctgcgatatggaaaccttcaactttgttcaccaaaattgtattatacctgtgtatatatatatatatatataaatataaatatagtatagtgaatcagacaccatcagttttaagtctctggtagccaaacttaaataaataatccatagaatatcacatacgttcactccatcttcatctctgaagttagtggagaccatcaaaatgactgtacatttcataactctgggaagatttcaaatgtgaagtgcccctgtgcattttcttggccatagcacggcattcttgctttagctgtgctttcctgggatgagaagatcttggtgtatttaacacataagctttgttagaaatcacctctgaagatcatttcattttctcactttgggttgttgcaagacaaagcaaaggaaaaggaacacaatgaaggaggccgtgacatttttagttgccaccgttgtaactcaaacaatatgggtttgttggtgaactgatttatcaaggcttctgttacggttttgcatctgtgtgtgaggaaaattttaatttatttggaagtatttattagccatgttgttggtcctgaaaataaatctctaagtagcacagttgtgggtatattatgcagacacttaccacaatacctgcaaaagtaactgtggttttctttcaagacactgtaataaacagtgaactaagagaatagattctgatacatctcgataaatcattctctgcaaaagtttcagggctaatgtatttatgtgtatttttaaattctactttctttggcatctcttcatggctcagcgacaacaaagtaataggtcattggctggcttacgtcgataggaattttactcttaagaagggccagtgtatagctgactctacatataatgtgtaatcagataatccaatagagaggaattgtccaaatagttttagtacctttctgatcatctgactcagtaggctaggagacaatctgtcatctgagccatagttcttgagatttaaaaagtctgtccagtgactgcaatctgattatgaataaactattttaactattcattcttgctgaaactgaagtgtacacaatagcacactgttggcatgctgaggcaaaacattgggttcttttgtgttctaccttcaaaacaatctgtttgcatttgaaatataagtgtttaagctttttaggagttagtgtaataagagaatgtgaatatgttgggaaattttcagatgccattaataattgtaattttgttgttaaattaacaaggactttaggataagcctcttgatgtttttgctttaaattgaaagcatgtctgtcaaattgcaagtctcccttcagtttctatatatcacccaggagagggtctctgagttggtgttgtacctgtaccactcacatgtagctcaagtgtaatttgtagtgtttacattcaagctgggatcttgattggttaaattaatccacataccactgccactgctgaaggaccaggtgttggaatacacagcattacagactataagcaaagcaaacaaaagttgatccttacatatgccatccttctgtgtcattttgtggctgttctgtgtttttcttcctagttatttattattgttaataacttactttttcttacattctgttgtaaataaaatacaaagcaatcttctttgcaag

SEQ ID NO: 374656 - DNA, 1893 bp, Homo sapiens
agagccgggccaggcgaggtaacaggctacgtggggttcatgttctctctggttgttccctccccgtttgtacttcatttccattcacacggctgcacttcccagttttccaggatctctcctctgaaaccaggcaagggtttgttcccaaatcccacccattgcctctccagccccagacttgcttactggaccacacataggtggtgggcattggtgacttgtccctagggtcaggggaccagaaacttcccagaggggctggatggagcacggcagcactcagggcacaatggagagcggattcaaagggcaaaggagccgaggaaagcccctctgcccgagcctccccagcgccggccgggctccgctccggagcagccccgccgtctggcagagacatgctgttttgtttaaatcctccacattctttgccatttccccattggccggatggggctaccctccccgccgcggccgctgctgatgtcagcctcgctcgcgctcgctcctcccgcacccacctcccggccccaggcacactgcatcggcgcggacgctccggccccggcgaggtggctgcaaactcgcgggcacgcacggcgcccggggagccgagggactcgggggaggggacgcgcgcggaaggcgccagcttcctcccgcccgcccctggcagccgcgagccgaggttggaggcgcccggggccccagccgggcagagccgagcggcggcggcggcggcggcttcccttttctccccgagccgagccccggagcggcgcggggaccggccctaaaaagagcaggaaatcttgtttaccgcccgcggagagaagccgatcgagcctttgtctggaaagtcagcatctccggctccggctgcaatgtgttcctggtgacattagcatcgggcagacccgccggaggaggggggtcgccaggttcccgtctgctttcggaggcggatcgagcgggtgacttttgtgcattcgttttaatttttggaaatctctcttttttcctccctcgctcgctgccgggcatgtcctgatctggcggccgctcctaccaccctgggcagccgagcagagtcgtccccagcgggtctccctccctgcctccctgactttgcaacaccgcgttccgggaggaccggcctcggcgagggaggaggcgggggagctgcgaacacccagacccaaaccctgacatgctctggggcggagaggaggaagccaggagctgagcgcgccgcgggggctgcttcgccctccggctccgagcgccgggctccgggcgccctgccctgcgcctgggcagcagccttgctggtcttgggggcgccccccgcttcccgccccgggggtccgcggccggcaggaccatgctgctgaaagagtaccggatctgcatgccgctcaccgtagacgagtacaaaattggacagctgtacatgatcagcaaacacagccatgaacagagtgaccggggagaaggggtggaggtcgtccagaatgagccctttgaggaccctcaccatggcaatgggcagttcaccgagaagcgggtgtatctcaacagcaaactgcctagttgggctagagctgttgtccccaaaatattttatgtgacagagaaggcttggaactattatccctacacaattacagaatacacatgttcctttctgccgaaattctccattcatatagaaaccaagtatgaggacaacaaaggaagcaatgacaccattttcgacaatgaagccaaagacgtggagagagaagtttgctttattgatattgcctgcgatgaaattccagagcgctactacaaagaatctgaggatcctgagctcttcaagtcagcctacacaggacaaagggggat

SEQ ID NO: 374657 - DNA, 5705 bp, Homo sapiens
tcaactttggtactattgacattttggaccagataattttttgttgggggctgggggtcctgtgcattgtaggatgctccatagtgtccctggaatctgcacactagatgccagtagcaccccttccctagttctaacaaccaaaaatgtcacaaaattgtcccccgttgagaaccactagattaagagatcattatcctgaaatactgaaaaactgcagacttgggccaaaaatcatgtcatgtgccattttatttttagatcagtgtgggtggaagtagtgccagccatcttcaagctgttagccaagacttgaggttcagtatagacctgcactctctgacgccatgcattctgtgcaaatttacatctgtgtgcaagttgcaccaaatctcaattgtaccagtgaatatcattgctctgccttctacatcctgcctcctataacagcaatgaaagtgtcctttctgttgttgaatgcattgatttaaacaacctctaaatctattttgaaagctatgtggaaggtaagtattaaaccaagcaaaactgaccctctgtccccaatgggatcttctaatgatgctttaggagatctcaggctatggtactgcccacatgctaatactttctacccaaacctagctcactttacaagaatcacccctaaataatttccactcttctctgttctaagactattttgacttaacttccttgccctcactccccctttggttggtttagctaactttatgacttactcatcataaagttagacaagtctctgcttttttaaacctccttggctactgctcagctaccatctttccctaaagtgtccccattgaaagtttgcatctaataacggaagttgccaacatcttgacctctttcagatatgacaatggatgatgttcgggaatacgagaaaaacatgcatgaacaaaccaacataaaagtttgcaatcagcattcctcccctgtggatgacatagagagtcatgcccaaacaagtacatgacaatggatgaagtccgagaatttgaacgagccactcaggaagccaccaacaagaaaatcggcattttcccacctgcaatttctatctccagcatccccctgctgccttcttccgtccgcagtgcgccttctagtgctccatccacccctctctccacagacgcacccgaatttctgtccgttcccaaagatcggccccggaaaaagtctgccccagaaactctcacacttccagaccctgagaaaaaagccaccctgaatttacccggcatgcactcttcagataagccatgtcggcccaaatctgagtaactttatataaatatctcatggggttttatattttcatttgttgttgttgtttttttttaagaatcttctgatagagaaaaagactgctttgtcactcaaacatgttccttcgacctttcagtgtgcatgtgactcagtaacttcacatagaatatgattccctaagtatgctacacagcatcatattagatgtaagatgtaagacttgcaaaggacagaaggaatcttctgtaaccacatagctgtatgccagagaggaagccttgttattgggcatttgatgaggtttggcatggacttcaaggataaatgaatgaaaactttgcaccacttttgttacaaggtacggtagaaaatagtgaagtcagtttcctctcatcaaatctaaaattctccaaaatactctcaggcataacatacttagctgttaaattttgaactgctaattactaatacttgaataccaatagttactgagattcctattttgtggttagtctgactcaggatttggagcctaattaactctaaacttttgaaaattttaatcatcaagctatagaggctccaagtgcaattaataataactcatttataccttccacagaatttaataaagattctacttgtttctgtcttttaataactttccccttttgtgcccttgtggcctcagaaatccttaagaattgcatggatgaatgtgaccataactgattttggaatggttcagtttaggaaccaagaggcccaggtgaggcaacatcttttttctctacaggtaccaacaaaccttgacttgtcagcttccatcatcaattaagattctcagaatttgcaattaattgaatagaattcatttactatctgcccactcaaagaagtacaagggtagagtaagctaactgggctttaacatggtcagaatgtctggtgcatgaactataaaaaagagaactgtctcccatccccttccttgttttactcttagtaacatccagaattccctggaacagattgcctaccaccagaccttagaaaagactgtcattctcttgctccttacttgaaatacaaatattgggaatgtcacagacatcaagcaactactgtcaagtgggaggagagaatgagcagaattgctgactcctatttgtagagtgaaaaggaggagtgataatagatgcccttctgtctagctttcctttcttcaactagtggtaatgcaagattagaatcaaggttgacaggaggcaaggtcactcactgaagtgacagaaagacaattctcctttgctccaaagagagaaatctgtcacctttgcacctcactgcctttaaacacagacgggagggcaggcccaaatctcagcattgacttttgtcctccaagagaggaagagaagaagtaattgggcaacttggaggcccacgccccagctagccttcctgatcgtaacctccaacctcaggaaagggaccttcccaaaacacagatcccaaaggaaacaaaatagaccaaggagcataatctgcttctctcacacagcctctctgccagtggaccctgcctgcttccctctcagtgctcagcactctgtgtagtgtctttcaggttgatacactctcccaaggtgcaggcgctggccccatgagcccagcaccaaagttttctaagtcataggtcagactgtcaagatcatttctttatctataggttgatatttagcttaaaaaaaaagaataaacctagaactcaaaggaaacctgttgcaaatagcttagatcaacagtgtatctcttccctaagaatgatagtatcttagtaagacaccttctatgcatggtatggaagcatgatttttgcttgtgggaaaacctaatattttatcagacccctcggacttctcaatccctccctctccacacagtagtacttaatgaaaatgttttgctttagagagcaaaatgctactttcagaagacactgaaatagtatatgtatttgcttaccatttgcaagctaaaatcaaggtgggatggggtcattattttcacatagaatgtatttattttgtgcaggctgttaaacacatctggcacctagtttttccattaagagcattgctattttccctttttataaagtagcttctgctgtcaaggttaacaattctatatgctttaggaagctaagttctaatttccttttgtgagtttcatttcttttataaccagtatgttaccacagacatcagttgcaaagctacgatgatagtgtgattcttagccgaaaaaaaagcgtgtgctcttaaagtatgttcagtttttctgtctacatatgctttgtgtgagttaaaaagggggtgggtggtgtaaatattcctttagctgctttgcatatttaacccagtcatcaaaaggcataaatgacttcaatattttatatatcttggttttcaagtatcatttcacattctctatacatgactttgttattgtggaatacaagcctgcaatgggtgtatatatacagaacattaataattcttagaaggatggaagccaaatggctgcatgatggaaattagaagaaaaaaaaagcagaaacttgaatttgctaagcatgtttggggggaaatagaatccttaactcagtgcctctgtctgcgatatggaaaccttcaactttgttcaccaaaattgtattatacctgtgtatatatatatatatatataaatataaatatagtatagtgaatcagacaccatcagttttaagtctctggtagccaaacttaaataaataatccatagaatatcacatacgttcactccatcttcatctctgaagttagtggagaccatcaaaatgactgtacatttcataactctgggaagatttcaaatgtgaagtgcccctgtgcattttcttggccatagcacggcattcttgctttagctgtgctttcctgggatgagaagatcttggtgtatttaacacataagctttgttagaaatcacctctgaagatcatttcattttctcactttgggttgttgcaagacaaagcaaaggaaaaggaacacaatgaaggaggccgtgacatttttagttgccaccgttgtaactcaaacaatatgggtttgttggtgaactgatttatcaaggcttctgttacggttttgcatctgtgtgtgaggaaaattttaatttatttggaagtatttattagccatgttgttggtcctgaaaataaatctctaagtagcacagttgtgggtatattatgcagacacttaccacaatacctgcaaaagtaactgtggttttctttcaagacactgtaataaacagtgaactaagagaatagattctgatacatctcgataaatcattctctgcaaaagtttcagggctaatgtatttatgtgtatttttaaattctactttctttggcatctcttcatggctcagcgacaacaaagtaataggtcattggctggcttacgtcgataggaattttactcttaagaagggccagtgtatagctgactctacatataatgtgtaatcagataatccaatagagaggaattgtccaaatagttttagtacctttctgatcatctgactcagtaggctaggagacaatctgtcatctgagccatagttcttgagatttaaaaagtctgtccagtgactgcaatctgattatgaataaactattttaactattcattcttgctgaaactgaagtgtacacaatagcacactgttggcatgctgaggcaaaacattgggttcttttgtgttctaccttcaaaacaatctgtttgcatttgaaatataagtgtttaagctttttaggagttagtgtaataagagaatgtgaatatgttgggaaattttcagatgccattaataattgtaattttgttgttaaattaacaaggactttaggataagcctcttgatgtttttgctttaaattgaaagcatgtctgtcaaattgcaagtctcccttcagtttctatatatcacccaggagagggtctctgagttggtgttgtacctgtaccactcacatgtagctcaagtgtaatttgtagtgtttacattcaagctgggatcttgattggttaaattaatccacataccactgccactgctgaaggaccaggtgttggaatacacagcattacagactataagcaaagcaaacaaaagttgatccttacatatgccatccttctgtgtcattttgtggctgttctgtgtttttcttcctagttatttattattgttaataacttactttttcttacattctgttgtaaataaaatacaaagcaatcttctttgcaag

SEQ ID NO: 374658 - DNA, 5651 bp, Homo sapiens
tcaactttggtactattgacattttggaccagataattttttgttgggggctgggggtcctgtgcattgtaggatgctccatagtgtccctggaatctgcacactagatgccagtagcaccccttccctagttctaacaaccaaaaatgtcacaaaattgtcccccgttgagaaccactagattaagagatcattatcctgaaatactgaaaaactgcagacttgggccaaaaatcatgtcatgtgccattttatttttagatcagtgtgggtggaagtagtgccagccatcttcaagctgttagccaagacttgaggttcagtatagacctgcactctctgacgccatgcattctgtgcaaatttacatctgtgtgcaagttgcaccaaatctcaattgtaccagtgaatatcattgctctgccttctacatcctgcctcctataacagcaatgaaagtgtcctttctgttgttgaatgcattgatttaaacaacctctaaatctattttgaaagctatgtggaaggtaagtattaaaccaagcaggctatggtactgcccacatgctaatactttctacccaaacctagctcactttacaagaatcacccctaaataatttccactcttctctgttctaagactattttgacttaacttccttgccctcactccccctttggttggtttagctaactttatgacttactcatcataaagttagacaagtctctgcttttttaaacctccttggctactgctcagctaccatctttccctaaagtgtccccattgaaagtttgcatctaataacggaagttgccaacatcttgacctctttcagatatgacaatggatgatgttcgggaatacgagaaaaacatgcatgaacaaaccaacataaaagtttgcaatcagcattcctcccctgtggatgacatagagagtcatgcccaaacaagtacatgacaatggatgaagtccgagaatttgaacgagccactcaggaagccaccaacaagaaaatcggcattttcccacctgcaatttctatctccagcatccccctgctgccttcttccgtccgcagtgcgccttctagtgctccatccacccctctctccacagacgcacccgaatttctgtccgttcccaaagatcggccccggaaaaagtctgccccagaaactctcacacttccagaccctgagaaaaaagccaccctgaatttacccggcatgcactcttcagataagccatgtcggcccaaatctgagtaactttatataaatatctcatggggttttatattttcatttgttgttgttgtttttttttaagaatcttctgatagagaaaaagactgctttgtcactcaaacatgttccttcgacctttcagtgtgcatgtgactcagtaacttcacatagaatatgattccctaagtatgctacacagcatcatattagatgtaagatgtaagacttgcaaaggacagaaggaatcttctgtaaccacatagctgtatgccagagaggaagccttgttattgggcatttgatgaggtttggcatggacttcaaggataaatgaatgaaaactttgcaccacttttgttacaaggtacggtagaaaatagtgaagtcagtttcctctcatcaaatctaaaattctccaaaatactctcaggcataacatacttagctgttaaattttgaactgctaattactaatacttgaataccaatagttactgagattcctattttgtggttagtctgactcaggatttggagcctaattaactctaaacttttgaaaattttaatcatcaagctatagaggctccaagtgcaattaataataactcatttataccttccacagaatttaataaagattctacttgtttctgtcttttaataactttccccttttgtgcccttgtggcctcagaaatccttaagaattgcatggatgaatgtgaccataactgattttggaatggttcagtttaggaaccaagaggcccaggtgaggcaacatcttttttctctacaggtaccaacaaaccttgacttgtcagcttccatcatcaattaagattctcagaatttgcaattaattgaatagaattcatttactatctgcccactcaaagaagtacaagggtagagtaagctaactgggctttaacatggtcagaatgtctggtgcatgaactataaaaaagagaactgtctcccatccccttccttgttttactcttagtaacatccagaattccctggaacagattgcctaccaccagaccttagaaaagactgtcattctcttgctccttacttgaaatacaaatattgggaatgtcacagacatcaagcaactactgtcaagtgggaggagagaatgagcagaattgctgactcctatttgtagagtgaaaaggaggagtgataatagatgcccttctgtctagctttcctttcttcaactagtggtaatgcaagattagaatcaaggttgacaggaggcaaggtcactcactgaagtgacagaaagacaattctcctttgctccaaagagagaaatctgtcacctttgcacctcactgcctttaaacacagacgggagggcaggcccaaatctcagcattgacttttgtcctccaagagaggaagagaagaagtaattgggcaacttggaggcccacgccccagctagccttcctgatcgtaacctccaacctcaggaaagggaccttcccaaaacacagatcccaaaggaaacaaaatagaccaaggagcataatctgcttctctcacacagcctctctgccagtggaccctgcctgcttccctctcagtgctcagcactctgtgtagtgtctttcaggttgatacactctcccaaggtgcaggcgctggccccatgagcccagcaccaaagttttctaagtcataggtcagactgtcaagatcatttctttatctataggttgatatttagcttaaaaaaaaagaataaacctagaactcaaaggaaacctgttgcaaatagcttagatcaacagtgtatctcttccctaagaatgatagtatcttagtaagacaccttctatgcatggtatggaagcatgatttttgcttgtgggaaaacctaatattttatcagacccctcggacttctcaatccctccctctccacacagtagtacttaatgaaaatgttttgctttagagagcaaaatgctactttcagaagacactgaaatagtatatgtatttgcttaccatttgcaagctaaaatcaaggtgggatggggtcattattttcacatagaatgtatttattttgtgcaggctgttaaacacatctggcacctagtttttccattaagagcattgctattttccctttttataaagtagcttctgctgtcaaggttaacaattctatatgctttaggaagctaagttctaatttccttttgtgagtttcatttcttttataaccagtatgttaccacagacatcagttgcaaagctacgatgatagtgtgattcttagccgaaaaaaaagcgtgtgctcttaaagtatgttcagtttttctgtctacatatgctttgtgtgagttaaaaagggggtgggtggtgtaaatattcctttagctgctttgcatatttaacccagtcatcaaaaggcataaatgacttcaatattttatatatcttggttttcaagtatcatttcacattctctatacatgactttgttattgtggaatacaagcctgcaatgggtgtatatatacagaacattaataattcttagaaggatggaagccaaatggctgcatgatggaaattagaagaaaaaaaaagcagaaacttgaatttgctaagcatgtttggggggaaatagaatccttaactcagtgcctctgtctgcgatatggaaaccttcaactttgttcaccaaaattgtattatacctgtgtatatatatatatatatataaatataaatatagtatagtgaatcagacaccatcagttttaagtctctggtagccaaacttaaataaataatccatagaatatcacatacgttcactccatcttcatctctgaagttagtggagaccatcaaaatgactgtacatttcataactctgggaagatttcaaatgtgaagtgcccctgtgcattttcttggccatagcacggcattcttgctttagctgtgctttcctgggatgagaagatcttggtgtatttaacacataagctttgttagaaatcacctctgaagatcatttcattttctcactttgggttgttgcaagacaaagcaaaggaaaaggaacacaatgaaggaggccgtgacatttttagttgccaccgttgtaactcaaacaatatgggtttgttggtgaactgatttatcaaggcttctgttacggttttgcatctgtgtgtgaggaaaattttaatttatttggaagtatttattagccatgttgttggtcctgaaaataaatctctaagtagcacagttgtgggtatattatgcagacacttaccacaatacctgcaaaagtaactgtggttttctttcaagacactgtaataaacagtgaactaagagaatagattctgatacatctcgataaatcattctctgcaaaagtttcagggctaatgtatttatgtgtatttttaaattctactttctttggcatctcttcatggctcagcgacaacaaagtaataggtcattggctggcttacgtcgataggaattttactcttaagaagggccagtgtatagctgactctacatataatgtgtaatcagataatccaatagagaggaattgtccaaatagttttagtacctttctgatcatctgactcagtaggctaggagacaatctgtcatctgagccatagttcttgagatttaaaaagtctgtccagtgactgcaatctgattatgaataaactattttaactattcattcttgctgaaactgaagtgtacacaatagcacactgttggcatgctgaggcaaaacattgggttcttttgtgttctaccttcaaaacaatctgtttgcatttgaaatataagtgtttaagctttttaggagttagtgtaataagagaatgtgaatatgttgggaaattttcagatgccattaataattgtaattttgttgttaaattaacaaggactttaggataagcctcttgatgtttttgctttaaattgaaagcatgtctgtcaaattgcaagtctcccttcagtttctatatatcacccaggagagggtctctgagttggtgttgtacctgtaccactcacatgtagctcaagtgtaatttgtagtgtttacattcaagctgggatcttgattggttaaattaatccacataccactgccactgctgaaggaccaggtgttggaatacacagcattacagactataagcaaagcaaacaaaagttgatccttacatatgccatccttctgtgtcattttgtggctgttctgtgtttttcttcctagttatttattattgttaataacttactttttcttacattctgttgtaaataaaatacaaagcaatcttctttgcaag

SEQ ID NO: 374659 - DNA, 2042 bp, Homo sapiens
acaaggccaactccttggtgatgtaccactccaccacctaccagctgtgtgcccggtacttctgcggggtccccagccccctcagggacatgtttcccgtgcggcccttggacacggaacccccggcagccagccacacggccaacccaaaggtgcctgagggggactccatcgcggacgtgagcatcatgtacagtgaggagctgggcacgcagatcctgatccaccaggaatcactcactgactactgctccatgtcctcctactcctcatccccaccccgccaggctgccaggtccccctcaagcctccccagctccccagcaagttcttccagtgtgcctttctccaccgactgcgaggactcagacatgctacatacgcccggtgctgcctccgacaggtctgagcatgacctgacccccatggacggggagaccttcagccagcacctgcaggccgtgaagatcctcgccgtcagagacctcatttgggtccccaggcgcggtggagatgttatcgtcattggcctggagaaggattctggcgcccagcggggccgagtcattgccgtcttaaaagcccgagagctgactccgcatggggtgctggtggatgctgccgtggtggcaaaggacactgttgtgtgcacctttgaaaatgaaaacacagagtggtgcctggccgtctggaggggctggggcgccagggagttcgacattttctaccagtcctacgaggagctgggccggctggaggcttgcactcgcaagagaaggtaattcctgtggaatgactgtcacacatcagagctggctggcccggggctgcagcctgacccctctgccatcggcctctagttctccaaggacctagaagacagatggagttctcccctgaactccttgctgctaagaagtgctgagaagttactcgcctggcggtggctccagggttctctggttctctggagcagagttctctgaataccccatcccccaactgctgattttacagccccagggaagacagtggtatcaggctgggagcggcctcctctggcctcccccatcagtttgcaggagcaggggtgcaggatcctgttctgagctgggtcaaacaaagcagggccgggccttcctgccatccccaggtctcagatggaattacactagaggccctccgctgggaagcacttgaggtagggcaggaggggggctgtgacccctgccctttccccgccagagacctcaggctctcagcacattccacaggctcctgagtccccgaggcctgggccagcttgggcaagccaagatcagatgtctctgtgttcgggaaggtctccgtgtgggaaagcccttgggggatcccgggtgaggagtgttgccccatccagagaatgaatgagttcctttaagtgccaccgccagcaagcccagaggcacacagtccgagtgcacccgcttagcctttacattcctctccaccgacaaaaggaaggggaaactcaatcagcaggacttcagaaagggccttgtgtttatagctttgtcaagtaaatttggacgcagctggagcacaggccctgtttgtttgcacataataatcttgtttatcactttaaaaaattcagtaatatctcagcagtcaggcttctggttgtgaaatcacattgtatgggatttataccaaattatgtatttgctaaacattcactgcacacgtgtacagcggagtacgaaaaggaacgttgtccacaggggatttatggatacaacagcaaacattttataaactatgcacatgcattacacacatgcacacacatatgcacacacatgtgcaaacatagccacttttttgtcaagagttaccctttggggctccttaaaccagaatgggagtttgaaagagagatcatactccagctgaagtttgttgacccttttctaaaattaaaaagatcaaatttagtatttgctggatatgcagggagatgagactcttttaatctcaaaataaacagattctttcaagaa

SEQ ID NO: 374660 - DNA, 3182 bp, Homo sapiens
acaaggccaactccttggtgatgtaccactccaccacctaccagctgtgtgcccggtacttctgcggggtccccagccccctcagggacatgtttcccgtgcggcccttggacacggaacccccggcagccagccacacggccaacccaaaggtgcctgagggggactccatcgcggacgtgagcatcatgtacagtgaggagctgggcacgcagatcctgatccaccaggaatcactcactgactactgctccatgtcctcctactcctcatccccaccccgccaggctgccaggtccccctcaagcctccccagctccccagcaagttcttccagtgtgcctttctccaccgactgcgaggactcagacatgctacatacgcccggtgctgcctccgacaggtctgagcatgacctgacccccatggacggggagaccttcagccagcacctgcaggccgtgaagatcctcgccgtcagagacctcatttgggtccccaggcgcggtggagatgttatcgtcattggcctggagaaggattctggcgcccagcggggccgagtcattgccgtcttaaaagcccgagagctgactccgcatggggtgctggtggatgctgccgtggtggcaaaggacactgttgtgtgcacctttgaaaatgaaaacacagagtggtgcctggccgtctggaggggctggggcgccagggagttcgacattttctaccagtcctacgaggagctgggccggctggaggcttgcactcgcaagagaaggtaattcctgtggaatgactgtcacacatcagagctggctggcccggggctgcagcctgacccctctgccatcggcctctagttctccaaggacctagaagacagatggagttctcccctgaactccttgctgctaagaagtgctgagaagttactcgcctggcggtggctccagggttctctggttctctggagcagagttctctgaataccccatcccccaactgctgattttacagccccagggaagacagtggtatcaggctgggagcggcctcctctggcctcccccatcagtttgcaggagcaggggtgcaggatcctgttctgagctgggtcaaacaaagcagggccgggccttcctgccatccccaggtctcagatggaattacactagaggccctccgctgggaagcacttgaggtagggcaggaggggggctgtgacccctgccctttccccgccagagacctcaggctctcagcacattccacaggctcctgagtccccgaggcctgggccagcttgggcaagccaagatcagatgtctctgtgttcgggaaggtctccgtgtgggaaagcccttgggggatcccgggtgaggagtgttgccccatccagagaatgaatgagttcctttaagtgccaccgccagcaagcccagaggcacacagtccgagtgcacccgcttagcctttacattcctctccaccgacaaaaggaaggggaaactcaatcagcaggacttcagaaagggccttgtgtttatagctttgtcaagtaaatttggacgcagctggagcacaggccctgtttgtttgcacataataatcttgtttatcactttaaaaaattcagtaatatctcagcagtcaggcttctggttgtgaaatcacattgtatgggatttataccaaattatgtatttgctaaacattcactgcacacgtgtacagcggagtacgaaaaggaacgttgtccacaggggatttatggatacaacagcaaacattttataaactatgcacatgcattacacacatgcacacacatatgcacacacatgtgcaaacatagccacttttttgtcaagagttaccctttggggctccttaaaccagaatgggagtttgaaagagagatcatactccagctgaagtttgttgacccttttctaaaattaaaaagatcaaatttagtatttgctggatatgcagggagatgagactcttttaatctcaaaataaacagattctttcaagaacgaagctgtggcctctgtcttttgagcgcttatgaccacagcacgggctcagtccctcccagacccactcgctgtctggggataatgggcagcccctccttgcccactgtgccaacatgcaggtggcccctgagcagcttccatgggtggagacgctgctctgtcagtcacaggcttggaaaaagcgagtccccccactcttttttttttttttttttttttttttaccaacctgggcaccaagtcccagggggctgagggtctgtgcttcctgtctacctccctgccattctctcaccctcatcccacagcagggtctcaggagtcccactctccctctcctctcattccagtgccccacaactgcccagttaacccccagatgcaagccagattccatctgccccaggccccaagcttttgctttggcatcacgcgaggccaggctgctttgcaggcaccaaaattcaccctctcctactcctggaaaagcccagccccaggcctcacagagccaggggaggggatctcatcacatcacagttagaaatcatacaggcctaaagtcccagctacccaggagccaaggcaggaggatcccttgagcctgggagttggaggttgcagtgagctatgatcacaccagctttctagcctgggtgacagagcaagacccaactcttaaaaaaaaaacattgcaacacaaatgagagacaaagacctcacttatcttcattacagagagttcgtaatgtcaataagaaacagaaaaccggaaaggcaaacaggttaagggcatgggcagcaattgaattacaaagaaacagacagacccttaaacatcaatgcttgacctcacccaacagcagggaaacagtctccacaacagtaaaatgttgctgggatgggcccagcattcagcatggtccctgcaactttggcctctgcccagtgacctctggcgggtgtagaagagctcatgcttcagtgagggggtggggggcaccctgaggaccctgtcaacatcagctggaccacaggcatctcagatagatgtcacttaccaccctcatgttggcagagggtggtaaccagccagcatctccttcttaaacacctactaagtgtcaggcactgtga

SEQ ID NO: 374661 - DNA, 2707 bp, Homo sapiens
acaaggccaactccttggtgatgtaccactccaccacctaccagctgtgtgcccggtacttctgcggggtccccagccccctcagggacatgtttcccgtgcggcccttggacacggaacccccggcagccagccacacggccaacccaaaggtgcctgagggggactccatcgcggacgtgagcatcatgtacagtgaggagctgggcacgcagatcctgatccaccaggaatcactcactgactactgctccatgtcctcctactcctcatccccaccccgccaggctgccaggtccccctcaagcctccccagctccccagcaagttcttccagtgtgcctttctccaccgactgcgaggactcagacatgctacatacgcccggtgctgcctccgacaggtctgagcatgacctgacccccatggacggggagaccttcagccagcacctgcaggccgtgaagatcctcgccgtcagagacctcatttgggtccccaggcgcggtggagatgttatcgtcattggcctggagaaggattctggcgcccagcggggccgagtcattgccgtcttaaaagcccgagagctgactccgcatggggtgctggtggatgctgccgtggtggcaaaggacactgttgtgtgcacctttgaaaatgaaaacacagagtggtgcctggccgtctggaggggctggggcgccagggagttcgacattttctaccagtcctacgaggagctgggccggctggaggcttgcactcgcaagagaaggtaattcctgtggaatgactgtcacacatcagagctggctggcccggggctgcagcctgacccctctgccatcggcctctagttctccaaggacctagaagacagatggagttctcccctgaactccttgctgctaagaagtgctgagaagttactcgcctggcggtggctccagggttctctggttctctggagcagagttctctgaataccccatcccccaactgctgattttacagccccagggaagacagtggtatcaggctgggagcggcctcctctggcctcccccatcagtttgcaggagcaggggtgcaggatcctgttctgagctgggtcaaacaaagcagggccgggccttcctgccatccccaggtctcagatggaattacactagaggccctccgctgggaagcacttgaggtagggcaggaggggggctgtgacccctgccctttccccgccagagacctcaggctctcagcacattccacaggctcctgagtccccgaggcctgggccagcttgggcaagccaagatcagatgtctctgtgttcgggaaggtctccgtgtgggaaagcccttgggggatcccgggtgaggagtgttgccccatccagagaatgaatgagttcctttaagtgccaccgccagcaagcccagaggcacacagtccgagtgcacccgcttagcctttacattcctctccaccgacaaaaggaaggggaaactcaatcagcaggacttcagaaagggccttgtgtttatagctttgtcaagtaaatttggacgcagctggagcacaggccctgtttgtttgcacataataatcttgtttatcactttaaaaaattcagtaatatctcagcagtcaggcttctggttgtgaaatcacattgtatgggatttataccaaattatgtatttgctaaacattcactgcacacgtgtacagcggagtacgaaaaggaacgttgtccacaggggatttatggatacaacagcaaacattttataaactatgcacatgcattacacacatgcacacacatatgcacacacatgtgcaaacatagccacttttttgtcaagagttaccctttggggctccttaaaccagaatgggagtttgaaagagagatcatactccagctgaagtttgttgacccttttctaaaattaaaaagatcaaatttagtatttgctggatatgcagggagatgagactcttttaatctcaaaataaacagattctttcaagaacgaagctgtggcctctgtcttttgagcgcttatgaccacagcacgggctcagtccctcccagacccactcgctgtctggggataatgggcagcccctccttgcccactgtgccaacatgcaggtggcccctgagcagcttccatgggtggagacgctgctctgtcagtcacaggcttggaaaaagcgagtccccccactcttttttttttttttttttttttttttaccaacctgggcaccaagtcccagggggctgagggtctgtgcttcctgtctacctccctgccattctctcaccctcatcccacagcagggtctcaggagtcccactctccctctcctctcattccagtgccccacaactgcccagttaacccccagatgcaagccagattccatctgccccaggccccaagcttttgctttggcatcacgcgaggccaggctgctttgcaggcaccaaaattcaccctctcctactcctggaaaagcccagccccaggcctcacagagccaggggaggggatctcatcacatcacagttagaaagctggtgtgatcatagctcactgtaacctccaactcccaggctcaagggatcctcctgcctcggctcctgggtagcgtcgacgcggccgcgaatttagtagtagtaggcggccgc

SEQ ID NO: 374662 - DNA, 310 bp, Homo sapiens
cctattttttttcttaagtagctaatagattttttttttaaaaaagaacaaacatcataaagcaaacctggggagaaaaaaagcaacaaaaagttttgtgtgcaaattacaaaataatatgattgcaattggtttaagttgttaggcagctgttttgtcaaaaactaacaatagggctgaatttatttttgttaacaaattagagttttgctttgattgtgtttcttttaggcttttctgcttttttcttcctcgcataaatgaaccaaatattttctctctgatattccacaagagaaatctctcactt

SEQ ID NO: 374663 - DNA, 432 bp, Homo sapiens
aaaatttcccttctcttccaaaacctttcccctttttctcaattggagagagagagaaagagagagagagagtgagtgaatgtgtgtgtgtgtgtgtgtgtgtgtgtgtgtgtgtgtgggtgggtgtgggtgggtggtgtgtgtgtattcttgaggtttctgaagttacctatgtatactggagtaaggagaatttgagattagagagttaatattagaaatttatctatgtgtatgcttatgtctgatggcctatgagtttattgcaggcaaggtttggctctcttttaaaacggttttgagctaggcctccatgctttatgttaaaaagtaagttgttcaattaatgttgattgtccgtaactaaccattgtttaattagaaagcatcttttcagaatctctttatacaaatcctttgatatacttttgt

SEQ ID NO: 374664 - DNA, 477 bp, Homo sapiens
ctttagttctcacgaaattgtagaatttgctggactgcaaaatcctgagatggggctgtactggtgagaacgatctgggatctattcttctctcccttagaagcagaatgttcctccaggttttagcagcatgtcatgtcgcccctgatgtatgtcacccttgggtttgcccttcatgatccctcagctgcagtgcaagtggggcactcacagtcaagactccaaccacactaagctgctttcctcagccttgggagaccagctcacaataaatcctaagcctccgttgtcccttgctatctacttataagtaatacatccactttgtgtaacttgtacgcactggtgttgtgtctcaccagattcacacgagtttgtaatcagtgcatcgtgaatcgacttcatatataaataagctatctaaaataaatttataataactcatgcataataaagtataatttactttttcatgta

SEQ ID NO: 374665 - DNA, 2373 bp, Homo sapiens
agtaaaaggcggaaaccgcggaggcgtcttgattttccggtcggagagatagcttgcttcctttaagcctcggggcagaaccacagagaggctacagccgtcctggcctccctccggccctgagagctcctctggcctgtctcaagtcttaacgtctcaagcgcagactgccggctccgaacggggagaccaggcttctgcaccggaaacaaggcaccggttgtgacgtcacagccgcagagcgcccgacttcccagaaggcaccgagtccctgccgttctcctcaactggcggcggcgcgaacgaatagtcgccggcgacctgtgagggcactcggaagggcgaggggagggctcgaccgctcgcgcctagtttttctatctctcccggagcctgagtctctgagccgtccccagcaaacgctcaggggctgcagaggccccgagagcttggctctctggcagatttcctctagtaagaggtggctctggaggccccgcgaaacgagtgtggtgtgtggttgcaaggcatgatggctgcaaaagtggttcctatgcccccaaagccaaagcagtcctttatactgagagttccgccagactccaagctgggccaagacctacttcgagatgccactaacgggcccaagaccatccaccagctagtgctggagcacttcctcaccttcttgcccaagccaagcctggtccagcccagtcagaaagtcaaggagaccttggttattatgaaagatgtgagctcaagccttcagaacagagtgcatcctcgtcccttggtgaagcttctgcccaaaggagtccaaaaggaacaagagacagtgtctctgtatttgaaagctaaccctgaggagctggtggtctttgaggatttgaatgtatttcactgccaggaagaatgtgtgagcttggatcctactcaacaactcacgtcagagaaggaagatgacagcagtgtcggggaaatgatgttactggcagtcaatggcagtaatcctgaaggtgaagatcctgagagggaacctgtagaaaatgaagattatagagaaaagtcttcagatgatgatgaaatggattcttccttggtctctcagcagcctcccgataaccaggaaaaggaacgactaaatacatccattccacaaaaaaggaaaatgagaaatctgttagttaccattgagaatgatactcctctagaggaactctcaaaatatgtagacatcagtattattgcccttactcgaaatcggaggacaaggagatggtacacttgtccactgtgtgggaaacagtttaatgaaagttcttacctcatttcccaccagaggacccacactggagaaaaaccctatgactgtaatcactgtgggaaaagcttcaatcataaaacaaacctcaataaacatgagcgaattcatacaggagagaaaccttattcctgttctcagtgtggaaaaaacttccgtcagaattctcatcggagtcgtcatgaaggaatccatataagggagaagatatttaagtgtccagaatgtgggaaaaccttcccaaagaatgaggagtttgtgcttcatctgcagagtcatgaggctgagagaccatatggttgcaaaaaatgtgggagaagatttggtcggctgtcaaactgtacccggcatgagaaaacccactcagcctgtaagacccgaaagcagaagtaatactgggaaccctttctgggtctgatggtgctgcctcaacctgagagctttcataagtagttctgaattcccaagctgcctaaaaaggtataaatgtgtaaaaatctcattattgccaaaattggataaatgcccatcttagctaaaacctcaaattgctagaaaattcacagggaagaaaacatttcaagggctatacctcagcatctaggctttttggactaaggagctttcctttttgaagttatatgataatgtacaggtcacagatcccctttcccaacactttgaagatgaatctggagtctgcttacttggaaggcaaagagtgacttgtgtctattgaaagtatatccgttttccccccacatggggattcatacttgagaaatagtgcaaagatgcttatctggaactgtgttctggtgaaagaaccaaattactggcttgttagccaacagcttctgatagcaattcatataaccctctaagaatacctgtttaagtcttgagtgttgaaaggaattgtttactttggaatataggaaaacagttgaatgtcagactctcatttgtatgtgatctaaatttgcaatcaatttcaataatatttacaatttgtgataaaactgacttttacagattccttttcacaa

SEQ ID NO: 374666 - DNA, 2724 bp, Homo sapiens
agtaaaaggcggaaaccgcggaggcgtcttgattttccggtcggagagatagcttgcttcctttaagcctcggggcagaaccacagagaggctacagccgtcctggcctccctccggccctgagagctcctctggcctgtctcaagtcttaacgtctcaagcgcagactgccggctccgaacggggagaccaggcttctgcaccggaaacaaggcaccggttgtgacgtcacagccgcagagcgcccgacttcccagaaggcaccgagtccctgccgttctcctcaactggcggcggcgcgaacgaatagtcgccggcgacctgtgagggcactcggaagggcgaggggagggctcgaccgctcgcgcctagtttttctatctctcccggagcctgagtctctgagccgtccccagcaaacgctcaggggctgcagaggccccgagaggtgaggggctccgtgagggcgggaaccaggctgaggccgcctctggggagcggagcgtgtccgttgctgagggagcaaggccgggtagggagcctggtgagcgcctcaggcaggggcgcacgctgagctttacggtaaaggtgttccttgaccagcggaagaggccccagagtgagcctggcccggcggtccttagtgggatgtcgcctgccgctctcagcagagctttgacggcggagaggagtcggcaggcggtgtgtggacacctcctcggccttgcatctgctccccgggagagtcaccaaccgcctccccgcccaaagggcaccggagggagcttcggttcgagggcttggctctctggcagatttcctctagtaagaggtggctctggaggccccgcgaaacgagtgtggtgtgtggttgcaaggcatgatggctgcaaaagtggttcctatgcccccaaagccaaagcagtcctttatactgagagttccgccagactccaagctgggccaagacctacttcgagatgccactaacgggcccaagaccatccaccagctagtgctggagcacttcctcaccttcttgcccaagccaagcctggtccagcccagtcagaaagtcaaggagaccttggttattatgaaagatgtgagctcaagccttcagaacagagtgcatcctcgtcccttggtgaagcttctgcccaaaggagtccaaaaggaacaagagacagtgtctctgtatttgaaagctaaccctgaggagctggtggtctttgaggatttgaatgtatttcactgccaggaagaatgtgtgagcttggatcctactcaacaactcacgtcagagaaggaagatgacagcagtgtcggggaaatgatgttactggcagtcaatggcagtaatcctgaaggtgaagatcctgagagggaacctgtagaaaatgaagattatagagaaaagtcttcagatgatgatgaaatggattcttccttggtctctcagcagcctcccgataaccaggaaaaggaacgactaaatacatccattccacaaaaaaggaaaatgagaaatctgttagttaccattgagaatgatactcctctagaggaactctcaaaatatgtagacatcagtattattgcccttactcgaaatcggaggacaaggagatggtacacttgtccactgtgtgggaaacagtttaatgaaagttcttacctcatttcccaccagaggacccacactggagaaaaaccctatgactgtaatcactgtgggaaaagcttcaatcataaaacaaacctcaataaacatgagcgaattcatacaggagagaaaccttattcctgttctcagtgtggaaaaaacttccgtcagaattctcatcggagtcgtcatgaaggaatccatataagggagaagatatttaagtgtccagaatgtgggaaaaccttcccaaagaatgaggagtttgtgcttcatctgcagagtcatgaggctgagagaccatatggttgcaaaaaatgtgggagaagatttggtcggctgtcaaactgtacccggcatgagaaaacccactcagcctgtaagacccgaaagcagaagtaatactgggaaccctttctgggtctgatggtgctgcctcaacctgagagctttcataagtagttctgaattcccaagctgcctaaaaaggtataaatgtgtaaaaatctcattattgccaaaattggataaatgcccatcttagctaaaacctcaaattgctagaaaattcacagggaagaaaacatttcaagggctatacctcagcatctaggctttttggactaaggagctttcctttttgaagttatatgataatgtacaggtcacagatcccctttcccaacactttgaagatgaatctggagtctgcttacttggaaggcaaagagtgacttgtgtctattgaaagtatatccgttttccccccacatggggattcatacttgagaaatagtgcaaagatgcttatctggaactgtgttctggtgaaagaaccaaattactggcttgttagccaacagcttctgatagcaattcatataaccctctaagaatacctgtttaagtcttgagtgttgaaaggaattgtttactttggaatataggaaaacagttgaatgtcagactctcatttgtatgtgatctaaatttgcaatcaatttcaataatatttacaatttgtgataaaactgacttttacagattccttttcacaa

SEQ ID NO: 374667 - DNA, 1388 bp, Homo sapiens
agtaaaaggcggaaaccgcggaggcgtcttgattttccggtcggagagatagcttgcttcctttaagcctcggggcagaaccacagagaggctacagccgtcctggcctccctccggccctgagagctcctctggcctgtctcaagtcttaacgtctcaagcgcagactgccggctccgaacggggagaccaggcttctgcaccggaaacaaggcaccggttgtgacgtcacagccgcagagcgcccgacttcccagaaggcaccgagtccctgccgttctcctcaactggcggcggcgcgaacgaatagtcgccggcgacctgtgagggcactcggaagggcgaggggagggctcgaccgctcgcgcctagtttttctatctctcccggagcctgagtctctgagccgtccccagcaaacgctcaggggctgcagaggccccgagaggtgaggggctccgtgagggcgggaaccaggctgaggccgcctctggggagcggagcgtgtccgttgctgagggagcaaggccgggtagggagcctggtgagcgcctcaggcaggggcgcacgctgagctttacggtaaaggtgttccttgaccagcggaagaggccccagagtgagcctggcccggcggtccttagtgggatgtcgcctgccgctctcagcagagctttgacggcggagaggagtcggcaggcggtgtgtggacacctcctcggccttgcatctgctccccgggagagtcaccaaccgcctccccgcccaaagggcaccggagggagcttcggttcgaggggtacagtatggccagattcagtgaccaacctgcttttaggcagatgtcctcggtattgaccccagatttcctgtcttctagcccattgctctttctccaagcctgatttaacctattcctggtgggttttacacaccgtctttctttctgtcttttctttctttttccttttattttctttctcttccctgattcccttcctccttctttcctttctcttttcctttctttttttagagtcagggtcttgctttgtcgctcagactgcagtgcagtggcgcgatcacagttcactgcagcctcgacctcctgggcacaagcaatcctcccagctccccagtagctgggaccacaggcttgtgtcgccacgcccagctaattttttttttttttatggagtcggtgtcttgctgtgttgcccaggctggtcttgaactcctggactcaagcgatccacccgccagggccttccaaagtgctgggattacaggtgtgagccaccggtacctggccacactttgtatttctcaggaggctggaccttggccttctccgctccacccttactcccttccctttggacttgagg

SEQ ID NO: 374668 - DNA, 564 bp, Homo sapiens
gcatatcttgttcaaatactgcgtttcagttatgatttccctatcccagctgtcgttttctttagatctcatgtagcctcaccagccatgccacatattggagtgcagtaatgccgtgcctggtcttttgggtaatccctggtttctctgtctacagcttggctctctggcagatttcctctagtaagaggtggctctggaggccccgcgaaacgagtgtggtgtgtggttgcaaggcatgatggctgcaaaagtggttcctatgcccccaaagccaaagcagtcctttatactgagagttccgccagactccaagctgggccaagacctacttcgagatgccactaacgggcccaagaccatccaccagctagtgctggagcacttcctcaccttcttgcccaagccaagcctggtccagcccagtcagaaagtcaaggagaccttggttattatgaaagatgtgagctcaagccttcagaacagaggtgagaagcacatgcttgtttcactagaagaggaggaggaggtactggagtctaagataggtttctgtgttagtta

SEQ ID NO: 374669 - DNA, 3160 bp, Homo sapiens
agtaaaaggcggaaaccgcggaggcgtcttgattttccggtcggagagatagcttgcttcctttaagcctcggggcagaaccacagagaggctacagccgtcctggcctccctccggccctgagagctcctctggcctgtctcaagtcttaacgtctcaagcgcagactgccggctccgaacggggagaccaggcttctgcaccggaaacaaggcaccggttgtgacgtcacagccgcagagcgcccgacttcccagaaggcaccgagtccctgccgttctcctcaactggcggcggcgcgaacgaatagtcgccggcgacctcttggctctctggcagatttcctctagtaagaggtggctctggaggccccgcgaaacgagtgtggtgtgtggttgcaaggcatgatggctgcaaaagtggttcctatgcccccaaagccaaagcagtcctttatactgagagttccgccagactccaagctgggccaagacctacttcgagatgccactaacgggcccaagaccatccaccagctagtgctggagcacttcctcaccttcttgcccaagccaagcctggtccagcccagtcagaaagtcaaggagaccttggttattatgaaagatgtgagctcaagccttcagaacagagtgcatcctcgtcccttggtgaagcttctgcccaaaggagtccaaaaggaacaagagacagtgtctctgtatttgaaagctaaccctgaggagctggtggtctttgaggatttgaatgtatttcactgccaggaagaatgtgtgagcttggatcctactcaacaactcacgtcagagaaggaagatgacagcagtgtcggggaaatgatgttactggcagtcaatggcagtaatcctgaaggtgaagatcctgagagggaacctgtagaaaatgaagattatagagaaaagtcttcagatgatgatgaaatggattcttccttggtctctcagcagcctcccgataaccaggaaaaggaacgactaaatacatccattccacaaaaaaggaaaatgagaaatctgttagttaccattgagaatgatactcctctagaggaactctcaaaatatgtagacatcagtattattgcccttactcgaaatcggaggacaaggagatggtacacttgtccactgtgtgggaaacagtttaatgaaagttcttacctcatttcccaccagaggacccacactggagaaaaaccctatgactgtaatcactgtgggaaaagcttcaatcataaaacaaacctcaataaacatgagcgaattcatacaggagagaaaccttattcctgttctcagtgtggaaaaaacttccgtcagaattctcatcggagtcgtcatgaaggaatccatataagggagaagatatttaagtgtccagaatgtgggaaaaccttcccaaagaatgaggagtttgtgcttcatctgcagagtcatgaggctgagagaccatatggttgcaaaaaatgtgggagaagatttggtcggctgtcaaactgtacccggcatgagaaaacccactcagcctgtaagacccgaaagcagaagtaatactgggaaccctttctgggtctgatggtgctgcctcaacctgagagctttcataagtagttctgaattcccaagctgcctaaaaaggtataaatgtgtaaaaatctcattattgccaaaattggataaatgcccatcttagctaaaacctcaaattgctagaaaattcacagggaagaaaacatttcaagggctatacctcagcatctaggctttttggactaaggagctttcctttttgaagttatatgataatgtacaggtcacagatcccctttcccaacactttgaagatgaatctggagtctgcttacttggaaggcaaagagtgacttgtgtctattgaaagtatatccgttttccccccacatggggattcatacttgagaaatagtgcaaagatgcttatctggaactgtgttctggtgaaagaaccaaattactggcttgttagccaacagcttctgatagcaattcatataaccctctaagaatacctgtttaagtcttgagtgttgaaaggaattgtttactttggaatataggaaaacagttgaatgtcagactctcatttgtatgtgatctaaatttgcaatcaatttcaataatatttacaatttgtgataaaactgacttttacagattccttttcacaacataatttaggtgtctactgttcttattgtattttgttctgctgttgatctctccagcagccgtctcatgcttctcccttgctaaaagaagtttggattactcaggcagggccatccagccccaccactagaaaagctcttcagaatcttgtccctctgttgagcccagatctcatgtgctacgaaggaaaccccaagacccagagaggaagggtcaacctggaggcaggaaaaagttggcttggatccatgtctcatcaataaccttaccatatgcttaggtcccctctatgctgtcatcagacctttggcaatggggtggtcactacctcacaaggcaaagtgttgtatgattagaaattacgtctccagtggttagctcacattgcctctcaagagacaggtttccaggtgtcttcattgtagtgggtattaattgtcttcagcctcttgatatccataccttcctgtcctctgcctagaagcaaggccagcggtgcctttacggactgatcgtgtggtgcgatttagggattcttcagttttgcttgctttaggtttccaaaagttatacattggtgttttgattggaataaagaaatcctataagctatttgggaaaaattatagtgtatgtttcccatccagaaacatgcctttctatttattagagtattatattcctgtgaaaatttttctaattttcttcacttgttttacacaattttgttattgtagttttttccattatatttttatagttgattattgcttttacatgggaaagttatttttaattatatatttgtatagtcatctcactgttgttaattttcaatagtttgttggtttagttctgttaacttttggtaaaatgacaccatctacaaagaatagtttttgtttcttgcc

SEQ ID NO: 374670 - DNA, 536 bp, Homo sapiens
aggttccctgctcagatggagagttaaacgtaatagtaaggccaggtacagtggcataaacctgtagtctcagctacttgggaggatcccttgagcccaggagttcaagaccagcctggcaagacatagcaagatcctagctctttaaaaaaaaatagtaattccccttcctcaaaattatattaataaggctacttcatctggacattcatcagtctcaaggtatggttcatctggagacagaatcattcctgcacttggtacttttggagtctgtttattcacctcacaattttaagtactttatatttaacaaaatacaaaaactgggtgctttcataaatgttttctcatctaattcttggaacagcttagtggagtatttaatattatcccccattttacagatgcagacctctgttgaatgactgccagacgtaagggttctgctttgagaaactgatagaatccaatttatgttctgtagattatgctgtttccatctcacttcaataaatacttatcaagcaaatact

SEQ ID NO: 374671 - DNA, 352 bp, Homo sapiens
ggtaagagtagccctgactacggaagtgggctgaagggtgctgtcccaagaaaagcggaagtatctgttgagtcttgtttcctgtcacatcctggagctgaaggtagtcacatttcaaatttaaaaaaaagaaagtcatgtgaagttaaccagtgagattatcttttacaggcaggataattagaatcctcagtggtgtagaatcttccacctacaggcgggttgagttttatcacagacgagaggggccatggaccctcagaaggccttagctcctggatttatttagtctgacctttggagagtcaaattaccaagaggtgatcgcacttccaactaaaattgagaatgt

SEQ ID NO: 374672 - DNA, 1227 bp, Homo sapiens
ttacttgagagtcatgtgaggagttgagcgtggagatagcaccataagccaaacatttatgctaattttatgtaaattatgtgctatggtccacgccccgcccccacatgcgattaaaaagttgatttttagtgtgctaaagcacatgctaaaacagatgctacattttcaaaaggcaagggtcttttagaatgcttgatgtctgtgaggttgacaggagcaatattaaataaatatacatacactgtttaaggattctgtgttttctttctcataggaaccactcgttttgactattattttatcactctttgtgaaacttcacaatgttcgggaggacattgtgaatgatattacagctgaacacatttctatttggccatcttccattcccaacctccagtctgtggactttgaagctgtggcaatcacagtgaaagagctagttcgatatacactcagtataaatccaaataaccattcttggttaattatccaggcagatatttactttgcaacgaatcagtattcagcagctcttcactattacctccaggcaggagctgtgtgttctgacttctttaacaaggctgtgccccctgatgtttatacagaccaggtaataaaacgaatgataaaatgttgttctttgctgaattgccacacacaggtggccattttatgtcagttcctcagagaaattgactacaaaacagcgtttaaatctctgcaagaacaaaacagtcatgatgctatggactcctactacgactacatatgggatgttaccattttggaatacttgacttatcttcatcataaaagaggagaaacagataaaagacaaattgcaatcaaagccatcggccagacagagttgaatgcaagcaatccagaagaagtgttacagctggcagcgcagagaaggaaaaaaaagtttctccaagcaatggcaaaactttacttttaagcagttaaatttttttaacttttattttttaaacaatgggctaaaaataaacagtattaaaaggttaagtttatataatacatatgtacacaattagtggtgttttcttttcagacaaaatactgaaacaaatattagtttaaaaacaaactatacagaagacttcataccgtaacaataaatgtatagtttcttcaaagggagaagagattcacatatctgataacaaaataaactagcaatctagttttctaaaa

SEQ ID NO: 374673 - DNA, 724 bp, Homo sapiens
tggattgtgtgagtttccgggacgttcggagggtggcctctctcccaccgggttccgcataccccaggcaccggcccgcatccaagtgtcaggttggagccgggaagcggccctggtggtagcggcggcgggggcaggatgagcgcggaggcggcggaccgggaggcggccacctccagccggccctgcaccccgccgcagacctgctggtttgagtttctgctggaggagtcactgttggagaaacatctgcgcaagccctgcccggatcctgcaccagttcaacttatagttcagtttttggaacaggcttccaaaccttcagttaatgaacaaaaccaagttcaacctccgcctgataacaagagaaattgactacaaaacagcgtttaaatctctgcaagaacaaaacagtcatgatgctatggactcctactacgactacatatgggatgttaccattttggaatacttgacttatcttcatcataaaagaggagaaacagataaaagacaaattgcaatcaaagccatcggccagacagagttgaatgcaagcaatccagaagaagtgttacagctggcagcgcagagaaggaaaaaaaagtttctccaagcaatggcaaaactttacttttaagcagttaaatttttttaacttttattttttaaacaatgggctaaaaataaacagtattaaaaggttaagtttatataatacata

SEQ ID NO: 374674 - DNA, 729 bp, Homo sapiens
ctgagccaccagttatttttgcacattaacaagtggagccctagtttaactctaaaaatcgccatgtagagcttacttatactttcaaataaatttacatgaatttacttaatatattaaaatgccacttaagtaattccataaactatggctcagcagtccatctttccttgagagtggccctggttaatctttatgttaatttttttccaagactcctgggttttacagttaagaggttcagttaatcattaaactgtatcgttgttagcacgtaggtagctttatattacttgtaccaacaaaacttaatttttgacacacctctaataacatcacttttctgttttggaagatcaaagccatcggccagacagagttgaatgcaagcaatccagaagaagtgttacagctggcagcgcagagaaggaaaaaaaagtttctccaagcaatggcaaaactttacttttaagcagttaaatttttttaacttttattttttaaacaatgggctaaaaataaacagtattaaaaggttaagtttatataatacatatgtacacaattagtggtgttttcttttcagacaaaatactgaaacaaatattagtttaaaaacaaactatacagaagacttcataccgtaacaataaatgtatagtttcttcaaagggagaagagattcacatatctgataacaaaataaactagcaatctagttttctaaaa

SEQ ID NO: 374675 - DNA, 556 bp, Homo sapiens
ctgagccaccagttatttttgcacattaacaagtggagccctagtttaactctaaaaatcgccatgtagagcttacttatactttcaaataaatttacatgaatttacttaatatattaaaatgccacttaagtaattccataaactatggctcagcagtccatctttccttgagagtggccctggttaatctttatgttaatttttttccaagactcctgggttttacagttaagaggttcagttaatcattaaactgtatcgttgttagcacgtaggtagctttatattacttgtaccaacaaaacttaatttttgacacacctctaataacatcacttttctgttttggaagatcaaagccatcggccagacagagttgaatgcaagcaatccagaagaagtgttacagctggcagcgcagagaaggaaaaaaaagtttctccaagcaatggcaaaactttacttttaagcagttaaatttttttaacttttattttttaaacaatgggctaaaaataaacagtattaaaaggttaagtttatataatacata

SEQ ID NO: 374676 - DNA, 3210 bp, Homo sapiens
tggattgtgtgagtttccgggacgttcggagggtggcctctctcccaccgggttccgcataccccaggcaccggcccgcatccaagtgtcaggttggagccgggaagcggccctggtggtagcggcggcgggggcaggatgagcgcggaggcggcggaccgggaggcggccacctccagccggccctgcaccccgccgcagacctgctggtttgagtttctgctggaggagtcactgttggagaaacatctgcgcaagccctgcccggatcctgcaccagttcaacttatagttcagtttttggaacaggcttccaaaccttcagttaatgaacaaaaccaagttcaacctccgcctgataacaagagaaatcgtattttaaaactacttgctcttaaagttgctgcacatttgaagtgggacttagacatattagagaaaagtttgtctgttccagtattgaatatgctactaaatgaactactctgcatcagtaaagttcctcctgggacaaagcatgtagacatggatctggccactttacctccgaccactgccatggctgtacttctctataatagatgggcaattaggacaattgttcaaagtagttttccagtcaaacaggcaaaacccggaccccctcagttaagtgttatgaatcaaatgcaacaggaaaaagagctaacagaaaacattttgaaagtgctcaaagaacaagctgctgattctatttgggtactagaagcagccctaaaattaaacaaggatctttatgtccatacgatgagaactctagatttattggccatggaaccaggcatggtaaatggagaaactgagagttctactgctggattgaaagtcaaaaccgaagaaatgcagtgccaggtgtgctatgatttgggcgcagcatacttccagcaaggctccacaaattcagctgtctatgaaaatgccagggaaaaattttttagaaccaaagaactaattgcagagataggttcattatctcttcattgtaccatagatgagaagcggttagctggctattgtcaagcatgtgatgttcttgtaccttcttctgatagtacatctcaacagttgactccatatagtcaagtccatatttgtttgagatctggcaactatcaggaggtaatacagattttcattgaagacaacttaaccttgagtttacctgtccagttccgacagtcagtcctaagagaactctttaagaaagctcaacagggaaatgaagctctagatgaaatctgttttaaagtttgtgcctgtaatacagtccgtgatatactggaaggcagaacaattagtgttcaatttaaccagctatttcttagaccaaataaagagaaaatagactttcttcttgaggtatgttcaagatcagtaaatttagaaaaagcttcagagtctttgaaaggaaacatggctgcttttctaaagaatgtgtgtctggggttggaagatctgcagtatgttttcatgatttcttcacatgagcttttcattacattgttgaaagatgaagaacgaaagctacttgttgatcagatgaggaagagatcccctagagtaaatctgtgcattaaacctgtaacttcattttatgatatcccagcttcagcaagtgtcaacattggtcagttagagcatcaacttatattgtcagtggatccttggaggattagacaaattttaattgaattacatggtatgacttcagagcgccagttctggacagtgtctaataagtgggaagtaccttctgtctatagtggtgttatcctgggaattaaagacaatttaacaagagatttggtttatattcttatggccaaaggtttgcactgcagtactgttaaggacttttcccatgctaaacagctctttgctgcttgtttggagttggtaacagagttctcaccgaagcttcgtcaggtcatgctgaatgagatgttgcttttggatattcatacacacgaagctgggacagggcaggcaggagagagaccgccatccgaccttataagtagagtacgaggctatctggaaatgaggcttcctgatattcctcttcgtcaagttatagctgaggaatgtgttgcctttatgttaaactggagagaaaatgaataccttacactccaagttcctgcatttttgcttcagagtaatccatatgtaaagcttggacagcttttagcagctacatgcaaagaacttccaggccctaaagaaagcagacggactgccaaagacctttgggaagttgttgttcaaatctgtagtgtgtccagtcagcacaaacgaggaaatgatggcagagttagtttaataaaacagagggaatctacgttaggtatcatgtatcggagtgaactgctttcttttatcaaaaaattacgagaaccactcgttttgactattattttatcactctttgtgaaacttcacaatgttcgggaggacattgtgaatgatattacagctgaacacatttctatttggccatcttccattcccaacctccagtctgtggactttgaagctgtggcaatcacagtgaaagagctagttcgatatacactcagtataaatccaaataaccattcttggttaattatccaggcagatatttactttgcaacgaatcagtattcagcagctcttcactattacctccaggcaggagctgtgtgttctgacttctttaacaaggctgtgccccctgatgtttatacagaccaggtaataaaacgaatgataaaatgttgttctttgctgaattgccacacacaggtggccattttatgtcagttcctcagagaaattgactacaaaacagcgtttaaatctctgcaagaacaaaacagtcatgatgctatggactcctactacgactacatatgggatgttaccattttggaatacttgacttatcttcatcataaaagaggagaaacagataaaagacaaattgcaatcaaagccatcggccagacagagttgaatgcaagcaatccagaagaagtgttacagctggcagcgcagagaaggaaaaaaaagtttctccaagcaatggcaaaactttacttttaagcagttaaatttttttaacttttattttttaaacaatgggctaaaaataaacagtattaaaaggttaagtttatataatacata

SEQ ID NO: 374677 - DNA, 3250 bp, Homo sapiens
tggattgtgtgagtttccgggacgttcggagggtggcctctctcccaccgggttccgcataccccaggcaccggcccgcatccaagtgtcaggttggagccgggaagcggccctggtggtagcggcggcgggggcaggatgagcgcggaggcggcggaccgggaggcggccacctccagccggccctgcaccccgccgcagacctgctggtttgagtttctgctggaggagtcactgttggagaaacatctgcgcaagccctgcccggatcctgcaccagttcaacttatagttcagtttttggaacaggcttccaaaccttcagttaatgaacaaaaccaagttcaacctccgcctgataacaagagaaatcgtattttaaaactacttgctcttaaagttgctgcacatttgaagtgggacttagacatattagagaaaagtttgtctgttccagtattgaatatgctactaaatgaactactctgcatcagtaaagttcctcctgggacaaagcatgtagacatggatctggccactttacctccgaccactgccatggctgtacttctctataatagatgggcaattaggacaattgttcaaagtagttttccagtcaaacaggcaaaacccggaccccctcagttaagtgttatgaatcaaatgcaacaggaaaaagagctaacagaaaacattttgaaagtgctcaaagaacaagctgctgattctatttgggtactagaagcagccctaaaattaaacaaggatctttatgtccatacgatgagaactctagatttattggccatggaaccaggcatggtaaatggagaaactgagagttctactgctggattgaaagtcaaaaccgaagaaatgcagtgccaggtgtgctatgatttgggcgcagcatacttccagcaaggctccacaaattcagctgtctatgaaaatgccagggaaaaattttttagaaccaaagaactaattgcagagataggttcattatctcttcattgtaccatagatgagaagcggttagctggctattgtcaagcatgtgatgttcttgtaccttcttctgatagtacatctcaacagttgactccatatagtcaagtccatatttgtttgagatctggcaactatcaggaggtaatacagattttcattgaagacaacttaaccttgagtttacctgtccagttccgacagtcagtcctaagagaactctttaagaaagctcaacagggaaatgaagctctagatgaaatctgttttaaagtttgtgcctgtaatacagtccgtgatatactggaaggcagaacaattagtgttcaatttaaccagctatttcttagaccaaataaagagaaaatagactttcttcttgaggtatgttcaagatcagtaaatttagaaaaagcttcagagtctttgaaaggaaacatggctgcttttctaaagaatgtgtgtctggggttggaagatctgcagtatgttttcatgatttcttcacatgagcttttcattacattgttgaaagatgaagaacgaaagctacttgttgatcagatgaggaagagatcccctagagtaaatctgtgcattaaacctgtaacttcattttatgatatcccagcttcagcaagtgtcaacattggtcagttagagcatcaacttatattgtcagtggatccttggaggattagacaaattttaattgaattacatggtatgacttcagagcgccagttctggacagtgtctaataagtgggaagtaccttctgtctatagtggtgttatcctgggaattaaagacaatttaacaagagatttggtttatattcttatggccaaaggtttgcactgcagtactgttaaggacttttcccatgctaaacagctctttgctgcttgtttggagttggtaacagagttctcaccgaagcttcgtcaggtcatgctgaatgagatgttgcttttggatattcatacacacgaagctgggacagggcaggcaggagagagaccgccatccgaccttataagtagagtacgaggctatctggaaatgaggcttcctgatattcctcttcgtcaagttatagctgaggaatgtgttgcctttatgttaaactggagagaaaatgaataccttacactccaagttcctgcatttttgcttcagagtaatccatatgtaaagcttggacagcttttagcagctacatgcaaagaacttccaggccctaaagaaagcagacggactgccaaagacctttgggaagttgttgttcaaatctgtagtgtgtccagtcagcacaaacgaggaaatgatggcagagttagtttaataaaacagagggaatctacgttaggtatcatgtatcggagtgaactgctttcttttatcaaaaaattacgaggacagggtcttgatctgtcacccaagctggagtgctgaggaaccactcgttttgactattattttatcactctttgtgaaacttcacaatgttcgggaggacattgtgaatgatattacagctgaacacatttctatttggccatcttccattcccaacctccagtctgtggactttgaagctgtggcaatcacagtgaaagagctagttcgatatacactcagtataaatccaaataaccattcttggttaattatccaggcagatatttactttgcaacgaatcagtattcagcagctcttcactattacctccaggcaggagctgtgtgttctgacttctttaacaaggctgtgccccctgatgtttatacagaccaggtaataaaacgaatgataaaatgttgttctttgctgaattgccacacacaggtggccattttatgtcagttcctcagagaaattgactacaaaacagcgtttaaatctctgcaagaacaaaacagtcatgatgctatggactcctactacgactacatatgggatgttaccattttggaatacttgacttatcttcatcataaaagaggagaaacagataaaagacaaattgcaatcaaagccatcggccagacagagttgaatgcaagcaatccagaagaagtgttacagctggcagcgcagagaaggaaaaaaaagtttctccaagcaatggcaaaactttacttttaagcagttaaatttttttaacttttattttttaaacaatgggctaaaaataaacagtattaaaaggttaagtttatataatacata

SEQ ID NO: 374678 - DNA, 2991 bp, Homo sapiens
tggattgtgtgagtttccgggacgttcggagggtggcctctctcccaccgggttccgcataccccaggcaccggcccgcatccaagtgtcaggttggagccgggaagcggccctggtggtagcggcggcgggggcaggatgagcgcggaggcggcggaccgggaggcggccacctccagccggccctgcaccccgccgcagacctgctggtttgagtttctgctggaggagtcactgttggagaaacatctgcgcaagccctgcccggatcctgcaccagttcaacttatagttcagtttttggaacaggcttccaaaccttcagttaatgaacaaaaccaagttcaacctccgcctgataacaagagaaatcgtattttaaaactacttgctcttaaagttgctgcacatttgaagtgggacttagacatattagagaaaagtttgtctgttccagtattgaatatgctactaaatgaactactctgcatcagtaaagttcctcctgggacaaagcatgtagacatggatctggccactttacctccgaccactgccatggctgtacttctctataatagatgggcaattaggacaattgttcaaagtagttttccagtcaaacaggcaaaacccggaccccctcagttaagtgttatgaatcaaatgcaacaggaaaaagagctaacagaaaacattttgaaagtgctcaaagaacaagctgctgattctatttgggtactagaagcagccctaaaattaaacaaggatctttatgtccatacgatgagaactctagatttattggccatggaaccaggcatggtaaatggagaaactgagagttctactgctggattgaaagtcaaaaccgaagaaatgcagtgccaggtgtgctatgatttgggcgcagcatacttccagcaaggctccacaaattcagctgtctatgaaaatgccagggaaaaattttttagaaccaaagaactaattgcagagataggttcattatctcttcattgtaccatagatgagaagcggttagctggctattgtcaagcatgtgatgttcttgtaccttcttctgatagtacatctcaacagttgactccatatagtcaagtccatatttgtttgagatctggcaactatcaggaggtaatacagattttcattgaagacaacttaaccttgagtttacctgtccagttccgacagtcagtcctaagagaactctttaagaaagctcaacagggaaatgaagctctagatgaaatctgttttaaagtttgtgcctgtaatacagtccgtgatatactggaaggcagaacaattagtgttcaatttaaccagctatttcttagaccaaataaagagaaaatagactttcttcttgaggtatgttcaagatcagtaaatttagaaaaagcttcagagtctttgaaaggaaacatggctgcttttctaaagaatgtgtgtctggggttggaagatctgcagtatgttttcatgatttcttcacatgagcttttcattacattgttgaaagatgaagaacgaaagctacttgttgatcagatgaggaagagatcccctagagtaaatctgtgcattaaacctgtaacttcattttatgatatcccagcttcagcaagtgtcaacattggtcagttagagcatcaacttatattgtcagtggatccttggaggattagacaaattttaattgaattacatggtatgacttcagagcgccagttctggacagtgtctaataagtgggaagtaccttctgtctatagtggtgttatcctgggaattaaagacaatttaacaagagatttggtttatattcttatggccaaaggtttgcactgcagtactgttaaggacttttcccatgctaaacagctctttgctgcttgtttggagttggtaacagagttctcaccgaagcttcgtcaggtcatgctgaatgagatgttgcttttggatattcatacacacgaagctgggacagggcaggcaggagagagaccgccatccgaccttataagtagagtacgaggctatctggaaatgaggcttcctgatattcctcttcgtcaagttatagctgaggaatgtgttgcctttatgttaaactggagagaaaatgaataccttacactccaagttcctgcatttttgcttcagagtaatccatatgtaaaggaaccactcgttttgactattattttatcactctttgtgaaacttcacaatgttcgggaggacattgtgaatgatattacagctgaacacatttctatttggccatcttccattcccaacctccagtctgtggactttgaagctgtggcaatcacagtgaaagagctagttcgatatacactcagtataaatccaaataaccattcttggttaattatccaggcagatatttactttgcaacgaatcagtattcagcagctcttcactattacctccaggcaggagctgtgtgttctgacttctttaacaaggctgtgccccctgatgtttatacagaccaggtaataaaacgaatgataaaatgttgttctttgctgaattgccacacacaggtggccattttatgtcagttcctcagagaaattgactacaaaacagcgtttaaatctctgcaagaacaaaacagtcatgatgctatggactcctactacgactacatatgggatgttaccattttggaatacttgacttatcttcatcataaaagaggagaaacagataaaagacaaattgcaatcaaagccatcggccagacagagttgaatgcaagcaatccagaagaagtgttacagctggcagcgcagagaaggaaaaaaaagtttctccaagcaatggcaaaactttacttttaagcagttaaatttttttaacttttattttttaaacaatgggctaaaaataaacagtattaaaaggttaagtttatataatacata

SEQ ID NO: 374679 - DNA, 3049 bp, Homo sapiens
tggattgtgtgagtttccgggacgttcggagggtggcctctctcccaccgggttccgcataccccaggcaccggcccgcatccaagtgtcaggttggagccgggaagcggccctggtggtagcggcggcgggggcaggatgagcgcggaggcggcggaccgggaggcggccacctccagccggccctgcaccccgccgcagacctgctggtttgagtttctgctggaggagtcactgttggagaaacatctgcgcaagccctgcccggatcctgcaccagttcaacttatagttcagtttttggaacaggcttccaaaccttcagttaatgaacaaaaccaagttcaacctccgcctgataacaagagaaatcgtattttaaaactacttgctcttaaagttgctgcacatttgaagtgggacttagacatattagagaaaagtttgtctgttccagtattgaatatgctactaaatgaactactctgcatcagtaaagttcctcctgggacaaagcatgtagacatggatctggccactttacctccgaccactgccatggctgtacttctctataatagatgggcaattaggacaattgttcaaagtagttttccagtcaaacaggcaaaacccggaccccctcagttaagtgttatgaatcaaatgcaacaggaaaaagagctaacagaaaacattttgaaagtgctcaaagaacaagctgctgattctatttgggtactagaagcagccctaaaattaaacaaggatctttatgtccatacgatgagaactctagatttattggccatggaaccaggcatggtaaatggagaaactgagagttctactgctggattgaaagtcaaaaccgaagaaatgcagtgccaggtgtgctatgatttgggcgcagcatacttccagcaaggctccacaaattcagctgtctatgaaaatgccagggaaaaattttttagaaccaaagaactaattgcagagataggttcattatctcttcattgtaccatagatgagaagcggttagctggctattgtcaagcatgtgatgttcttgtaccttcttctgatagtacatctcaacagttgactccatatagtcaagtccatatttgtttgagatctggcaactatcaggaggtaatacagattttcattgaagacaacttaaccttgagtttacctgtccagttccgacagtcagtcctaagagaactctttaagaaagctcaacagggaaatgaagctctagatgaaatctgttttaaagtttgtgcctgtaatacagtccgtgatatactggaaggcagaacaattagtgttcaatttaaccagctatttcttagaccaaataaagagaaaatagactttcttcttgaggtatgttcaagatcagtaaatttagaaaaagcttcagagtctttgaaaggaaacatggctgcttttctaaagaatgtgtgtctggggttggaagatctgcagtatgttttcatgatttcttcacatgagcttttcattacattgttgaaagatgaagaacgaaagctacttgttgatcagatgaggaagagatcccctagagtaaatctgtgcattaaacctgtaacttcattttatgatatcccagcttcagcaagtgtcaacattggtcagttagagcatcaacttatattgtcagtggatccttggaggattagacaaattttaattgaattacatggtatgacttcagagcgccagttctggacagtgtctaataagtgggaagtaccttctgtctatagtggtgttatcctgggaattaaagacaatttaacaagagatttggtttatattcttatggccaaaggtttgcactgcagtactgttaaggacttttcccatgctaaacagctctttgctgcttgtttggagttggtaacagagttctcaccgaagcttcgtcaggtcatgctgaatgagatgttgcttttggatattcatacacacgaagctgggacagggcaggcaggagagagaccgccatccgaccttataagtagagtacgaggctatctggaaatgaggcttcctgatattcctcttcgtcaagttatagctgaggaatgtgttgcctttatgttaaactggagagaaaatgaataccttacactccaagttcctgcatttttgcttcagagtaatccatatgtaaagcttggacagcttttagcagctacatgcaaagaacttccaggccctaaagaaagcagacggactgccaaagacctttgggaagttgttgttcaaatctgtagtgtgtccagtcagcacaaacgaggaaatgatggcagagttagtttaataaaacagagggaatctacgttaggtatcatgtatcggagtgaactgctttcttttatcaaaaaattacgagaaccactcgttttgactattattttatcactctttgtgaaacttcacaatgttcgggaggacattgtgaatgatattacagctgaacacatttctatttggccatcttccattcccaacctccagtctgtggactttgaagctgtggcaatcacagtgaaagagctagttcgatatacactcagtataaatccaaataaccattcttggttaattatccaggcagatatttactttgcaacgaatcagtattcagcagctcttcactattacctccaggcaggagctgtgtgttctgacttctttaacaaggctgtgccccctgatgtttatacagaccaggtaataaaacgaatgataaaatgttgttctttgctgaattgccacacacaggtggccattttatgtcagttcctcagagaaattgactacaaaacagcgtttaaatctctgcaagaacaaaacagtcatgatgctatggactcctactacgactacatatgggatgttaccattttggaatacttgacttatcttcatcataaaagaggagaaacagataaaagacaaattgcagtgtataaaacctctgaaggggggagaggaaaagccgcag

SEQ ID NO: 374680 - DNA, 1054 bp, Homo sapiens
ttacttgagagtcatgtgaggagttgagcgtggagatagcaccataagccaaacatttatgctaattttatgtaaattatgtgctatggtccacgccccgcccccacatgcgattaaaaagttgatttttagtgtgctaaagcacatgctaaaacagatgctacattttcaaaaggcaagggtcttttagaatgcttgatgtctgtgaggttgacaggagcaatattaaataaatatacatacactgtttaaggattctgtgttttctttctcataggaaccactcgttttgactattattttatcactctttgtgaaacttcacaatgttcgggaggacattgtgaatgatattacagctgaacacatttctatttggccatcttccattcccaacctccagtctgtggactttgaagctgtggcaatcacagtgaaagagctagttcgatatacactcagtataaatccaaataaccattcttggttaattatccaggcagatatttactttgcaacgaatcagtattcagcagctcttcactattacctccaggcaggagctgtgtgttctgacttctttaacaaggctgtgccccctgatgtttatacagaccaggtaataaaacgaatgataaaatgttgttctttgctgaattgccacacacaggtggccattttatgtcagttcctcagagaaattgactacaaaacagcgtttaaatctctgcaagaacaaaacagtcatgatgctatggactcctactacgactacatatgggatgttaccattttggaatacttgacttatcttcatcataaaagaggagaaacagataaaagacaaattgcaatcaaagccatcggccagacagagttgaatgcaagcaatccagaagaagtgttacagctggcagcgcagagaaggaaaaaaaagtttctccaagcaatggcaaaactttacttttaagcagttaaatttttttaacttttattttttaaacaatgggctaaaaataaacagtattaaaaggttaagtttatataatacata

SEQ ID NO: 374681 - DNA, 2872 bp, Homo sapiens
tggattgtgtgagtttccgggacgttcggagggtggcctctctcccaccgggttccgcataccccaggcaccggcccgcatccaagtgtcaggttggagccgggaagcggccctggtggtagcggcggcgggggcaggatgagcgcggaggcggcggaccgggaggcggccacctccagccggccctgcaccccgccgcagacctgctggtttgagtttctgctggaggagtcactgttggagaaacatctgcgcaagccctgcccggatcctgcaccagttcaacttatagttcagtttttggaacaggcttccaaaccttcagttaatgaacaaaaccaagttcaacctccgcctgataacaagagaaatcgtattttaaaactacttgctcttaaagttgctgcacatttgaagtgggacttagacatattagagaaaagtttgtctgttccagtattgaatatgctactaaatgaactactctgcatcagtaaagttcctcctgggacaaagcatgtagacatggatctggccactttacctccgaccactgccatggctgtacttctctataatagatgggcaattaggacaattgttcaaagtagttttccagtcaaacaggcaaaacccggaccccctcagttaagtgttatgaatcaaatgcaacaggaaaaagagctaacagaaaacattttgaaagtgctcaaagaacaagctgctgattctatttgggtactagaagcagccctaaaattaaacaaggatctttatgtccatacgatgagaactctagatttattggccatggaaccaggcatggtaaatggagaaactgagagttctactgctggattgaaagtcaaaaccgaagaaatgcagtgccaggtgtgctatgatttgggcgcagcatacttccagcaaggctccacaaattcagctgtctatgaaaatgccagggaaaaattttttagaaccaaagaactaattgcagagataggttcattatctcttcattgtaccatagatgagaagcggttagctggctattgtcaagcatgtgatgttcttgtaccttcttctgatagtacatctcaacagttgactccatatagtcaagtccatatttgtttgagatctggcaactatcaggaggtaatacagattttcattgaagacaacttaaccttgagtttacctgtccagttccgacagtcagtcctaagagaactctttaagaaagctcaacagggaaatgaagctctagatgaaatctgttttaaagtttgtgcctgtaatacagtccgtgatatactggaaggcagaacaattagtgttcaatttaaccagctatttcttagaccaaataaagagaaaatagactttcttcttgaggtatgttcaagatcagtaaatttagaaaaagcttcagagtctttgaaaggaaacatggctgcttttctaaagaatgtgtgtctggggttggaagatctgcagtatgttttcatgatttcttcacatgagcttttcattacattgttgaaagatgaagaacgaaagctacttgttgatcagatgaggaagagatcccctagagtaaatctgtgcattaaacctgtaacttcattttatgatatcccagcttcagcaagtgtcaacattggtcagttagagcatcaacttatattgtcagtggatccttggaggattagacaaattttaattgaattacatggtatgacttcagagcgccagttctggacagtgtctaataagtgggaagtaccttctgtctatagtggtgttatcctgggaattaaagacaatttaacaagagatttggtttatattcttatggccaaaggtttgcactgcagtactgttaaggacttttcccatgctaaacagctctttgctgcttgtttggagttggtaacagagttctcaccgaagcttcgtcaggtcatgctgaatgagatgttgcttttggatattcatacacacgaagctgggacagggcaggcaggagagagaccgccatccgaccttataagtagagtacgaggctatctggaaatgaggcttcctgatattcctcttcgtcaagttatagctgaggaatgtgttgcctttatgttaaactggagagaaaatgaataccttacactccaagttcctgcatttttgcttcagagtaatccatatgtaaaggtagttaatgtttaaataaaaggattgttaggatggtattattatacttgtttctttaactttatactactttgggaacttgtctaatttctgtgatacaaatgattggacaaatgcttgttgatttgtagttaaaggatagtttttgataattcatgcacttgaccttgttctaatatttctttctaatgccctgtaattcatgagcatgtagtcacagattatttagttaacagataacacattggtgtaatcctaagtaatgagagattcgctttctttgctttggttgctctaatcacactctagaactgatggagtccgtcagggatgcacttctccttgtttccatttgaacactttattcttctttagaattttatccttctaagtttgctatgtctgaatctccaataggtttgctattagtaattattcccctagtgaaagaatttattcagtaaattggcactaagttattttgttgtcttaattatatcctttgcaacctaaaatgcttctgagtacagaaaatatcaaaactaataagaaactggaggttttttctaagattatatctttcatgtgttaatattatacacactctgagtaagtagtgggtttttctcactttctggttttacagttaaaaaaaaaa

SEQ ID NO: 374682 - DNA, 2994 bp, Homo sapiens
tggattgtgtgagtttccgggacgttcggagggtggcctctctcccaccgggttccgcataccccaggcaccggcccgcatccaagtgtcaggttggagccgggaagcggccctggtggtagcggcggcgggggcaggatgagcgcggaggcggcggaccgggaggcggccacctccagccggccctgcaccccgccgcagacctgctggtttgagtttctgctggaggagtcactgttggagaaacatctgcgcaagccctgcccggatcctgcaccagttcaacttatagttcagtttttggaacaggcttccaaaccttcagttaatgaacaaaaccaagttcaacctccgcctgataacaagagaaatcgtattttaaaactacttgctcttaaagttgctgcacatttgaagtgggacttagacatattagagaaaagtttgtctgttccagtattgaatatgctactaaatgaactactctgcatcagtaaagttcctcctgggacaaagcatgtagacatggatctggccactttacctccgaccactgccatggctgtacttctctataatagatgggcaattaggacaattgttcaaagtagttttccagtcaaacaggcaaaacccggaccccctcagttaagtgttatgaatcaaatgcaacaggaaaaagagctaacagaaaacattttgaaagtgctcaaagaacaagctgctgattctatttgggtactagaagcagccctaaaattaaacaaggatctttatgtccatacgatgagaactctagatttattggccatggaaccaggcatggtaaatggagaaactgagagttctactgctggattgaaagtcaaaaccgaagaaatgcagtgccaggtgtgctatgatttgggcgcagcatacttccagcaaggctccacaaattcagctgtctatgaaaatgccagggaaaaattttttagaaccaaagaactaattgcagagataggttcattatctcttcattgtaccatagatgagaagcggttagctggctattgtcaagcatgtgatgttcttgtaccttcttctgatagtacatctcaacagttgactccatatagtcaagtccatatttgtttgagatctggcaactatcaggaggtaatacagattttcattgaagacaacttaaccttgagtttacctgtccagttccgacagtcagtcctaagagaactctttaagaaagctcaacagggaaatgaagctctagatgaaatctgttttaaagtttgtgcctgtaatacagtccgtgatatactggaaggcagaacaattagtgttcaatttaaccagctatttcttagaccaaataaagagaaaatagactttcttcttgaggtatgttcaagatcagtaaatttagaaaaagcttcagagtctttgaaaggaaacatggctgcttttctaaagaatgtgtgtctggggttggaagatctgcagtatgttttcatgatttcttcacatgagcttttcattacattgttgaaagatgaagaacgaaagctacttgttgatcagatgaggaagagatcccctagagtaaatctgtgcattaaacctgtaacttcattttatgatatcccagcttcagcaagtgtcaacattggtcagttagagcatcaacttatattgtcagtggatccttggaggattagacaaattttaattgaattacatggtatgacttcagagcgccagttctggacagtgtctaataagtgggaagtaccttctgtctatagtggtgttatcctgggaattaaagacaatttaacaagagatttggtttatattcttatggccaaaggtttgcactgcagtactgttaaggacttttcccatgctaaacagctctttgctgcttgtttggagttggtaacagagttctcaccgaagcttcgtcaggtcatgctgaatgagatgttgcttttggatattcatacacacgaagctgggacagggcaggcaggagagagaccgccatccgaccttataagtagagtacgaggctatctggaaatgaggcttcctgatattcctcttcgtcaagttatagctgaggaatgtgttgcctttatgttaaactggagagaaaatgaataccttacactccaagttcctgcatttttgcttcagagtaatccatatgtaaagcttggacagcttttagcagctacatgcaaagaacttccaggccctaaagaaagcagacggactgccaaagacctttgggaagttgttgttcaaatctgtagtgtgtccagtcagcacaaacgaggaaatgatggcagagttagtttaataaaacagagggaatctacgttaggtatcatgtatcggagtgaactgctttcttttatcaaaaaattacgagaaccactcgttttgactattattttatcactctttgtgaaacttcacaatgttcgggaggacattgtgaatgatattacagctgaacacatttctatttggccatcttccattcccaacctccagtctgtggactttgaagctgtggcaatcacagtgaaagagctagttcgatatacactcagtataaatccaaatctgtgccccctgatgtttatacagaccaggtaataaaacgaatgataaatgttgttctttgttgaattggcacacacaggtggccatttatgtcagttctcagagaaatgactacaaaacaggttaatctctgcagaacaaccagcctgaagctaggatctaactacgatactatggggttgtccttggacaactggcttctccctaaagggaaacgttcaacccactgggtcagcccggccaaattggggggcaccaaagttctggggcgaggaaaaatttccagggaacttcgacatcttaagggcacagggtttttcagagccttcaaacactccctcttctgtgtttgttgctcctcgc

SEQ ID NO: 374683 - DNA, 2144 bp, Homo sapiens
tggattgtgtgagtttccgggacgttcggagggtggcctctctcccaccgggttccgcataccccaggcaccggcccgcatccaagtgtcaggttggagccgggaagcggccctggtggtagcggcggcgggggcaggatgagcgcggaggcggcggaccgggaggcggccacctccagccggccctgcaccccgccgcagacctgctggtttgagtttctgctggaggagtcactgttggagaaacatctgcgcaagccctgcccggatcctgcaccagttcaacttatagttcagtttttggaacaggcttccaaaccttcagttaatgaacaaaaccaagttcaacctccgcctgataacaagagaaatcgtattttaaaactacttgctcttaaagttgctgcacatttgaagtgggacttagacatattagagaaaagtttgtctgttccagtattgaatatgctactaaatgaactactctgcatcagtaaagttcctcctgggacaaagcatgtagacatggatctggccactttacctccgaccactgccatggctgtacttctctataatagatgggcaattaggacaattgttcaaagtagttttccagtcaaacaggcaaaacccggaccccctcagttaagtgttatgaatcaaatgcaacaggaaaaagagctaacagaaaacattttgaaagtgctcaaagaacaagctgctgattctatttgggtactagaagcagccctaaaattaaacaaggatctttatgtccatacgatgagaactctagatttattggccatggaaccaggcatggtaaatggagaaactgagagttctactgctggattgaaagtcaaaaccgaagaaatgcagtgccaggtgtgctatgatttgggcgcagcatacttccagcaaggctccacaaattcagctgtctatgaaaatgccagggaaaaattttttagaaccaaagaactaattgcagagataggttcattatctcttcattgtaccatagatgagaagcggttagctggctattgtcaagcatgtgatgttcttgtaccttcttctgatagtacatctcaacagttgactccatatagtcaagtccatatttgtttgagatctggcaactatcaggaggtaatacagattttcattgaagacaacttaaccttgagtttacctgtccagttccgacagtcagtcctaagagaactctttaagaaagctcaacagggaaatgaagctctagatgaaatctgttttaaagtttgtgcctgtaatacagtccgtgatatactggaaggcagaacaattagtgttcaatttaaccagctatttcttagaccaaataaagagaaaatagactttcttcttgaggtatgttcaagatcagtaaatttagaaaaagcttcagagtctttgaaaggaaacatggctgcttttctaaagaatgtgtgtctggggttggaagatctgcagtatgttttcatgatttcttcacatgagcttttcattacattgttgaaagatgaagaacgaaagctacttgttgatcagatgaggaagagatcccctagagtaaatctgtgcattaaacctgtaacttcattttatgatatcccagcttcagcaagtgtcaacattggtcagttagagcatcaacttatattgtcagtggatccttggaggattagacaaattttaattgaattacatggtatgacttcagagcgccagttctggacagtgtctaataagtgggaagtaccttctgtctatagtggtgttatcctgggaattaaagacaatttaacaagagatttggtttatattcttatggccaaaggtttgcactgcagtactgttaaggacttttcccatgctaaacagctctttgctgcttgtttggagttggtaacagagttctcaccgaagcttcgtcaggtcatgctgaatgagatgttgcttttggatattcataaaaaaaaaaaaaataccttgagggggggcccgggtccccattttgccctattgtgagtcgattttacattcattggcccgtgttttttacaacgtacggtactgggtaaaacccttgctttacccaaatttaattgcccttg

SEQ ID NO: 374684 - DNA, 551 bp, Homo sapiens
atgagcgtctatacttgccagctatgaaaggtttaattgcacactctgtatgtccttgaatgtcatgacacttttgcttggcagttttccatccccttcagttttctgaactggctttttgccagcttctcattcaaacaaacctctaaaatttgtggttgaggtcactgatgaagagaatattggtcagacagacacgtgtataaaggtttttgaaattaaaattggatggaatccataactatgagcggattcaatgtgatctataaggcttaatataagagtaattcaagattaccttgtaaaaccaagctttcattacatgaaaccattttcaaatctttgttaatgtaggtggccattttatgtcagttcctcagagaaattgactacaaaacagcgtttaaatctctgcaagaacaaaacaggtatgaataatattttaaaaataatgaggtcaacatttttctgcttaagaagtaactgaattctgtctttcagtcatgatgctatggactcctactacgactacatatgggatgttaccattt

SEQ ID NO: 374685 - DNA, 3383 bp, Homo sapiens
tggattgtgtgagtttccgggacgttcggagggtggcctctctcccaccgggttccgcataccccaggcaccggcccgcatccaagtgtcaggttggagccgggaagcggccctggtggtagcggcggcgggggcaggatgagcgcggaggcggcggaccgggaggcggccacctccagccggccctgcaccccgccgcagacctgctggtttgagtttctgctggaggagtcactgttggagaaacatctgcgcaagccctgcccggatcctgcaccagttcaacttatagttcagtttttggaacaggcttccaaaccttcagttaatgaacaaaaccaagttcaacctccgcctgataacaagagaaatcgtattttaaaactacttgctcttaaagttgctgcacatttgaagtgggacttagacatattagagaaaagtttgtctgttccagtattgaatatgctactaaatgaactactctgcatcagtaaagttcctcctgggacaaagcatgtagacatggatctggccactttacctccgaccactgccatggctgtacttctctataatagatgggcaattaggacaattgttcaaagtagttttccagtcaaacaggcaaaacccggaccccctcagttaagtgttatgaatcaaatgcaacaggaaaaagagctaacagaaaacattttgaaagtgctcaaagaacaagctgctgattctatttgggtactagaagcagccctaaaattaaacaaggatctttatgtccatacgatgagaactctagatttattggccatggaaccaggcatggtaaatggagaaactgagagttctactgctggattgaaagtcaaaaccgaagaaatgcagtgccaggtgtgctatgatttgggcgcagcatacttccagcaaggctccacaaattcagctgtctatgaaaatgccagggaaaaattttttagaaccaaagaactaattgcagagataggttcattatctcttcattgtaccatagatgagaagcggttagctggctattgtcaagcatgtgatgttcttgtaccttcttctgatagtacatctcaacagttgactccatatagtcaagtccatatttgtttgagatctggcaactatcaggaggtaatacagattttcattgaagacaacttaaccttgagtttacctgtccagttccgacagtcagtcctaagagaactctttaagaaagctcaacagggaaatgaagctctagatgaaatctgttttaaagtttgtgcctgtaatacagtccgtgatatactggaaggcagaacaattagtgttcaatttaaccagctatttcttagaccaaataaagagaaaatagactttcttcttgaggtatgttcaagatcagtaaatttagaaaaagcttcagagtctttgaaaggaaacatggctgcttttctaaagaatgtgtgtctggggttggaagatctgcagtatgttttcatgatttcttcacatgagcttttcattacattgttgaaagatgaagaacgaaagctacttgttgatcagatgaggaagagatcccctagagtaaatctgtgcattaaacctgtaacttcattttatgatatcccagcttcagcaagtgtcaacattggtcagttagagcatcaacttatattgtcagtggatccttggaggattagacaaattttaattgaattacatggtatgacttcagagcgccagttctggacagtgtctaataagtgggaagtaccttctgtctatagtggtgttatcctgggaattaaagacaatttaacaagagatttggtttatattcttatggccaaaggtttgcactgcagtactgttaaggacttttcccatgctaaacagctctttgctgcttgtttggagttggtaacagagttctcaccgaagcttcgtcaggtcatgctgaatgagatgttgcttttggatattcatacacacgaagctgggacagggcaggcaggagagagaccgccatccgaccttataagtagagtacgaggctatctggaaatgaggcttcctgatattcctcttcgtcaagttatagctgaggaatgtgttgcctttatgttaaactggagagaaaatgaataccttacactccaagttcctgcatttttgcttcagagtaatccatatgtaaagcttggacagcttttagcagctacatgcaaagaacttccaggccctaaagaaagcagacggactgccaaagacctttgggaagttgttgttcaaatctgtagtgtgtccagtcagcacaaacgaggaaatgatggcagagttagtttaataaaacagagggaatctacgttaggtatcatgtatcggagtgaactgctttcttttatcaaaaaattacgagaaccactcgttttgactattattttatcactctttgtgaaacttcacaatgttcgggaggacattgtgaatgatattacagctgaacacatttctatttggccatcttccattcccaacctccagtctgtggactttgaagctgtggcaatcacagtgaaagagctagttcgatatacactcagtataaatccaaataaccattcttggttaattatccaggcagatatttactttgcaacgaatcagtattcagcagctcttcactattacctccaggcaggagctgtgtgttctgacttctttaacaaggctgtgccccctgatgtttatacagaccaggtaataaaacgaatgataaaatgttgttctttgctgaattgccacacacaggtggccattttatgtcagttcctcagagaaattgactacaaaacagcgtttaaatctctgcaagaacaaaacagtcatgatgctatggactcctactacgactacatatgggatgttaccattttggaatacttgacttatcttcatcataaaagaggagaaacagataaaagacaaattgcaatcaaagccatcggccagacagagttgaatgcaagcaatccagaagaagtgttacagctggcagcgcagagaaggaaaaaaaagtttctccaagcaatggcaaaactttacttttaagcagttaaatttttttaacttttattttttaaacaatgggctaaaaataaacagtattaaaaggttaagtttatataatacatatgtacacaattagtggtgttttcttttcagacaaaatactgaaacaaatattagtttaaaaacaaactatacagaagacttcataccgtaacaataaatgtatagtttcttcaaagggagaagagattcacatatctgataacaaaataaactagcaatctagttttctaaaa

SEQ ID NO: 374686 - DNA, 3370 bp, Homo sapiens
tggattgtgtgagtttccgggacgttcggagggtggcctctctcccaccgggttccgcataccccaggcaccggcccgcatccaagtgtcaggttggagccgggaagcggccctggtggtagcggcggcgggggcaggatgagcgcggaggcggcggaccgggaggcggccacctccagccggccctgcaccccgccgcagacctgctggtttgagtttctgctggaggagtcactgttggagaaacatctgcgcaagccctgcccggatcctgcaccagttcaacttatagttcagtttttggaacaggcttccaaaccttcagttaatgaacaaaaccaagttcaacctccgcctgataacaagagaaatcgtattttaaaactacttgctcttaaagttgctgcacatttgaagtgggacttagacatattagagaaaagtttgtctgttccagtattgaatatgctactaaatgaactactctgcatcagtaaagttcctcctgggacaaagcatgtagacatggatctggccactttacctccgaccactgccatggctgtacttctctataatagatgggcaattaggacaattgttcaaagtagttttccagtcaaacaggcaaaacccggaccccctcagttaagtgttatgaatcaaatgcaacaggaaaaagagctaacagaaaacattttgaaagtgctcaaagaacaagctgctgattctatttgggtactagaagcagccctaaaattaaacaaggatctttatgtccatacgatgagaactctagatttattggccatggaaccaggcatggtaaatggagaaactgagagttctactgctggattgaaagtcaaaaccgaagaaatgcagtgccaggtgtgctatgatttgggcgcagcatacttccagcaaggctccacaaattcagctgtctatgaaaatgccagggaaaaattttttagaaccaaagaactaattgcagagataggttcattatctcttcattgtaccatagatgagaagcggttagctggctattgtcaagcatgtgatgttcttgtaccttcttctgatagtacatctcaacagttgactccatatagtcaagtccatatttgtttgagatctggcaactatcaggaggtaatacagattttcattgaagacaacttaaccttgagtttacctgtccagttccgacagtcagtcctaagagaactctttaagaaagctcaacagggaaatgaagctctagatgaaatctgttttaaagtttgtgcctgtaatacagtccgtgatatactggaaggcagaacaattagtgttcaatttaaccagctatttcttagaccaaataaagagaaaatagactttcttcttgaggtatgttcaagatcagtaaatttagaaaaagcttcagagtctttgaaaggaaacatggctgcttttctaaagaatgtgtgtctggggttggaagatctgcagtatgttttcatgatttcttcacatgagcttttcattacattgttgaaagatgaagaacgaaagctacttgttgatcagatgaggaagagatcccctagagtaaatctgtgcattaaacctgtaacttcattttatgatatcccagcttcagcaagtgtcaacattggtcagttagagcatcaacttatattgtcagtggatccttggaggattagacaaattttaattgaattacatggtatgacttcagagcgccagttctggacagtgtctaataagtgggaagtaccttctgtctatagtggtgttatcctgggaattaaagacaatttaacaagagatttggtttatattcttatggccaaaggtttgcactgcagtactgttaaggacttttcccatgctaaacagctctttgctgcttgtttggagttggtaacagagttctcaccgaagcttcgtcaggtcatgctgaatgagatgttgcttttggatattcatacacacgaagctgggacagggcaggcaggagagagaccgccatccgaccttataagtagagtacgaggctatctggaaatgaggcttcctgatattcctcttcgtcaagttatagctgaggaatgtgttgcctttatgttaaactggagagaaaatgaataccttacactccaagttcctgcatttttgcttcagagtaatccatatgtaaagcttggacagcttttagcagctacatgcaaagaacttccaggccctaaagaaagcagacggactgccaaagacctttgggaagttgttgttcaaatctgtagtgtgtccagtcagcacaaacgaggaaatgatggcagagttagtttaataaaacagagggaatctacgttaggtatcatgtatcggagtgaactgctttcttttatcaaaaaattacgagtaagttttattaaaaattgctctaattactattgctggtttttgtagaatatgactaaaaattattgggtacttcaaatactgactaaattattatttgttttttaatttttttttaagggacagggtcttgatctgtcacccaagctggagtgctgaggaaccactcgttttgactattattttatcactctttgtgaaacttcacaatgttcgggaggacattgtgaatgatattacagctgaacacatttctatttggccatcttccattcccaacctccagtctgtggactttgaagctgtggcaatcacagtgaaagagctagttcgatatacactcagtataaatccaaataaccattcttggttaattatccaggcagatatttactttgcaacgaatcagtattcagcagctcttcactattacctccaggcaggagctgtgtgttctgacttctttaacaaggctgtgccccctgatgtttatacagaccaggtaataaaacgaatgataaaatgttgttctttgctgaattgccacacacaggtggccattttatgtcagttcctcagagaaattgactacaaaacagcgtttaaatctctgcaagaacaaaacagtcatgatgctatggactcctactacgactacatatgggatgttaccattttggaatacttgacttatcttcatcataaaagaggagaaacagataaaagacaaattgcaatcaaagccatcggccagacagagttgaatgcaagcaatccagaagaagtgttacagctggcagcgcagagaaggaaaaaaaagtttctccaagcaatggcaaaactttacttttaagcagttaaatttttttaacttttattttttaaacaatgggctaaaaataaacagtattaaaaggttaagtttatataatacata

SEQ ID NO: 374687 - DNA, 1049 bp, Homo sapiens
gcaagaccctgcctccaaaaagaaaagaaaataaaagaaattctgaatttattcttggacagcttttagcagctacatgcaaagaacttccaggccctaaagaaagcagacggactgccaaagacctttgggaagttgttgttcaaatctgtagtgtgtccagtcagcacaaacgaggaaatgatggcagagttagtttaataaaacagagggaatctacgttaggtatcatgtatcggagtgaactgctttcttttatcaaaaaattacgagaaccactcgttttgactattattttatcactctttgtgaaacttcacaatgttcgggaggacattgtgaatgatattacagctgaacacatttctatttggccatcttccattcccaacctccagtctgtggactttgaagctgtggcaatcacagtgaaagagctagttcgatatacactcagtataaatccaaataaccattcttggttaattatccaggcagatatttactttgcaacgaatcagtattcagcagctcttcactattacctccaggcaggagctgtgtgttctgacttctttaacaaggctgtgccccctgatgtttatacagaccaggtaataaaacgaatgataaaatgttgttctttgctgaattgccacacacaggtggccattttatgtcagttcctcagagaaattgactacaaaacagcgtttaaatctctgcaagaacaaaacagtcatgatgctatggactcctactacgactacatatgggatgttaccattttggaatacttgacttatcttcatcataaaagaggagaaacagataaaagacaaattgcaatcaaagccatcggccagacagagttgaatgcaagcaatccagaagaagtgttacagctggcagcgcagagaaggaaaaaaaagtttctccaagcaatggcaaaactttacttttaagcagttaaatttttttaacttttattttttaaacaatgggctaaaaataaacagtattaaaaggttaagtttatataatacata

SEQ ID NO: 374688 - DNA, 3045 bp, Homo sapiens
tggattgtgtgagtttccgggacgttcggagggtggcctctctcccaccgggttccgcataccccaggcaccggcccgcatccaagtgtcaggttggagccgggaagcggccctggtggtagcggcggcgggggcaggatgagcgcggaggcggcggaccgggaggcggccacctccagccggccctgcaccccgccgcagacctgctggtttgagtttctgctggaggagtcactgttggagaaacatctgcgcaagccctgcccggatcctgcaccagttcaacttatagttcagtttttggaacaggcttccaaaccttcagttaatgaacaaaaccaagttcaacctccgcctgataacaagagaaatcgtattttaaaactacttgctcttaaagttgctgcacatttgaagtgggacttagacatattagagaaaagtttgtctgttccagtattgaatatgctactaaatgaactactctgcatcagtaaagttcctcctgggacaaagcatgtagacatggatctggccactttacctccgaccactgccatggctgtacttctctataatagatgggcaattaggacaattgttcaaagtagttttccagtcaaacaggcaaaacccggaccccctcagttaagtgttatgaatcaaatgcaacaggaaaaagagctaacagaaaacattttgaaagtgctcaaagaacaagctgctgattctatttgggtactagaagcagccctaaaattaaacaaggatctttatgtccatacgatgagaactctagatttattggccatggaaccaggcatggtaaatggagaaactgagagttctactgctggattgaaagtcaaaaccgaagaaatgcagtgccaggtgtgctatgatttgggcgcagcatacttccagcaaggctccacaaattcagctgtctatgaaaatgccagggaaaaattttttagaaccaaagaactaattgcagagataggttcattatctcttcattgtaccatagatgagaagcggttagctggctattgtcaagcatgtgatgttcttgtaccttcttctgatagtacatctcaacagttgactccatatagtcaagtccatatttgtttgagatctggcaactatcaggaggtaatacagattttcattgaagacaacttaaccttgagtttacctgtccagttccgacagtcagtcctaagagaactctttaagaaagctcaacagggaaatgaagctctagatgaaatctgttttaaagtttgtgcctgtaatacagtccgtgatatactggaaggcagaacaattagtgttcaatttaaccagctatttcttagaccaaataaagagaaaatagactttcttcttgaggtatgttcaagatcagtaaatttagaaaaagcttcagagtctttgaaaggaaacatggctgcttttctaaagaatgtgtgtctggggttggaagatctgcagtatgttttcatgatttcttcacatgagcttttcattacattgttgaaagatgaagaacgaaagctacttgttgatcagatgaggaagagatcccctagagtaaatctgtgcattaaacctgtaacttcattttatgatatcccagcttcagcaagtgtcaacattggtcagttagagcatcaacttatattgtcagtggatccttggaggattagacaaattttaattgaattacatggtatgacttcagagcgccagttctggacagtgtctaataagtgggaagtaccttctgtctatagtggtgttatcctgggaattaaagacaatttaacaagagatttggtttatattcttatggccaaaggtttgcactgcagtactgttaaggacttttcccatgctaaacagctctttgctgcttgtttggagttggtaacagagttctcaccgaagcttcgtcaggtcatgctgaatgagatgttgcttttggatattcatacacacgaagctgggacagggcaggcaggagagagaccgccatccgaccttataagtagagtacgaggctatctggaaatgaggcttcctgatattcctcttcgtcaagttatagctgaggaatgtgttgcctttatgttaaactggagagaaaatgaataccttacactccaagttcctgcatttttgcttcagagtaatccatatgtaaagcttggacagcttttagcagctacatgcaaagaacttccaggccctaaagaaagcagacggactgccaaagacctttgggaagttgttgttcaaatctgtagtgtgtccagtcagcacaaacgaggaaatgatggcagagttagtttaataaaacagagggaatctacgttaggtatcatgtatcggagtgaactgctttcttttatcaaaaaattacgagaaccactcgttttgactattattttatcactctttgtgaaacttcacaatgttcgggaggacattgtgaatgatattacagctgaacacatttctatttggccatcttccattcccaacctccagtctgtggactttgaagctgtggcaatcacagtgaaagagctagttcgatatacactcagtataaatccaaataaccattcttggttaattatccaggcagatatttactttgcaacgaatcagtattcagcagctcttcactattacctccaggcaggagctgtgtgttctgacttctttaacaaggctgtgccccctgatgtttatacagaccaggtgaattgttttcgtgggctggctggtttcttgcctacctgtatatgttcttcctgggtccccttttggctgaacttacccatttccttgtaatgtgatcgtaagtcccaggttcatggctctagaacacattgctctgtgtattttcattgtccttatttctagcacctattgctgtcttgattcccccaaaacacctcaaattcaacttgtccaaactgatttgtgtctgtctttaccataaagtaataaactcctaatacactccta

SEQ ID NO: 374689 - DNA, 3065 bp, Homo sapiens
tggattgtgtgagtttccgggacgttcggagggtggcctctctcccaccgggttccgcataccccaggcaccggcccgcatccaagtgtcaggttggagccgggaagcggccctggtggtagcggcggcgggggcaggatgagcgcggaggcggcggaccgggaggcggccacctccagccggccctgcaccccgccgcagacctgctggtttgagtttctgctggaggagtcactgttggagaaacatctgcgcaagccctgcccggatcctgcaccagttcaacttatagttcagtttttggaacaggcttccaaaccttcagttaatgaacaaaaccaagttcaacctccgcctgataacaagagaaatcgtattttaaaactacttgctcttaaagttgctgcacatttgaagtgggacttagacatattagagaaaagtttgtctgttccagtattgaatatgctactaaatgaactactctgcatcagtaaagttcctcctgggacaaagcatgtagacatggatctggccactttacctccgaccactgccatggctgtacttctctataatagatgggcaattaggacaattgttcaaagtagttttccagtcaaacaggcaaaacccggaccccctcagttaagtgttatgaatcaaatgcaacaggaaaaagagctaacagaaaacattttgaaagtgctcaaagaacaagctgctgattctatttgggtactagaagcagccctaaaattaaacaaggatctttatgtccatacgatgagaactctagatttattggccatggaaccaggcatggtaaatggagaaactgagagttctactgctggattgaaagtcaaaaccgaagaaatgcagtgccaggtgtgctatgatttgggcgcagcatacttccagcaaggctccacaaattcagctgtctatgaaaatgccagggaaaaattttttagaaccaaagaactaattgcagagataggttcattatctcttcattgtaccatagatgagaagcggttagctggctattgtcaagcatgtgatgttcttgtaccttcttctgatagtacatctcaacagttgactccatatagtcaagtccatatttgtttgagatctggcaactatcaggaggtaatacagattttcattgaagacaacttaaccttgagtttacctgtccagttccgacagtcagtcctaagagaactctttaagaaagctcaacagggaaatgaagctctagatgaaatctgttttaaagtttgtgcctgtaatacagtccgtgatatactggaaggcagaacaattagtgttcaatttaaccagctatttcttagaccaaataaagagaaaatagactttcttcttgaggtatgttcaagatcagtaaatttagaaaaagcttcagagtctttgaaaggaaacatggctgcttttctaaagaatgtgtgtctggggttggaagatctgcagtatgttttcatgatttcttcacatgagcttttcattacattgttgaaagatgaagaacgaaagctacttgttgatcagatgaggaagagatcccctagagtaaatctgtgcattaaacctgtaacttcattttatgatatcccagcttcagcaagtgtcaacattggtcagttagagcatcaacttatattgtcagtggatccttggaggattagacaaattttaattgaattacatggtatgacttcagagcgccagttctggacagtgtctaataagtgggaagtaccttctgtctatagtggtgttatcctgggaattaaagacaatttaacaagagatttggtttatattcttatggccaaaggtttgcactgcagtactgttaaggacttttcccatgctaaacagctctttgctgcttgtttggagttggtaacagagttctcaccgaagcttcgtcaggtcatgctgaatgagatgttgcttttggatattcatacacacgaagctgggacagggcaggcaggagagagaccgccatccgaccttataagtagagtacgaggctatctggaaatgaggcttcctgatattcctcttcgtcaagttatagctgaggaatgtgttgcctttatgttaaactggagagaaaatgaataccttacactccaagttcctgcatttttgcttcagagtaatccatatgtaaagcttggacagcttttagcagctacatgcaaagaacttccaggccctaaagaaagcagacggactgccaaagacctttgggaagttgttgttcaaatctgtagtgtgtccagtcagcacaaacgaggaaatgatggcagagttagtttaataaaacagagggaatctacgttaggtatcatgtatcggagtgaactgctttcttttatcaaaaaattacgagtaagttttattaaaaattgctctaattactattgctggtttttgtagaatatgactaaaaattattgggtacttcaaatactgactaaattattatttgttttttaatttttttttaagggacagggtcttgatctgtcacccaagctggagtgctgaggtgtgattgtaactcactgcgtcttctaattcttgaggttaagcagtcctcctgcctcagctttctgaggaactgggactacaggcacatgtaaccatgcccagctaattttttgtagagatgaggtctccccttgttgcccaggctagtttctaactcctggtctcaaattatcatcccttcttggcccctcacagtgctgggattacaggtgttagccaccttgcctggcctctggttaaattattaaagtgacctgttaatgtgcttttcttcagtgatcattattggtgggtgggatattctgactggaaaagtttgtattgcatttactttaccatgttttagtgaacggagcaggtatttctttaaattgtaaagaagtcttcataataggggctagatgtgtgaagcctggctttaatttttgcttagtaggatcaatgtcatatttacttattggacgtaacct

SEQ ID NO: 374690 - DNA, 1742 bp, Homo sapiens
aagtaggtgaagattttagggcagaaattttcagataaagaactgcaactgcaaaggtattaactgaggattaagaggcgtcggtttgagctgctctcagaacctcagtctggggacctgacctctgtcactctcatgaaatgggggaagaaggtagcctgtggctccagtgaaggtaccatctacctcttcaattggaatggctttggggccacaagtgaccgctttgccctgagagctgaatctatcgactgcatggttccagtcaccgagagtctgctgtgtactggctccactgatggagtcatcagggctgtgaacatcctaccgaaccgagtggtgggcagtgtgggccagcacactggggagcctgtggaggagctggccctctcccactgtggccgcttcctggccagtagtggccatgaccagcgcctcaagttttgggacatggcccagctgcgagctgtggtggtggatgactaccgtcggcgcaaaaaaaagggaggaccactgcgggctctgagcagcaagacttggagcaccgatgacttcttcgcaggactgagggaagagggagaagactccatggctcaggaagaaaaggaggagactggggatgacagtgactgaaggaatgaattgaatcttgagacgggtcctcacggtgcctgtggagaaagaatggagtcactgtttaaccatggtacctgcctcagccccagcagaccacaggaggttggccccagactcactgagtgcctgcagcagccgtacagacacagcatccttggccacctcatgcccatcccggccatctagggtcagcacaacccagatgaggccgctgaagggcaccggatgcccaggaatcaccacctggtaccagaagcggtgccagccagcaggtcctatgcccaaacacttggtgaggaacacagggctgcccagcttcattcgttggcacagcaactgcagggtagcccgagccccttggaaccctaacttgtcccttgccaaagccaactggctgccctctggctgtggggaccgcaagaagggacccacaagctgctggcgaagtcgctgcttcaggtctggcttgagccactccacagccacctgctctccacagaggtgtgactgccctgtaggaaaaatgcaaagacaagggcaggtctaaaccctgggcccaagcctccaggtggtgagccctttggagctacacagtcctgttatttgtagccttcccatttcctggtagtgtgaccatgggtaagaaaagacaatgaagccttcagcctccattatttgcaaagggagtataacacactgctaccttacaagtttccttggagaagtactggttaattgcaggctttgtctgcctcataaccatcataatggctaatctttactgggaaaacttgctgtaagtcagtcagtgtgctaagtaccgtacacccattatgttacttaattctcataacagtctgaggaaacagattctatagtagtaaaaagctcagttggattcccttgagcaaatcaatttctctaacagtttcctcatagcttgagggtcctgtgcctattttgcggtgtgggggtgggggaaggttgagaattaagtcaggaggtaatgctcgggaagtgtcacaaatttaggtaagcggtggtggtagcaccattggaagttttaaaaatctgagatcaaatagtaaaaggttgcaaattctggc

SEQ ID NO: 374691 - DNA, 5466 bp, Homo sapiens
  misc_feature (1)..(1): n is a, c, g, or t
nagtgtgggtggttccgaggctgactaccctgcggcggcgcggctcgcagtccttctcagcatggaccgcacttgtgaggagaggcccgctgaggatgggagcgacgaggaggacccagactccatggaagccccaacccggatccgggacactccggaagacatcgtgctggaagctccggctagtgggctggcgttccatccggcccgtgacctactggctgcaggggacgtggacggggacgtgttcgtcttttcctactcttgccaagagggagaaaccaaggagctctggtcatcaggtcaccatctcaaggcctgccgagctgtggccttctctgaagatgggcagaagctcattactgtctccaaggacaaagccatccatgttctagatgtggagcagggccaactggaaagacgtgtttccaaggctcatggtgcccccatcaacagtcttctgctggtggatgagaatgttctggccactggggatgacacaggtggtatccgtctctgggaccagcggaaggagggccccttaatggatatgaggcaacatgaagagtacatcgcagacatggctctggatccagccaaaaagctgctgctgacagccagcggggatggctgccttggcatcttcaacattaagaggcgtcggtttgagctgctctcagaacctcagtctggggacctgacctctgtcactctcatgaaatgggggaagaaggtagcctgtggctccagtgaaggtaccatctacctcttcaattggaatggctttggggccacaagtgaccgctttgccctgagagctgaatctatcgactgcatggttccagtcaccgagagtctgctgtgtactggctccactgatggagtcatcagggctgtgaacatcctaccgaaccgagtggtgggcagtgtgggccagcacactggggagcctgtggaggagctggccctctcccactgtggccgcttcctggccagtagtggccatgaccagcgcctcaagttttgggacatggcccagctgcgagctgtggtggtggatgactaccgtcggcgcaaaaaaaagggaggaccactgcgggctctgagcagcaagacttggagcaccgatgacttcttcgcaggactgagggaagagggagaagactccatggctcaggaagaaaaggaggagactggggatgacagtgactgaaggaatgaattgaatcttgagacgggtcctcaccaggcaagagtcttgcttattgggctgcatccccagagaggatatgaattattttttgaaaagacagggttttgccatcgtccaggctggagtgcgctggcttgatcttggctcactgcagcctcaatgtccccaggctcagattgtccttccaccttagcctctggagcagctgggactacaggtgtgcactaccacaccaggccaatttttgttttttttttttggtagaaacgggtctgttttgcccaggctggtcttcaactcctggactcaaatgatccacctgcctctgcttcccaaagtgctgggattacaggcacgagccaccacacctggccaaaaaaatttatattttttgagacaaggtctcactctgtcacccaggctggagtacagtgggttgatcatggctcactgcatccttgacttcctgggctcaagtgatccacctcagcctgcctggtagctgagacttaacaggcatctgccaccatgcttgactaatttttgtgatttttttttggtagagaccaggggtttcactatgttgaccaagctggtcttggaactcctgggctcaagtgatcctcctgccttggcctcccaaaatgctgggattacaggcatgagccactgtgcctggctggatatgaaatttttttttttttttttttttgagacagggtttcgctcttgttgccagggctggagtgcaatggcgtgatcttggctcactgcaacctccgcctcccgggttcaagcaattctcctgcctcagcctcccaagtagctgggattacaggtgtctgccaccatgccaggctaatttttgtattttcagtagagacggggtttctccatgctggccaggctggtctcgaactcctgacctcaggtgatccacccgcctcagcctcccaaagtgctgggattacaggcaaaagccaacacacccggcctggatatgaatttataataccctacagtgcaacacaagaagatgcactcaaagcactgatgtgaggaagtacttgccccgtagcagctattcactctaccagtgtaaacaaactctaagctagggcaagacagcacagacacaagtatatactaaccaggggtttaatataaatacaaccagcatagaaagacccaaaactatacagaaaccaaaaccagaatgccatgtggtggaggcaaagggcagaatttctgacccctttggctcagctgcccttccccacaaataaaaaccaacaaagaggacaaatcaggacaataaagaagattcatgctaagctgtggcagaggggggaaggtatgatcgggtgggggtgggacaaggaacggccatggaagatcactgggtcaggttggaccctgggctgggagcgggagggcaaggcccctcaccacaacttaacccaaacctaagctgcccccaggtgccataggtccctgtcccagcagggaggctgatgggcctgggcccatgcccctccccacctttgggggtcagaaagtggccacccaggcctgctgggatggggcctgacacaggctctgcatgcccattcagggtgcctgtggagaaagaatggagtcactgtttaaccatggtacctgcctcagccccagcagaccacaggaggttggccccagactcactgagtgcctgcagcagccgtacagacacagcatccttggccacctcatgcccatcccggccatctagggtcagcacaacccagatgaggccgctgaagggcaccggatgcccaggaatcaccacctggtaccagaagcggtgccagccagcaggtcctatgcccaaacacttggtgaggaacacagggctgcccagcttcattcgttggcacagcaactgcagggtagcccgagccccttggaaccctaacttgtcccttgccaaagccaactggctgccctctggctgtggggaccgcaagaagggacccacaagctgctggcgaagtcgctgcttcaggtctggcttgagccactccacagccacctgctctccacagaggtgtgactgccctgtaggaaaaatgcaaagacaagggcaggtctaaaccctgggcccaagcctccaggtggtgagccctttggagctacacagtcctgttatttgtagccttcccatttcctggtagtgtgaccatgggtaagaaaagacaatgaagccttcagcctccattatttgcaaagggagtataacacactgctaccttacaagtttccttggagaagtactggttaattgcaggctttgtctgcctcataaccatcataatggctaatctttactgggaaaacttgctgtaagtcagtcagtgtgctaagtaccgtacacccattatgttacttaattctcataacagtctgaggaaacagattctatagtagtaaaaagctcagttggattcccttgagcaaatcaatttctctaacagtttcctcatagcttgagggtcctgtgcctattttgcggtgtgggggtgggggaaggttgagaattaagtcaggaggtaatgctcgggaagtgtcacaaatttaggtaagcggtggtggtagcaccattggaagttttaaaaatctgagatcaaatagtaaaaggttgcaaattctggcatgtttgactctaagatcttgtaactttaacagctatgctcagtataaagtgccgggcagaacgcgtttggccccaaccagcacccccgccccagcctaccttccaccagggctttttggccatggcagcggcccggtgcgagctgaatttgagcagagcgatctgcccgggcgccggtccggggctgggcagcagccgcgcctcctgcaagccgggacccagcggctgcagcgcgagcagcagcgcgctgcgggtcagattcggcggcaggccgtcaacgctcagctcacacttctcggtgctgcggcacacgagcagcgggcaggacggccgcagcggatggttgtgcagcgtggcgatggcggcctgcgcgccgcgcctcgagctgtagcgggcataggcgaagccgcggttcaggccgctgaaggtcatcatcaggcggaactcgtagaggcggcccacgcgctggaacagcgggataagctggtgctcgtacacgtcctgaggcagccgcccgatgaacacctctgacccagctggcggcgggctgcccacccagcctgtgggaagagggtatgcaaggccaccgtcaggcgacgctttcgaattctgagcccacggacccagcgcgcgggggtgggaggcgatgtgaacaaaggtctgtgaaatgggtttacacccgtaccctgggtggttggcataattaggtgactgcgctaacaagggggctggcacagagtaggtacaccttgagattggccccctccctcgacggggcgggtggacgtggagccacagttcctcctttgctggggggtataaatccgggtagttcgcagtttctgacagtgaaggctcggagcagcccctcccccaaagggggctggtgtagccggacaggcggaggggctgggactaccgtacctgggggtggcccgccatacttcctctgcccgttcacctgcaccaggcggatgcctgtctccctgacccacgcctccagcgccgccttgttctctggattcaccctctcacaccacagctgagagggaaaggaaggttggaatggcggatcgccaagcgcgccccccacctctcctgtggtactggggtccctaaagccgacccccgctccggcggggctcgccggcccccaagtcgccagccgcttacctcacaatcccgcttggactgcatggctctccagctggccccctcgtaccctctttataacttcctccccaccggcctctggaagcttccctacccctccaccccgcaagctctcattggctctgagcgcgaccccgcctcccaggggggtggaggtatccactgcacgtgcgccgcccgggcttcgctcagaccttcaggtgaaagctgcaaagtcgcgggtgcgtatgtacgggggctgcctcccgaggaggagctcccaagccgcgtagtcagatcgagccgcgtagtcagatcgagccgcgtagtcagatcgagccgcgtagtcagatcgagccgcgtagtcagatcgagccgcgtagtcagatcgagccgcgtagtcatatcg

SEQ ID NO: 374692 - DNA, 4643 bp, Homo sapiens
  misc_feature (1)..(1): n is a, c, g, or t
nagtgtgggtggttccgaggctgactaccctgcggcggcgcggctcgcagtccttctcagcatggaccgcacttgtgaggagaggcccgctgaggatgggagcgacgaggaggacccagactccatggaagccccaacccggatccgggacactccggaagacatcgtgctggaagctccggctagtgggctggcgttccatccggcccgtgacctactggctgcaggggacgtggacggggacgtgttcgtcttttcctactcttgccaagagggagaaaccaaggagctctggtcatcaggtcaccatctcaaggcctgccgagctgtggccttctctgaagatgggcagaagctcattactgtctccaaggacaaagccatccatgttctagatgtggagcagggccaactggaaagacgtgtttccaaggctcatggtgcccccatcaacagtcttctgctggtggatgagaatgttctggccactggggatgacacaggtggtatccgtctctgggaccagcggaaggagggccccttaatggatatgaggcaacatgaagagtacatcgcagacatggctctggatccagccaaaaagctgctgctgacagccagcggggatggctgccttggcatcttcaacattaagaggcgtcggtttgagctgctctcagaacctcagtctggggacctgacctctgtcactctcatgaaatgggggaagaaggtagcctgtggctccagtgaaggtaccatctacctcttcaattggaatggctttggggccacaagtgaccgctttgccctgagagctgaatctatcgactgcatggttccagtcaccgagagtctgctgtgtactggctccactgatggagtcatcagggctgtgaacatcctaccgaaccgagtggtgggcagtgtgggccagcacactggggagcctgtggaggagctggccctctcccactgtggccgcttcctggccagtagtggccatgaccagcgcctcaagttttgggacatggcccagctgcgagctgtggtggtggatgactaccgtcggcgcaaaaaaaagggaggaccactgcgggctctgagcagcaagacttggagcaccgatgacttcttcgcaggactgagggaagagggagaagactccatggctcaggaagaaaaggaggagactggggatgacagtgactgaaggaatgaattgaatcttgagacgggtcctcaccagctactctggaggctgaggtgggaggatcacttgagcccagttcaagaccagcctaggcaacatagtgagaccctgtctctaaaaataaaattaaaaaggctgctgggattacaggcaaaagccaacacacccggcctggatatgaatttataataccctacagtgcaacacaagaagatgcactcaaagcactgatgtgaggaagtacttgccccgtagcagctattcactctaccagtgtaaacaaactctaagctagggcaagacagcacagacacaagtatatactaaccaggggtttaatataaatacaaccagcatagaaagacccaaaactatacagaaaccaaaaccagaatgccatgtggtggaggcaaagggcagaatttctgacccctttggctcagctgcccttccccacaaataaaaaccaacaaagaggacaaatcaggacaataaagaagattcatgctaagctgtggcagaggggggaaggtatgatcgggtgggggtgggacaaggaacggccatggaagatcactgggtcaggttggaccctgggctgggagcgggagggcaaggcccctcaccacaacttaacccaaacctaagctgcccccaggtgccataggtccctgtcccagcagggaggctgatgggcctgggcccatgcccctccccacctttgggggtcagaaagtggccacccaggcctgctgggatggggcctgacacaggctctgcatgcccattcagggtgcctgtggagaaagaatggagtcactgtttaaccatggtacctgcctcagccccagcagaccacaggaggttggccccagactcactgagtgcctgcagcagccgtacagacacagcatccttggccacctcatgcccatcccggccatctagggtcagcacaacccagatgaggccgctgaagggcaccggatgcccaggaatcaccacctggtaccagaagcggtgccagccagcaggtcctatgcccaaacacttggtgaggaacacagggctgcccagcttcattcgttggcacagcaactgcagggtagcccgagccccttggaaccctaacttgtcccttgccaaagccaactggctgccctctggctgtggggaccgcaagaagggacccacaagctgctggcgaagtcgctgcttcaggtctggcttgagccactccacagccacctgctctccacagaggtgtgactgccctgtaggaaaaatgcaaagacaagggcaggtctaaaccctgggcccaagcctccaggtggtgagccctttggagctacacagtcctgttatttgtagccttcccatttcctggtagtgtgaccatgggtaagaaaagacaatgaagccttcagcctccattatttgcaaagggagtataacacactgctaccttacaagtttccttggagaagtactggttaattgcaggctttgtctgcctcataaccatcataatggctaatctttactgggaaaacttgctgtaagtcagtcagtgtgctaagtaccgtacacccattatgttacttaattctcataacagtctgaggaaacagattctatagtagtaaaaagctcagttggattcccttgagcaaatcaatttctctaacagtttcctcatagcttgagggtcctgtgcctattttgcggtgtgggggtgggggaaggttgagaattaagtcaggaggtaatgctcgggaagtgtcacaaatttaggtaagcggtggtggtagcaccattggaagttttaaaaatctgagatcaaatagtaaaaggttgcaaattctggcatgtttgactctaagatcttgtaactttaacagctatgctcagtataaagtgccgggcagaacgcgtttggccccaaccagcacccccgccccagcctaccttccaccagggctttttggccatggcagcggcccggtgcgagctgaatttgagcagagcgatctgcccgggcgccggtccggggctgggcagcagccgcgcctcctgcaagccgggacccagcggctgcagcgcgagcagcagcgcgctgcgggtcagattcggcggcaggccgtcaacgctcagctcacacttctcggtgctgcggcacacgagcagcgggcaggacggccgcagcggatggttgtgcagcgtggcgatggcggcctgcgcgccgcgcctcgagctgtagcgggcataggcgaagccgcggttcaggccgctgaaggtcatcatcaggcggaactcgtagaggcggcccacgcgctggaacagcgggataagctggtgctcgtacacgtcctgaggcagccgcccgatgaacacctctgacccagctggcggcgggctgcccacccagcctgtgggaagagggtatgcaaggccaccgtcaggcgacgctttcgaattctgagcccacggacccagcgcgcgggggtgggaggcgatgtgaacaaaggtctgtgaaatgggtttacacccgtaccctgggtggttggcataattaggtgactgcgctaacaagggggctggcacagagtaggtacaccttgagattggccccctccctcgacggggcgggtggacgtggagccacagttcctcctttgctggggggtataaatccgggtagttcgcagtttctgacagtgaaggctcggagcagcccctcccccaaagggggctggtgtagccggacaggcggaggggctgggactaccgtacctgggggtggcccgccatacttcctctgcccgttcacctgcaccaggcggatgcctgtctccctgacccacgcctccagcgccgccttgttctctggattcaccctctcacaccacagctgagagggaaaggaaggttggaatggcggatcgccaagcgcgccccccacctctcctgtggtactggggtccctaaagccgacccccgctccggcggggctcgccggcccccaagtcgccagccgcttacctcacaatcccgcttggactgcatggctctccagctggccccctcgtaccctctttataacttcctccccaccggcctctggaagcttccctacccctccaccccgcaagctctcattggctctgagcgcgaccccgcctcccaggggggtggaggtatccactgcacgtgcgccgcccgggcttcgctcagaccttcaggtgaaagctgcaaagtcgcgggtgcgtatgtacgggggctgcctcccgaggaggagctcccaagccgcgtagtcagatcgagccgcgtagtcagatcgagccgcgtagtcagatcgagccgcgtagtcagatcgagccgcgtagtcagatcgagccgcgtagtcagatcgagccgcgtagtcatatcg

SEQ ID NO: 374693 - DNA, 3904 bp, Homo sapiens
  misc_feature (1)..(1): n is a, c, g, or t
nagtgtgggtggttccgaggctgactaccctgcggcggcgcggctcgcagtccttctcagcatggaccgcacttgtgaggagaggcccgctgaggatgggagcgacgaggaggacccagactccatggaagccccaacccggatccgggacactccggaagacatcgtgctggaagctccggctagtgggctggcgttccatccggcccgtgacctactggctgcaggggacgtggacggggacgtgttcgtcttttcctactcttgccaagagggagaaaccaaggagctctggtcatcaggtcaccatctcaaggcctgccgagctgtggccttctctgaagatgggcagaagctcattactgtctccaaggacaaagccatccatgttctagatgtggagcagggccaactggaaagacgtgtttccaaggctcatggtgcccccatcaacagtcttctgctggtggatgagaatgttctggccactggggatgacacaggtggtatccgtctctgggaccagcggaaggagggccccttaatggatatgaggcaacatgaagagtacatcgcagacatggctctggatccagccaaaaagctgctgctgacagccagcggggatggctgccttggcatcttcaacattaagaggcgtcggtttgagctgctctcagaacctcagtctggggacctgacctctgtcactctcatgaaatgggggaagaaggtagcctgtggctccagtgaaggtaccatctacctcttcaattggaatggctttggggccacaagtgaccgctttgccctgagagctgaatctatcgactgcatggttccagtcaccgagagtctgctgtgtactggctccactgatggagtcatcagggctgtgaacatcctaccgaaccgagtggtgggcagtgtgggccagcacactggggagcctgtggaggagctggccctctcccactgtggccgcttcctggccagtagtggccatgaccagcgcctcaagttttgggacatggcccagctgcgagctgtggtggtggatgactaccgtcggcgcaaaaaaaagggaggaccactgcgggctctgagcagcaagacttggagcaccgatgacttcttcgcaggactgagggaagagggagaagactccatggctcaggaagaaaaggaggagactggggatgacagtgactgaaggaatgaattgaatcttgagacgggtcctcaccaggcaagagtcttgcttattgggctgcatccccagagaggatatgaattattttttgaaaagacagggttttgccatcgtccaggctggagtgcgctggcttgatcttggctcactgcagcctcaatgtccccaggctcagattgtccttccaccttagcctctggagcagctgggactacaggtgtgcactaccacaccaggccaatttttgttttttttttttggtagaaacgggtctgttttgcccaggctggtcttcaactcctggactcaaatgatccacctgcctctgcttcccaaagtgctgggattacaggcacgagccaccacacctggccaaaaaaatttatattttttgagacaaggtctcactctgtcacccaggctggagtacagtgggttgatcatggctcactgcatccttgacttcctgggctcaagtgatccacctcagcctgcctggtagctgagacttaacaggcatctgccaccatgcttgactaatttttgtgatttttttttggtagagaccaggggtttcactatgttgaccaagctggtcttggaactcctgggctcaagtgatcctcctgccttggcctcccaaaatgctgggattacaggcatgagccactgtgcctggctggatatgaaatttttttttttttttttttttgagacagggtttcgctcttgttgccagggctggagtgcaatggcgtgatcttggctcactgcaacctccgcctcccgggttcaagcaattctcctgcctcagcctcccaagtagctgggattacaggtgtctgccaccatgccaggctaatttttgtattttcagtagagacggggtttctccatgctggccaggctggtctcgaactcctgacctcaggtgatccacccgcctcagcctcccaaagtgctgggattacaggcaaaagccaacacacccggcctggatatgaatttataataccctacagtgcaacacaagaagatgcactcaaagcactgatgtgaggaagtacttgccccgtagcagctattcactctaccagtgtaaacaaactctaagctagggcaagacagcacagacacaagtatatactaaccaggggtttaatataaatacaaccagcatagaaagacccaaaactatacagaaaccaaaaccagaatgccatgtggtggaggcaaagggcagaatttctgacccctttggctcagctgcccttccccacaaataaaaaccaacaaagaggacaaatcaggacaataaagaagattcatgctaagctgtggcagaggggggaaggtatgatcgggtgggggtgggacaaggaacggccatggaagatcactgggtcaggttggaccctgggctgggagcgggagggcaaggcccctcaccacaacttaacccaaacctaagctgcccccaggtgccataggtccctgtcccagcagggaggctgatgggcctgggcccatgcccctccccacctttgggggtcagaaagtggccacccaggcctgctgggatggggcctgacacaggctctgcatgcccattcagggtgcctgtggagaaagaatggagtcactgtttaaccatggtacctgcctcagccccagcagaccacaggaggttggccccagactcactgagtgcctgcagcagccgtacagacacagcatccttggccacctcatgcccatcccggccatctagggtcagcacaacccagatgaggccgctgaagggcaccggatgcccaggaatcaccacctggtaccagaagcggtgccagccagcaggtcctatgcccaaacacttggtgaggaacacagggctgcccagcttcattcgttggcacagcaactgcagggtagcccgagccccttggaaccctaacttgtcccttgccaaagccaactggctgccctctggctgtggggaccgcaagaagggacccacaagctgctggcgaagtcgctgcttcaggtctggcttgagccactccacagccacctgctctccacagaggtgtgactgccctgtaggaaaaatgcaaagacaagggcaggtctaaaccctgggcccaagcctccaggtggtgagccctttggagctacacagtcctgttatttgtagccttcccatttcctggtagtgtgaccatgggtaagaaaagacaatgaagccttcagcctccattatttgcaaagggagtataacacactgctaccttacaagtttccttggagaagtactggttaattgcaggctttgtctgcctcataaccatcataatggctaatctttactgggaaaacttgctgtaagtcagtcagtgtgctaagtaccgtacacccattatgttacttaattctcataacagtctgaggaaacagattctatagtagtaaaaagctcagttggattcccttgagcaaatcaatttctctaacagtttcctcatagcttgagggtcctgtgcctattttgcggtgtgggggtgggggaaggttgagaattaagtcaggaggtaatgctcgggaagtgtcacaaatttaggtaagcggtggtggtagcaccattggaagttttaaaaatctgagatcaaatagtaaaaggttgcaaattctggc

SEQ ID NO: 374694 - DNA, 2492 bp, Homo sapiens
  misc_feature (1)..(1): n is a, c, g, or t
nagtgtgggtggttccgaggctgactaccctgcggcggcgcggctcgcagtccttctcagcatggaccgcacttgtgaggagaggcccgctgaggatgggagcgacgaggaggacccagactccatggaagccccaacccggatccgggacactccggaagacatcgtgctggaagctccggctagtgggctggcgttccatccggcccgtgacctactggctgcaggggacgtggacggggacgtgttcgtcttttcctactcttgccaagagggagaaaccaaggagctctggtcatcaggtcaccatctcaaggcctgccgagctgtggccttctctgaagatgggcagaagctcattactgtctccaaggacaaagccatccatgttctagatgtggagcagggccaactggaaagacgtgtttccaaggctcatggtgcccccatcaacagtcttctgctggtggatgagaatgttctggccactggggatgacacaggtggtatccgtctctgggaccagcggaaggagggccccttaatggatatgaggcaacatgaagagtacatcgcagacatggctctggatccagccaaaaagctgctgctgacagccagcggggatggctgccttggcatcttcaacattaagaggcgtcggtttgagctgctctcagaacctcagtctggggacctgacctctgtcactctcatgaaatgggggaagaaggtagcctgtggctccagtgaaggtaccatctacctcttcaattggaatggctttggggccacaagtgaccgctttgccctgagagctgaatctatcgactgcatggttccagtcaccgagagtctgctgtgtactggctccactgatggagtcatcagggctgtgaacatcctaccgaaccgagtggtgggcagtgtgggccagcacactggggagcctgtggaggagctggccctctcccactgtggccgcttcctggccagtagtggccatgaccagcgcctcaagttttgggacatggcccagctgcgagctgtggtggtggatgactaccgtcggcgcaaaaaaaagggaggaccactgcgggctctgagcagcaagacttggagcaccgatgacttcttcgcaggactgagggaagagggagaagactccatggctcaggaagaaaaggaggagactggggatgacagtgactgaaggaatgaattgaatcttgagacgggtcctcaccaggcaagagtcttgcttattgggctgcatccccagagaggatatgaattattttttgaaaagacagggttttgccatcgtccaggctggagtgcgctggcttgatcttggctcactgcagcctcaatgtccccaggctcagattgtccttccaccttagcctctggagcagctgggactacaggtgtgcactaccacaccaggccaatttttgttttttttttttggtagaaacgggtctgttttgcccaggctggtcttcaactcctggactcaaatgatccacctgcctctgcttcccaaagtgctgggattacaggcacgagccaccacacctggccaaaaaaatttatattttttgagacaaggtctcactctgtcacccaggctggagtacagtgggttgatcatggctcactgcatccttgacttcctgggctcaagtgatccacctcagcctgcctggtagctgagacttaacaggcatctgccaccatgcttgactaatttttgtgatttttttttggtagagaccaggggtttcactatgttgaccaagctggtcttggaactcctgggctcaagtgatcctcctgccttggcctcccaaaatgctgggattacaggcatgagccactgtgcctggctggatatgaaatttttttttttttttttttttgagacagggtttcgctcttgttgccagggctggagtgcaatggcgtgatcttggctcactgcaacctccgcctcccgggttcaagcaattctcctgcctcagcctcccaagtagctgggattacaggtgtctgccaccatgccaggctaatttttgtattttcagtagagacggggtttctccatgctggccaggctggtctcgaactcctgacctcaggtgatccacccgcctcagcctcccaaagtgctgggattacaggcaaaagccaacacacccggcctggatatgaatttataataccctacagtgcaacacaagaagatgcactcaaagcactgatgtgaggaagtacttgccccgtagcagctattcactctaccagtgtaaacaaactctaagctagggcaagacagcacagacacaagtatatactaaccaggggtttaatataaatacaaccagcatagaaagacccaaaactatacagaaaccaaaaccagaatgccatgtccccgtacatcgttagaagcttgaattcgagcagtagtagtagtaggcggccgc

SEQ ID NO: 374695 - DNA, 484 bp, Homo sapiens
ggccccttaatggatatgaggcaacatgaagagtacatcgcagacatggctctggatccagccaaaaagctgctgctgacagccaggtacaacttcaaagctgccttgcctcccctcccctccctgtgtgaaatgtcttcctcaaatagaccttgcgtctaagcctactgctctactctctacagcggggatggctgccttggcatcttcaacattaagaggcgtcggtttgagctgctctcagaacctcagtctggggacctgacctctgtcactctcatgaaagtacagctggttatggtgggatggaggggtgtgtgctgggggcttagtctgaggcagcttccacattgttttctctatttccctgcagtgggggaagaaggtagcctgtggctccagtgaaggtaccatctacctcttcaattggaatggctttggggccacaagtgaccgctttgccctgagagctgaatctatcgac

SEQ ID NO: 374696 - DNA, 3192 bp, Homo sapiens
  misc_feature (1)..(1): n is a, c, g, or t
nagtgtgggtggttccgaggctgactaccctgcggcggcgcggctcgcagtccttctcagcatggaccgcacttgtgaggagaggcccgctgaggatgggagcgacgaggaggacccagactccatggaagccccaacccggatccgggacactccggaagacatcgtgctggaagctccggctagtgggctggcgttccatccggcccgtgacctactggctgcaggggacgtggacggggacgtgttcgtcttttcctactcttgccaagagggagaaaccaaggagctctggtcatcaggtcaccatctcaaggcctgccgagctgtggccttctctgaagatgggcagaagctcattactgtctccaaggacaaagccatccatgttctagatgtggagcagggccaactggaaagacgtgtttccaaggctcatggtgcccccatcaacagtcttctgctggtggatgagaatgttctggccactggggatgacacaggtggtatccgtctctgggaccagcggaaggagggccccttaatggatatgaggcaacatgaagagtacatcgcagacatggctctggatccagccaaaaagctgctgctgacagccagcggggatggctgccttggcatcttcaacattaagaggcgtcggtttgagctgctctcagaacctcagtctggggacctgacctctgtcactctcatgaaatgggggaagaaggtagcctgtggctccagtgaaggtaccatctacctcttcaattggaatggctttggggccacaagtgaccgctttgccctgagagctgaatctatcgactgcatggttccagtcaccgagagtctgctgtgtactggctccactgatggagtcatcagggctgtgaacatcctaccgaaccgagtggtgggcagtgtgggccagcacactggggagcctgtggaggagctggccctctcccactgtggccgcttcctggccagtagtggccatgaccagcgcctcaagttttgggacatggcccagctgcgagctgtggtggtggatgactaccgtcggcgcaaaaaaaagggaggaccactgcgggctctgagcagcaagacttggagcaccgatgacttcttcgcaggactgagggaagagggagaagactccatggctcaggaagaaaaggaggagactggggatgacagtgactgaaggaatgaattgaatcttgagacgggtcctcacccccagcagaccacaggaggttggccccagactcactgagtgcctgcagcagccgtacagacacagcatccttggccacctcatgcccatcccggccatctagggtcagcacaacccagatgaggccgctgaagggcaccggatgcccaggaatcaccacctggtaccagaagcggtgccagccagcaggtcctatgcccaaacacttgctatgctcagtataaagtgccgggcagaacgcgtttggccccaaccagcacccccgccccagcctaccttccaccagggctttttggccatggcagcggcccggtgcgagctgaatttgagcagagcgatctgcccgggcgccggtccggggctgggcagcagccgcgcctcctgcaagccgggacccagcggctgcagcgcgagcagcagcgcgctgcgggtcagattcggcggcaggccgtcaacgctcagctcacacttctcggtgctgcggcacacgagcagcgggcaggacggccgcagcggatggttgtgcagcgtggcgatggcggcctgcgcgccgcgcctcgagctgtagcgggcataggcgaagccgcggttcaggccgctgaaggtcatcatcaggcggaactcgtagaggcggcccacgcgctggaacagcgggataagctggtgctcgtacacgtcctgaggcagccgcccgatgaacacctctgacccagctggcggcgggctgcccacccagcctgtgggaagagggtatgcaaggccaccgtcaggcgacgctttcgaattctgagcccacggacccagcgcgcgggggtgggaggcgatgtgaacaaaggtctgtgaaatgggtttacacccgtaccctgggtggttggcataattaggtgactgcgctaacaagggggctggcacagagtaggtacaccttgagattggccccctccctcgacggggcgggtggacgtggagccacagttcctcctttgctggggggtataaatccgggtagttcgcagtttctgacagtgaaggctcggagcagcccctcccccaaagggggctggtgtagccggacaggcggaggggctgggactaccgtacctgggggtggcccgccatacttcctctgcccgttcacctgcaccaggcggatgcctgtctccctgacccacgcctccagcgccgccttgttctctggattcaccctctcacaccacagctgagagggaaaggaaggttggaatggcggatcgccaagcgcgccccccacctctcctgtggtactggggtccctaaagccgacccccgctccggcggggctcgccggcccccaagtcgccagccgcttacctcacaatcccgcttggactgcatggctctccagctggccccctcgtaccctctttataacttcctccccaccggcctctggaagcttccctacccctccaccccgcaagctctcattggctctgagcgcgaccccgcctcccaggggggtggaggtatccactgcacgtgcgccgcccgggcttcgctcagaccttcaggtgaaagctgcaaagtcgcgggtgcgtatgtacgggggctgcctcccgaggaggagctcccaagccgcagggtggacgctggagacaagaacctcagggtcacaagtttactgtttttctcccttttccatccctacattggtctgctggggaaggcggggctaggcatcactgacacacgcagactccgtggttgaggcattttattggacctttggcaattggtggtggggaggcatctgctccaactggtgcggggccctgcagatgggaccatctcaggctgggtccttgtagcccaggagcacagactggactaagcctcctgggccttgtatgaaaaaggtgttgtacctggccgtttttgccagtaataatcaataaaataaccataat

SEQ ID NO: 374697 - DNA, 2514 bp, Homo sapiens
  misc_feature (1)..(1): n is a, c, g, or t
nagtgtgggtggttccgaggctgactaccctgcggcggcgcggctcgcagtccttctcagcatggaccgcacttgtgaggagaggcccgctgaggatgggagcgacgaggaggacccagactccatggaagccccaacccggatccgggacactccggaagacatcgtgctggaagctccggctagtgggctggcgttccatccggcccgtgacctactggctgcaggggacgtggacggggacgtgttcgtcttttcctactcttgccaagagggagaaaccaaggagctctggtcatcaggtcaccatctcaaggcctgccgagctgtggccttctctgaagatgggcagaagctcattactgtctccaaggacaaagccatccatgttctagatgtggagcagggccaactggaaagacgtgtttccaaggctcatggtgcccccatcaacagtcttctgctggtggatgagaatgttctggccactggggatgacacaggtggtatccgtctctgggaccagcggaaggagggccccttaatggatatgaggcaacatgaagagtacatcgcagacatggctctggatccagccaaaaagctgctgctgacagccagcggggatggctgccttggcatcttcaacattaagaggcgtcggtttgagctgctctcagaacctcagtctggggacctgacctctgtcactctcatgaaatgggggaagaaggtagcctgtggctccagtgaaggtaccatctacctcttcaattggaatggctttggggccacaagtgaccgctttgccctgagagctgaatctatcgactgcatggttccagtcaccgagagtctgctgtgtactggctccactgatggagtcatcagggctgtgaacatcctaccgaaccgagtggtgggcagtgtgggccagcacactggggagcctgtggaggagctggccctctcccactgtggccgcttcctggccagtagtggccatgaccagcgcctcaagttttgggacatggcccagctgcgagctgtggtggtggatgactaccgtcggcgcaaaaaaaagggaggaccactgcgggctctgagcagcaagacttggagcaccgatgacttcttcgcaggactgagggaagagggagaagactccatggctcaggaagaaaaggaggagactggggatgacagtgactgaaggaatgaattgaatcttgagacgggtcctcaccaggcaagagtcttgcttattgggctgcatccccagagaggatatgaattattttttgaaaagacagggttttgccatcgtccaggctggagtgcgctggcttgatcttggctcactgcagcctcaatgtccccaggctcagattgtccttccaccttagcctctggagcagctgggactacaggtgtgcactaccacaccaggccaatttttgttttttttttttggtagaaacgggtctgttttgcccaggctggtcttcaactcctggactcaaatgatccacctgcctctgcttcccaaagtgctgggattacaggcacgagccaccacacctggccaaaaaaatttatattttttgagacaaggtctcactctgtcacccaggctggagtacagtgggttgatcatggctcactgcatccttgacttcctgggctcaagtgatccacctcagcctgcctggtagctgagacttaacaggcatctgccaccatgcttgactaatttttgtgatttttttttggtagagaccaggggtttcactatgttgaccaagctggtcttggaactcctgggctcaagtgatcctcctgccttggcctcccaaaatgctgggattacaggcatgagccactgtgcctggctggatatgaaatttttttttttttttttttttgagacagggtttcgctcttgttgccagggctggagtgcaatggcgtgatcttggctcactgcaacctccgcctcccgggttcaagcaattctcctgcctcagcctcccaagtagctgggattacaggtgtctgccaccatgccaggctaatttttgtattttcagtagagacggggtttctccatgctggccaggctggtctcgaactcctgacctcaggtgatccacccgcctcagcctcccaaagtgctgggattacaggcaaaagccaacacacccggcctggatatgaatttataataccctacagtgcaacacaagaagatgcactcaaagcactgatgtgaggaagtacttgccccgtagcagctattcactctaccagtgtaaacaaactctaagctagggcaagacagcacagacacaagtatatactaaccaggggtttaatataaatacaaccagcatagaaagacccaaaactatacagaaaccaaaaccagaatgccatgtggtggaggcaaagggcagaatttctgacccctttggctcagctgcccttccccacaaataaaaaccaacaaagagg

SEQ ID NO: 374698 - DNA, 4971 bp, Homo sapiens
  misc_feature (1)..(1): n is a, c, g, or t
nagtgtgggtggttccgaggctgactaccctgcggcggcgcggctcgcagtccttctcagcatggaccgcacttgtgaggagaggcccgctgaggatgggagcgacgaggaggacccagactccatggaagccccaacccggatccgggacactccggaagacatcgtgctggaagctccggctagtgggctggcgttccatccggcccgtgacctactggctgcaggggacgtggacggggacgtgttcgtcttttcctactcttgccaagagggagaaaccaaggagctctggtcatcaggtcaccatctcaaggcctgccgagctgtggccttctctgaagatgggcagaagctcattactgtctccaaggacaaagccatccatgttctagatgtggagcagggccaactggaaagacgtgtttccaaggctcatggtgcccccatcaacagtcttctgctggtggatgagaatgttctggccactggggatgacacaggtggtatccgtctctgggaccagcggaaggagggccccttaatggatatgaggcaacatgaagagtacatcgcagacatggctctggatccagccaaaaagctgctgctgacagccagcggggatggctgccttggcatcttcaacattaagaggcgtcggtttgagctgctctcagaacctcagtctggggacctgacctctgtcactctcatgaaatgggggaagaaggtagcctgtggctccagtgaaggtaccatctacctcttcaattggaatggctttggggccacaagtgaccgctttgccctgagagctgaatctatcgactgcatggttccagtcaccgagagtctgctgtgtactggctccactgatggagtcatcagggctgtgaacatcctaccgaaccgagtggtgggcagtgtgggccagcacactggggagcctgtggaggagctggccctctcccactgtggccgcttcctggccagtagtggccatgaccagcgcctcaagttttgggacatggcccagctgcgagctgtggtggtggatgactaccgtcggcgcaaaaaaaagggaggaccactgcgggctctgagcagcaagacttggagcaccgatgacttcttcgcaggactgagggaagagggagaagactccatggctcaggaagaaaaggaggagactggggatgacagtgactgaaggaatgaattgaatcttgagacgggtcctcaccaggcaagagtcttgcttattgggctgcatccccagagaggatatgaattattttttgaaaagacagggttttgccatcgtccaggctggagtgcgctggcttgatcttggctcactgcagcctcaatgtccccaggctcagattgtccttccaccttagcctctggagcagctgggactacaggtgtgcactaccacaccaggccaatttttgttttttttttttggtagaaacgggtctgttttgcccaggctggtcttcaactcctggactcaaatgatccacctgcctctgcttcccaaagtgctgggattacaggcacgagccaccacacctggccaaaaaaatttatattttttgagacaaggtctcactctgtcacccaggctggagtacagtgggttgatcatggctcactgcatccttgacttcctgggctcaagtgatccacctcagcctgcctggtagctgagacttaacaggcatctgccaccatgcttgactaatttttgtgatttttttttggtagagaccaggggtttcactatgttgaccaagctggtcttggaactcctgggctcaagtgatcctcctgccttggcctcccaaaatgctgggattacaggcatgagccactgtgcctggctggatatgaaatttttttttttttttttttttgagacagggtttcgctcttgttgccagggctggagtgcaatggcgtgatcttggctcactgcaacctccgcctcccgggttcaagcaattctcctgcctcagcctcccaagtagctgggattacaggtgtctgccaccatgccaggctaatttttgtattttcagtagagacggggtttctccatgctggccaggctggtctcgaactcctgacctcaggtgatccacccgcctcagcctcccaaagtgctgggattacaggcaaaagccaacacacccggcctggatatgaatttataataccctacagtgcaacacaagaagatgcactcaaagcactgatgtgaggaagtacttgccccgtagcagctattcactctaccagtgtaaacaaactctaagctagggcaagacagcacagacacaagtatatactaaccaggggtttaatataaatacaaccagcatagaaagacccaaaactatacagaaaccaaaaccagaatgccatgtggtggaggcaaagggcagaatttctgacccctttggctcagctgcccttccccacaaataaaaaccaacaaagaggacaaatcaggacaataaagaagattcatgctaagctgtggcagaggggggaaggtatgatcgggtgggggtgggacaaggaacggccatggaagatcactgggtcaggttggaccctgggctgggagcgggagggcaaggcccctcaccacaacttaacccaaacctaagctgcccccaggtgccataggtccctgtcccagcagggaggctgatgggcctgggcccatgcccctccccacctttgggggtcagaaagtggccacccaggcctgctgggatggggcctgacacaggctctgcatgcccattcagggtgcctgtggagaaagaatggagtcactgtttaaccatggtacctgcctcagccccagcagaccacaggaggttggccccagactcactgagtgcctgcagcagccgtacagacacagcatccttggccacctcatgcccatcccggccatctagggtcagcacaacccagatgaggccgctgaagggcaccggatgcccaggaatcaccacctggtaccagaagcggtgccagccagcaggtcctatgcccaaacacttggtgaggaacacagggctgcccagcttcattcgttggcacagcaactgcagggtagcccgagccccttggaaccctaacttgtcccttgccaaagccaactggctgccctctggctgtggggaccgcaagaagggacccacaagctgctggcgaagtcgctgcttcaggtctggcttgagccactccacagccacctgctctccacagaggtgtgactgccctgtaggaaaaatgcaaagacaagggcaggtctaaaccctgggcccaagcctccaggtggtgagccctttggagctacacagtcctgttatttgtagccttcccatttcctggtagtgtgaccatgggtaagaaaagacaatgaagccttcagcctccattatttgcaaagggagtataacacactgctaccttacaagtttccttggagaagtactggttaattgcaggctttgtctgcctcataaccatcataatggctaatctttactgggaaaacttgctgtaagtcagtcagtgtgctaagtaccgtacacccattatgttacttaattctcataacagtctgaggaaacagattctatagtagtaaaaagctcagttggattcccttgagcaaatcaatttctctaacagtttcctcatagcttgagggtcctgtgcctattttgcggtgtgggggtgggggaaggttgagaattaagtcaggaggtaatgctcgggaagtgtcacaaatttaggtaagcggtggtggtagcaccattggaagttttaaaaatctgagatcaaatagtaaaaggttgcaaattctggcatgtttgactctaagatcttgtaactttaacagctatgctcagtataaagtgccgggcagaacgcgtttggccccaaccagcacccccgccccagcctaccttccaccagggctttttggccatggcagcggcccggtgcgagctgaatttgagcagagcgatctgcccgggcgccggtccggggctgggcagcagccgcgcctcctgcaagccgggacccagcggctgcagcgcgagcagcagcgcgctgcgggtcagattcggcggcaggccgtcaacgctcagctcacacttctcggtgctgcggcacacgagcagcgggcaggacggccgcagcggatggttgtgcagcgtggcgatggcggcctgcgcgccgcgcctcgagctgtagcgggcataggcgaagccgcggttcaggccgctgaaggtcatcatcaggcggaactcgtagaggcggcccacgcgctggaacagcgggataagctggtgctcgtacacgtcctgaggcagccgcccgatgaacacctctgacccagctggcggcgggctgcccacccagcctgggggtggcccgccatacttcctctgcccgttcacctgcaccaggcggatgcctgtctccctgacccacgcctccagcgccgccttgttctctggattcaccctctcacaccacagctcacaatcccgcttggactgcatggctctccagctggccccctcgtaccctctttataacttcctccccaccggcctctggaagcttccctacccctccaccccgcaagctctcattggctctgagcgcgaccccgcctcccaggggggtggaggtatccactgcacgtgcgccgcccgggcttcgctcagaccttcaggtgaaagctgcaaagtcgcgggtgcgtatgtacgggggctgcctcccgaggaggagctcccaagccgcgtagtcagatcgagccgcgtagtcagatcgagccgcgtagtcagatcgagccgcgtagtcagatcgagccgcgtagtcagatcgagccgcgtagtcagatcgagccgcgtagtcatatcg

SEQ ID NO: 374699 - DNA, 4455 bp, Homo sapiens
  misc_feature (1)..(1): n is a, c, g, or t
nagtgtgggtggttccgaggctgactaccctgcggcggcgcggctcgcagtccttctcagcatggaccgcacttgtgaggagaggcccgctgaggatgggagcgacgaggaggacccagactccatggaagccccaacccggatccgggacactccggaagacatcgtgctggaagctccggctagtgggctggcgttccatccggcccgtgacctactggctgcaggggacgtggacggggacgtgttcgtcttttcctactcttgccaagagggagaaaccaaggagctctggtcatcaggtcaccatctcaaggcctgccgagctgtggccttctctgaagatgggcagaagctcattactgtctccaaggacaaagccatccatgttctagatgtggagcagggccaactggaaagacgtgtttccaaggctcatggtgcccccatcaacagtcttctgctggtggatgagaatgttctggccactggggatgacacaggtggtatccgtctctgggaccagcggaaggagggccccttaatggatatgaggcaacatgaagagtacatcgcagacatggctctggatccagccaaaaagctgctgctgacagccagcggggatggctgccttggcatcttcaacattaagaggcgtcggtttgagctgctctcagaacctcagtctggggacctgacctctgtcactctcatgaaatgggggaagaaggtagcctgtggctccagtgaaggtaccatctacctcttcaattggaatggctttggggccacaagtgaccgctttgccctgagagctgaatctatcgactgcatggttccagtcaccgagagtctgctgtgtactggctccactgatggagtcatcagggctgtgaacatcctaccgaaccgagtggtgggcagtgtgggccagcacactggggagcctgtggaggagctggccctctcccactgtggccgcttcctggccagtagtggccatgaccagcgcctcaagttttgggacatggcccagctgcgagctgtggtggtggatgactaccgtcggcgcaaaaaaaagggaggggaagaaaaggaggagactggggatgacagtgactgaaggaatgaattgaatcttgagacgggtcctcaccaggcaagagtcttgcttattgggctgcatccccagagaggatatgaatttataataccctacagtgcaacacaagaagatgcactcaaagcactgatgtgaggaagtacttgccccgtagcagctattcactctaccagtgtaaacaaactctaagctagggcaagacagcacagacacaagtatatactaaccaggggtttaatataaatacaaccagcatagaaagacccaaaactatacagaaaccaaaaccagaatgccatgtggtggaggcaaagggcagaatttctgacccctttggctcagctgcccttccccacaaataaaaaccaacaaagaggacaaatcaggacaataaagaagattcatgctaagctgtggcagaggggggaaggtatgatcgggtgggggtgggacaaggaacggccatggaagatcactgggtcaggttggaccctgggctgggagcgggagggcaaggcccctcaccacaacttaacccaaacctaagctgcccccaggtgccataggtccctgtcccagcagggaggctgatgggcctgggcccatgcccctccccacctttgggggtcagaaagtggccacccaggcctgctgggatggggcctgacacaggctctgcatgcccattcagggtgcctgtggagaaagaatggagtcactgtttaaccatggtacctgcctcagccccagcagaccacaggaggttggccccagactcactgagtgcctgcagcagccgtacagacacagcatccttggccacctcatgcccatcccggccatctagggtcagcacaacccagatgaggccgctgaagggcaccggatgcccaggaatcaccacctggtaccagaagcggtgccagccagcaggtcctatgcccaaacacttggtgaggaacacagggctgcccagcttcattcgttggcacagcaactgcagggtagcccgagccccttggaaccctaacttgtcccttgccaaagccaactggctgccctctggctgtggggaccgcaagaagggacccacaagctgctggcgaagtcgctgcttcaggtctggcttgagccactccacagccacctgctctccacagaggtgtgactgccctgtaggaaaaatgcaaagacaagggcaggtctaaaccctgggcccaagcctccaggtggtgagccctttggagctacacagtcctgttatttgtagccttcccatttcctggtagtgtgaccatgggtaagaaaagacaatgaagccttcagcctccattatttgcaaagggagtataacacactgctaccttacaagtttccttggagaagtactggttaattgcaggctttgtctgcctcataaccatcataatggctaatctttactgggaaaacttgctgtaagtcagtcagtgtgctaagtaccgtacacccattatgttacttaattctcataacagtctgaggaaacagattctatagtagtaaaaagctcagttggattcccttgagcaaatcaatttctctaacagtttcctcatagcttgagggtcctgtgcctattttgcggtgtgggggtgggggaaggttgagaattaagtcaggaggtaatgctcgggaagtgtcacaaatttaggtaagcggtggtggtagcaccattggaagttttaaaaatctgagatcaaatagtaaaaggttgcaaattctggcatgtttgactctaagatcttgtaactttaacagctatgctcagtataaagtgccgggcagaacgcgtttggccccaaccagcacccccgccccagcctaccttccaccagggctttttggccatggcagcggcccggtgcgagctgaatttgagcagagcgatctgcccgggcgccggtccggggctgggcagcagccgcgcctcctgcaagccgggacccagcggctgcagcgcgagcagcagcgcgctgcgggtcagattcggcggcaggccgtcaacgctcagctcacacttctcggtgctgcggcacacgagcagcgggcaggacggccgcagcggatggttgtgcagcgtggcgatggcggcctgcgcgccgcgcctcgagctgtagcgggcataggcgaagccgcggttcaggccgctgaaggtcatcatcaggcggaactcgtagaggcggcccacgcgctggaacagcgggataagctggtgctcgtacacgtcctgaggcagccgcccgatgaacacctctgacccagctggcggcgggctgcccacccagcctgtgggaagagggtatgcaaggccaccgtcaggcgacgctttcgaattctgagcccacggacccagcgcgcgggggtgggaggcgatgtgaacaaaggtctgtgaaatgggtttacacccgtaccctgggtggttggcataattaggtgactgcgctaacaagggggctggcacagagtaggtacaccttgagattggccccctccctcgacggggcgggtggacgtggagccacagttcctcctttgctggggggtataaatccgggtagttcgcagtttctgacagtgaaggctcggagcagcccctcccccaaagggggctggtgtagccggacaggcggaggggctgggactaccgtacctgggggtggcccgccatacttcctctgcccgttcacctgcaccaggcggatgcctgtctccctgacccacgcctccagcgccgccttgttctctggattcaccctctcacaccacagctgagagggaaaggaaggttggaatggcggatcgccaagcgcgccccccacctctcctgtggtactggggtccctaaagccgacccccgctccggcggggctcgccggcccccaagtcgccagccgcttacctcacaatcccgcttggactgcatggctctccagctggccccctcgtaccctctttataacttcctccccaccggcctctggaagcttccctacccctccaccccgcaagctctcattggctctgagcgcgaccccgcctcccaggggggtggaggtatccactgcacgtgcgccgcccgggcttcgctcagaccttcaggtgaaagctgcaaagtcgcgggtgcgtatgtacgggggctgcctcccgaggaggagctcccaagccgcgtagtcagatcgagccgcgtagtcagatcgagccgcgtagtcagatcgagccgcgtagtcagatcgagccgcgtagtcagatcgagccgcgtagtcagatcgagccgcgtagtcatatcg

SEQ ID NO: 374700 - DNA, 522 bp, Homo sapiens
aacacaccctacatatttaaaaatcttcatatttacaaattaaactgagaggagaatgaaaaagccatgtgaaagactgctgaagttgataaaatgttcaaatgtttttcaactagagataggaaaatagcttacagtacaaaaccttcactttgttctaaggcccttttgttcattgttacaaactggtgtagttcacaggaagccaaagcttgatttccagtaagttcccaaacttctgttctcaacatttaacttagattttagatgatcatattccaaaattggaaagactgttgaagaggaaaacaaggaccattgattcacaatggcagcccagcatttatttattcattcaatcatccgtcaatcccaaacatctatagatgcctccgtgttccagacaccatgccagagctgagagtacaaagaatcacagaatattgtttaaagatgtttactgcagcataatttatgaaagtaaaaagttaatggaaaataaaaaaattgatgcaaccatca

SEQ ID NO: 374701 - DNA, 2199 bp, Homo sapiens
gcttctgagtccaattgatactgtattcttctaaaatggaagtttccttgatggctttgtccatgtcgctctcctccgacatactcagtggggcccccacagccgggagaggcggaggctgctcagcagccctgtccccgcgcggccgagggagcaaagggctcggcactcgggcccctgggcctcgtggcgacgggcagcagccgcccctcgggaccggtggggatgaggaccccggcgccggctctgcttcggcgggcggctctaggctggcggcagcagcagcggcggaggcggcggcccctggggacaggtctttgtgctgggccccacgcggccgcctcctagcctcatccccagctggggaggcaggctcctggggtagggcgaggcggggagggcctcgacccggggcgccgtgcaagggcctcgcggggccgccgcttagacctgggctcgccaggtcctaaagaagagcctgcgcctccgcctccgccgcctgcaccgccgcgaagccgaagccgaagccgaagcagagctcggcgccgctgctcccgccgccgcctcagcgccacacatcgccgggacacccgcgccgggcagccccgccggccgccctcacgcacgcgctgtgccccgcgggagctccaggccgcccctcctgccgcccagcttcgtgactccacggccccacgcgccccttgctgccttccgctggggtttccgagccgcccccgaaccgcgcacccgacttgcaggcgtccgcctgggcctccctaagacacgccgcatacaggacaggcccctgggccttccgcggcgatggcgctgcgctaatgacgtcataggcccggactcgcgtgagtgcgcgtgcgttggggcctcagcctttatctccactctgcggagattcacgcctggaaaacgctcttctgagaggatctgtggaggtcaacccaggagagagaagacaggactgaagcactgaaagggtcctgccgttaagggcgcaggattgtatagaatatataatagcagtagcagctctgtttacggagcattaaccttacgtggagttatttcctgcatttcctcctttcgtctttacaaggtagccgtttggcgtcgtgaggtatggatgttcccatccctaatttgcaaaataggtaactgaggctcaggagagctagactagtttgtgcacagccgagaagtggtcaagctagaatgggaccccaggtttgtgctccctactctccaccgataacctatcaaagggctttgcaagagcttttgactaatcgtctgtcaatggttcttcattcacgtattaattgcacatcagtatgtgccaaatctactagacattggagaaacagtaggaacaacacatggtaccggcacatggatctttcaggaaaacgaagtaggtaataaacaggaaaaagcccgagtctgatgctaagaagaacataaacaggatgctgagagattgggtctctccacattgccccggctgctctccaacccctgagttcaagtgattcacctcccttggcctcccaaagtactgggattacaggcgtgagccaccgtgcctggctgagaagatggatttaagacatattttggaggtaacattgtcaggacttcctgaaggattagatgtggaagggaaggataagaaacagaccaaggataactttcaaatgtatgcttaagcaactggatggataatgatgccattgagtgagtgaaaaacttgatggaagtggaagattcagagttcatttctatctaggttaatttgagacataccagagcataagttaagtaagtaattgaatattggagtggagacttatttgtctaccgaattattgttttctttgtcggacatacacctacactgcattcctcaaagtaaaatttaagtgtggctctgtgcctatgctctccccagcggaaagtgaccagaagaggtgtgcagtttccaggcctggcccatacagacctccaacaggtgctcccctgtgctgttactccttctgccaactggaagcagatggtgaccaggctctggagaaggcaaggcctgaagatgggagattcctaagtggaggagaactgtgccttactgacctaaatatccactcagtattgttatgtgagaataaataaacttgtgttgaccgttta

SEQ ID NO: 374702 - DNA, 2445 bp, Homo sapiens
gcttctgagtccaattgatactgtattcttctaaaatggaagtttccttgatggctttgtccatgtcgctctcctccgacatactcagtggggcccccacagccgggagaggcggaggctgctcagcagccctgtccccgcgcggccgagggagcaaagggctcggcactcgggcccctgggcctcgtggcgacgggcagcagccgcccctcgggaccggtggggatgaggaccccggcgccggctctgcttcggcgggcggctctaggctggcggcagcagcagcggcggaggcggcggcccctggggacaggtctttgtgctgggccccacgcggccgcctcctagcctcatccccagctggggaggcaggctcctggggtagggcgaggcggggagggcctcgacccggggcgccgtgcaagggcctcgcggggccgccgcttagacctgggctcgccaggtcctaaagaagagcctgcgcctccgcctccgccgcctgcaccgccgcgaagccgaagccgaagccgaagcagagctcggcgccgctgctcccgccgccgcctcagcgccacacatcgccgggacacccgcgccgggcagccccgccggccgccctcacgcacgcgctgtgccccgcgggagctccaggccgcccctcctgccgcccagcttcgtgactccacggccccacgcgccccttgctgccttccgctggggtttccgagccgcccccgaaccgcgcacccgacttgcaggcgtccgcctgggcctccctaagacacgccgcatacaggacaggcccctgggccttccgcggcgatggcgctgcgctaatgacgtcataggcccggactcgcgtgagtgcgcgtgcgttggggcctcagcctttatctccactctgcggagattcacgcctggaaaacgctcttctgagaggatctgtggaggtcaacccaggagagagaagacaggactgaagcactgaaagggtcctgccgttaagggcgcaggattgtatagaatatataatagcagtagcagctctgtttacggagcattaaccttacgtggagttatttcctgcatttcctcctttcgtctttacaaggtagccgtttggcgtcgtgaggtatggatgttcccatccctaatttgcaaaataggtaactgaggctcaggagagctagactagtttgtgcacagccgagaagtggtcaagctagaatgggaccccaggtttgtgctccctactctccaccgataacctatcaaagggctttgcaagagcttttgactaatcgtctgtcaatggttcttcattcacgtattaattgcacatcagtatgtgccaaatctactagacattggagaaacagtaggaacaacacatggtaccggcacatggatctttcaggaaaacgaagtaggtaataaacaggaaaaagcccgagtctgatgctaagaagaacataaacaggatgctgagagattgggtctctccacattgccccggctgctctccaacccctgagttcaagtgattcacctcccttggcctcccaaagtactgggattacaggcgtgagccaccgtgcctggctgagaagatggatttaagacatattttggaggtaacattgtcaggacttcctgaaggattagatgtggaagggaaggataagaaacagaccaaggataactttcaaatgtatgcttaagcaactggatggataatgatgccattgagtgagtgaaaaacttgatggaagtggaagattcagagttcatttctatctaggttaatttgagacataccagagcataagttaagtaagtaattgaatattggagtggagacttatttgtctaccgaattattgttttctttgtcggacatacacctacactgcattcctcaaagtaaaatttaagtgtggctctgtgcctatgctctccccagcggaaagtgaccagaagaggtgtgcagtttccaggcctggcccatacagacctccaacaggtgctcccctgtgctgttactccttctgccaactggaagcagatggtgaccaggctctggagaaggcaaggcctgaagatgggagattcctaagtggaggagaactgtgccttactgacctaaatatccactcagtattgttatgtgagaataaataaacttgtgttgaccgtttaacaacaccaaccaaacaacaaaaaaactccagaggccacaaaagccgaggagccgcgaacaacagggaccaggaaccaggggcccacgttgtcccagaccacgcgttccccggagaaccccaaggtttatctcgtgttccacaacggtggggaaaactatgccccagatctctcgcctaatatacagaagctccaacataagagtcccgtataagcgcccagcgttctacacccggcatattatga

SEQ ID NO: 374703 - DNA, 1979 bp, Homo sapiens
gcttctgagtccaattgatactgtattcttctaaaatggaagtttccttgatggctttgtccatgtcgctctcctccgacatactcagtggggcccccacagccgggagaggcggaggctgctcagcagccctgtccccgcgcggccgagggagcaaagggctcggcactcgggcccctgggcctcgtggcgacgggcagcagccgcccctcgggaccggtggggatgaggaccccggcgccggctctgcttcggcgggcggctctaggctggcggcagcagcagcggcggaggcggcggcccctggggacaggtctttgtgctgggccccacgcggccgcctcctagcctcatccccagctggggaggcaggctcctggggtagggcgaggcggggagggcctcgacccggggcgccgtgcaagggcctcgcggggccgccgcttagacctgggctcgccaggtcctaaagaagagcctgcgcctccgcctccgccgcctgcaccgccgcgaagccgaagccgaagccgaagcagagctcggcgccgctgctcccgccgccgcctcagcgccacacatcgccgggacacccgcgccgggcagccccgccggccgccctcacgcacgcgctgtgccccgcgggagctccaggccgcccctcctgccgcccagcttcgtgactccacggccccacgcgccccttgctgccttccgctggggtttccgagccgcccccgaaccgcgcacccgacttgcaggcgtccgcctgggcctccctaagacacgccgcatacaggacaggcccctgggccttccgcggcgatggcgctgcgctaatgacgtcataggcccggactcgcgtgagtgcgcgtgcgttggggcctcagcctttatctccactctgcggagattcacgcctggaaaacgctcttctgagaggatctgtggaggtcaacccaggagagagaagacaggactgaagcactgaaagggtcctgccgttaagggcgcaggattgtatagaatatataatagcagtagcagctctgtttacggagcattaaccttacgtggagttatttcctgcatttcctcctttcgtctttacaaggtagccgtttggcgtatgtgccaaatctactagacattggagaaacagtaggaacaacacatggtaccggcacatggatctttcaggaaaacgaagtaggtaataaacaggaaaaagcccgagtctgatgctaagaagaacataaacaggatgctgagagattgggtctctccacattgccccggctgctctccaacccctgagttcaagtgattcacctcccttggcctcccaaagtactgggattacaggcgtgagccaccgtgcctggctgagaagatggatttaagacatattttggaggtaacattgtcaggacttcctgaaggattagatgtggaagggaaggataagaaacagaccaaggataactttcaaatgtatgcttaagcaactggatggataatgatgccattgagtgagtgaaaaacttgatggaagtggaagattcagagttcatttctatctaggttaatttgagacataccagagcataagttaagtaagtaattgaatattggagtggagacttatttgtctaccgaattattgttttctttgtcggacatacacctacactgcattcctcaaagtaaaatttaagtgtggctctgtgcctatgctctccccagcggaaagtgaccagaagaggtgtgcagtttccaggcctggcccatacagacctccaacaggtgctcccctgtgctgttactccttctgccaactggaagcagatggtgaccaggctctggagaaggcaaggcctgaagatgggagattcctaagtggaggagaactgtgccttactgacctaaatatccactcagtattgttatgtgagaataaataaacttgtgttgaccgttta

SEQ ID NO: 374704 - DNA, 1725 bp, Homo sapiens
gcttctgagtccaattgatactgtattcttctaaaatggaagtttccttgatggctttgtccatgtcgctctcctccgacatactcagtggggcccccacagccgggagaggcggaggctgctcagcagccctgtccccgcgcggccgagggagcaaagggctcggcactcgggcccctgggcctcgtggcgacgggcagcagccgcccctcgggaccggtggggatgaggaccccggcgccggctctgcttcggcgggcggctctaggctggcggcagcagcagcggcggaggcggcggcccctggggacaggtctttgtgctgggccccacgcggccgcctcctagcctcatccccagctggggaggcaggctcctggggtagggcgaggcggggagggcctcgacccggggcgccgtgcaagggcctcgcggggccgccgcttagacctgggctcgccaggtcctaaagaagagcctgcgcctccgcctccgccgcctgcaccgccgcgaagccgaagccgaagccgaagcagagctcggcgccgctgctcccgccgccgcctcagcgccacacatcgccgggacacccgcgccgggcagccccgccggccgccctcacgcacgcgctgtgccccgcgggagctccaggccgcccctcctgccgcccagcttcgtgactccacggccccacgcgccccttgctgccttccgctggggtttccgagccgcccccgaaccgcgcacccgacttgcaggcgtccgcctgggcctccctaagacacgccgcatacaggacaggcccctgggccttccgcggcgatggcgctgcgctaatgacgtcataggcccggactcgcgtgagtgcgcgtgcgttggggcctcagcctttatctccactctgcggagattcacgcctggaaaacgctcttctgagaggatctgtggaggtcaacccaggagagagaagacaggactgaagcactgaaagggtcctgccgttaagggcgcaggattgtatagaatatataatagcagtagcagctctgtttacggagcattaaccttacgtggagttatttcctgcatttcctcctttcgtctttacaaggtagccgtttggcgtcgtgaggtatggatgttcccatccctaatttgcaaaataggtaactgaggctcaggagagctagactagtttgtgcacagccgagaagtggtcaagctagaatgggaccccaggtttgtgctccctactctccaccgataacctatcaaagggctttgcaagagcttttgactaatcgtctgtcaatggttcttcattcacgtattaattgcacatcagtatgtgccaaatctactagacattggagaaacagtaggaacaacacatggtaccggcacatggatctttcaggaaaacgaagtaggtaataaacaggaaaaagcccgagtctgatgctaagaagaacataaacaggatgctgagcggaaagtgaccagaagaggtgtgcagtttccaggcctggcccatacagacctccaacaggtgctcccctgtgctgttactccttctgccaactggaagcagatggtgaccaggctctggagaaggcaaggcctgaagatgggagattcctaagtggaggagaactgtgccttactgacctaaatatccactcagtattgttatgtgagaataaataaacttgtgttgaccgttta

SEQ ID NO: 374705 - DNA, 1259 bp, Homo sapiens
gcttctgagtccaattgatactgtattcttctaaaatggaagtttccttgatggctttgtccatgtcgctctcctccgacatactcagtggggcccccacagccgggagaggcggaggctgctcagcagccctgtccccgcgcggccgagggagcaaagggctcggcactcgggcccctgggcctcgtggcgacgggcagcagccgcccctcgggaccggtggggatgaggaccccggcgccggctctgcttcggcgggcggctctaggctggcggcagcagcagcggcggaggcggcggcccctggggacaggtctttgtgctgggccccacgcggccgcctcctagcctcatccccagctggggaggcaggctcctggggtagggcgaggcggggagggcctcgacccggggcgccgtgcaagggcctcgcggggccgccgcttagacctgggctcgccaggtcctaaagaagagcctgcgcctccgcctccgccgcctgcaccgccgcgaagccgaagccgaagccgaagcagagctcggcgccgctgctcccgccgccgcctcagcgccacacatcgccgggacacccgcgccgggcagccccgccggccgccctcacgcacgcgctgtgccccgcgggagctccaggccgcccctcctgccgcccagcttcgtgactccacggccccacgcgccccttgctgccttccgctggggtttccgagccgcccccgaaccgcgcacccgacttgcaggcgtccgcctgggcctccctaagacacgccgcatacaggacaggcccctgggccttccgcggcgatggcgctgcgctaatgacgtcataggcccggactcgcgtgagtgcgcgtgcgttggggcctcagcctttatctccactctgcggagattcacgcctggaaaacgctcttctgagaggatctgtggaggtcaacccaggagagagaagacaggactgaagcactgaaagggtcctgccgttaagggcgcaggattgtatagaatatataatagcagtagcagctctgtttacggagcattaaccttacgtggagttatttcctgcatttcctcctttcgtctttacaaggtagccgtttggcgataggttatcggtggagagtagggagcacaaacctggggtcccattctagcttgaccacttctcggctgtgcacaaactagtctagctctcctgagcctcagttacctattttgcaaattagggatgggaacat

SEQ ID NO: 374706 - DNA, 956 bp, Homo sapiens
  misc_feature (209)..(209): n is a, c, g, or t
  misc_feature (396)..(396): n is a, c, g, or t
tgcgacgcggtgggctgaagctgtggcgtcgcgcctggcccaaggctcttctgagcaccggatctgtgtgtgtcaagctgagtgcacaaatgaatgacgatcgacatgtaatacagcctgaaagacgaggtgccctggccggttaagaggcagcgatcggatgtgctatgtagaaatatatgtcattacctaggtagactcgtcttcgntggatagagcagagccgtctacttatcctcgtgtactggtgggaacgtaatttgcgcatgacaatctacccttcacctgtacgattctttatacgacagcgttagcgcgaatatggtcgatcgttgtagagatatggtatgattgctccattcccctaagtcttgcaatatgtcgtggtctgtgagnagcacattgagagcttctgctatattgagtgctcagccgataatgtggctcggacttaacttgtgtaaccccaggtttgtgctccctactctccaccgataacctatcaaagggctttgcaagagcttttgactaatcgtctgtcaatggttcttcattcacgtattaattgcacatcagtatgtgccaaatctactagacattggagaaacagtaggaacaacacatggtaccggcacatggatctttcaggaaaacgaagtaggtaataaacaggaaaaagcccgagtctgatgctaagaagaacataaacaggatgctgagcggaaagtgaccagaagaggtgtgcagtttccaggcctggcccatacagacctccaacaggtgctcccctgtgctgttactccttctgccaactggaagcagatggtgaccaggctctggagaaggcaaggcctgaagatgggagattcctaagtggaggagaactgtgccttactgacctaaatatccactcagtattgttatgtgagaataaataaacttgtgttgaccgttta

SEQ ID NO: 374707 - DNA, 1870 bp, Homo sapiens
gcttctgagtccaattgatactgtattcttctaaaatggaagtttccttgatggctttgtccatgtcgctctcctccgacatactcagtggggcccccacagccgggagaggcggaggctgctcagcagccctgtccccgcgcggccgagggagcaaagggctcggcactcgggcccctgggcctcgtggcgacgggcagcagccgcccctcgggaccggtggggatgaggaccccggcgccggctctgcttcggcgggcggctctaggctggcggcagcagcagcggcggaggcggcggcccctggggacaggtctttgtgctgggccccacgcggccgcctcctagcctcatccccagctggggaggcaggctcctggggtagggcgaggcggggagggcctcgacccggggcgccgtgcaagggcctcgcggggccgccgcttagacctgggctcgccaggtcctaaagaagagcctgcgcctccgcctccgccgcctgcaccgccgcgaagccgaagccgaagccgaagcagagctcggcgccgctgctcccgccgccgcctcagcgccacacatcgccgggacacccgcgccgggcagccccgccggccgccctcacgcacgcgctgtgccccgcgggagctccaggccgcccctcctgccgcccagcttcgtgactccacggccccacgcgccccttgctgccttccgctggggtttccgagccgcccccgaaccgcgcacccgacttgcaggcgtccgcctgggcctccctaagacacgccgcatacaggacaggcccctgggccttccgcggcgatggcgctgcgctaatgacgtcataggcccggactcgcgtgagtgcgcgtgcgttggggcctcagcctttatctccactctgcggagattcacgcctggaaaacgctcttctgagaggatctgtggaggtcaacccaggagagagaagacaggactgaagcactgaaagggtcctgccgttaagggcgcaggattgtatagaatatataatagcagtagcagctctgtttacggagcattaaccttacgtggagttatttcctgcatttcctcctttcgtctttacaaggtagccgtttggcgtcgtgaggtatggatgttcccatccctaatttgcaaaataggtaactgaggctcaggagagctagactagtttgtgcacagccgagaagtggtcaagctagaatgggaccccaggtttgtgctccctactctccaccgataacctatcaaagggctttgcaagagcttttgactaatcgtctgtcaatggttcttcattcacgtattaattgcacatcagtatgtgccaaatctactagacattggagaaacagtaggaacaacacatggtaccggcacatggatctttcaggaaaacgaagtaggtaataaacaggaaaaagcccgagtctgatgctaagaagaacataaacaggatgctgagagattgggtctctccacattgccccggctgctctccaacccctgagttcaagtgattcacctcccttggcctcccaaagtactgggattacaggcgtgagccaccgtgcctggctgagaagatggatttaagacatattttggagcggaaagtgaccagaagaggtgtgcagtttccaggcctggcccatacagacctccaacaggtgctcccctgtgctgttactccttctgccaactggaagcagatggtgaccaggctctggagaaggcaaggcctgaagatgggagattcctaagtggaggagaactgtgccttactgacctaaatatccactcagtattgttatgtgagaataaataaacttgtgttgaccgttta

SEQ ID NO: 374708 - DNA, 1824 bp, Homo sapiens
gcttctgagtccaattgatactgtattcttctaaaatggaagtttccttgatggctttgtccatgtcgctctcctccgacatactcagtggggcccccacagccgggagaggcggaggctgctcagcagccctgtccccgcgcggccgagggagcaaagggctcggcactcgggcccctgggcctcgtggcgacgggcagcagccgcccctcgggaccggtggggatgaggaccccggcgccggctctgcttcggcgggcggctctaggctggcggcagcagcagcggcggaggcggcggcccctggggacaggtctttgtgctgggccccacgcggccgcctcctagcctcatccccagctggggaggcaggctcctggggtagggcgaggcggggagggcctcgacccggggcgccgtgcaagggcctcgcggggccgccgcttagacctgggctcgccaggtcctaaagaagagcctgcgcctccgcctccgccgcctgcaccgccgcgaagccgaagccgaagccgaagcagagctcggcgccgctgctcccgccgccgcctcagcgccacacatcgccgggacacccgcgccgggcagccccgccggccgccctcacgcacgcgctgtgccccgcgggagctccaggccgcccctcctgccgcccagcttcgtgactccacggccccacgcgccccttgctgccttccgctggggtttccgagccgcccccgaaccgcgcacccgacttgcaggcgtccgcctgggcctccctaagacacgccgcatacaggacaggcccctgggccttccgcggcgatggcgctgcgctaatgacgtcataggcccggactcgcgtgagtgcgcgtgcgttggggcctcagcctttatctccactctgcggagattcacgcctggaaaacgctcttctgagaggatctgtggaggtcaacccaggagagagaagacaggactgaagcactgaaagggtcctgccgttaagggcgcaggattgtatagaatatataatagcagtagcagctctgtttacggagcattaaccttacgtggagttatttcctgcatttcctcctttcgtctttacaaggtagccgtttggcgtcgtgaggtatggatgttcccatccctaatttgcaaaataggtaactgaggctcaggagagctagactagtttgtgcacagccgagaagtggtcaagctagaatgggaccccaggtttgtgctccctactctccaccgataacctatcaaagggctttgcaagagcttttgactaatcgtctgtcaatggttcttcattcacgtattaattgcacatcagtatgtgccaaatctactagacattggagaaacagtaggaacaacacatggtaccggcacatggatctttcaggaaaacgaagtaggtaataaacaggaaaaagcccgagtctgatgctaagaagaacataaacaggatgctgagcggaaagtgaccagaagaggtgtgcagtttccaggcctggcccatacagacctccaacaggtgctcccctgtgctgttactccttctgccaactggaagcagatggtgaccaggctctggagaaggcaaggcctgaagatgggagattcctaagtggaggagaactgtgccttactgacctaaatatccactcagtattgttatgtgagaataaataaacttgtgttgaccgtttaaaaaaaaaaagaacaccacaacaaacaagggcggggccaaaaagttccccagaagagccccagtttagggtatacccgctttttgtggtacaggggccc

SEQ ID NO: 374709 - DNA, 2081 bp, Homo sapiens
gcttctgagtccaattgatactgtattcttctaaaatggaagtttccttgatggctttgtccatgtcgctctcctccgacatactcagtggggcccccacagccgggagaggcggaggctgctcagcagccctgtccccgcgcggccgagggagcaaagggctcggcactcgggcccctgggcctcgtggcgacgggcagcagccgcccctcgggaccggtggggatgaggaccccggcgccggctctgcttcggcgggcggctctaggctggcggcagcagcagcggcggaggcggcggcccctggggacaggtctttgtgctgggccccacgcggccgcctcctagcctcatccccagctggggaggcaggctcctggggtagggcgaggcggggagggcctcgacccggggcgccgtgcaagggcctcgcggggccgccgcttagacctgggctcgccaggtcctaaagaagagcctgcgcctccgcctccgccgcctgcaccgccgcgaagccgaagccgaagccgaagcagagctcggcgccgctgctcccgccgccgcctcagcgccacacatcgccgggacacccgcgccgggcagccccgccggccgccctcacgcacgcgctgtgccccgcgggagctccaggccgcccctcctgccgcccagcttcgtgactccacggccccacgcgccccttgctgccttccgctggggtttccgagccgcccccgaaccgcgcacccgacttgcaggcgtccgcctgggcctccctaagacacgccgcatacaggacaggcccctgggccttccgcggcgatggcgctgcgctaatgacgtcataggcccggactcgcgtgagtgcgcgtgcgttggggcctcagcctttatctccactctgcggagattcacgcctggaaaacgctcttctgagaggatctgtggaggtcaacccaggagagagaagacaggactgaagcactgaaagggtcctgccgttaagggcgcaggattgtatagaatatataatagcagtagcagctctgtttacggagcattaaccttacgtggagttatttcctgcatttcctcctttcgtctttacaaggtagccgtttggcgagattgggtctctccacattgccccggctgctctccaacccctgagttcaagtgattcacctcccttggcctcccaaagtactgggattacaggcgtgagccaccgtgcctggctgagaagatggatttaagacatattttggaggtaacattgtcaggacttcctgaaggattagatgtggaagggaaggataagaaacagaccaaggataactttcaaatgtatgcttaagcaactggatggataatgatgccattgagtgagtgaaaaacttgatggaagtggaagattcagagttcatttctatctaggttaatttgagacataccagagcataagttaagtaagtaattgaatattggagtggagacttatttgtctaccgaattattgttttctttgtcggacatacacctacactgcattcctcaaagtaaaatttaagtgtggctctgtgcctatgctctccccagcggaaagtgaccagaagaggtgtgcagtttccaggcctggcccatacagacctccaacaggtgctcccctgtgctgttactccttctgccaactggaagcagatggtgaccaggctctggagaaggcaaggcctgaagatgggagattcctaagtggaggagaactgtgccttactgacctaaatatccactcagtattgttatgtgagaataaataaacttgtgttgaccgtttaacaacaccaaccaaacaacaaaaaaactccagaggccacaaaagccgaggagccgcgaacaacagggaccaggaaccaggggcccacgttgtcccagaccacgcgttccccggagaaccccaaggtttatctcgtgttccacaacggtggggaaaactatgccccagatctctcgcctaatatacagaagctccaacataagagtcccgtataagcgcccagcgttctacacccggcatattatga

SEQ ID NO: 374710 - DNA, 1506 bp, Homo sapiens
gcttctgagtccaattgatactgtattcttctaaaatggaagtttccttgatggctttgtccatgtcgctctcctccgacatactcagtggggcccccacagccgggagaggcggaggctgctcagcagccctgtccccgcgcggccgagggagcaaagggctcggcactcgggcccctgggcctcgtggcgacgggcagcagccgcccctcgggaccggtggggatgaggaccccggcgccggctctgcttcggcgggcggctctaggctggcggcagcagcagcggcggaggcggcggcccctggggacaggtctttgtgctgggccccacgcggccgcctcctagcctcatccccagctggggaggcaggctcctggggtagggcgaggcggggagggcctcgacccggggcgccgtgcaagggcctcgcggggccgccgcttagacctgggctcgccaggtcctaaagaagagcctgcgcctccgcctccgccgcctgcaccgccgcgaagccgaagccgaagccgaagcagagctcggcgccgctgctcccgccgccgcctcagcgccacacatcgccgggacacccgcgccgggcagccccgccggccgccctcacgcacgcgctgtgccccgcgggagctccaggccgcccctcctgccgcccagcttcgtgactccacggccccacgcgccccttgctgccttccgctggggtttccgagccgcccccgaaccgcgcacccgacttgcaggcgtccgcctgggcctccctaagacacgccgcatacaggacaggcccctgggccttccgcggcgatggcgctgcgctaatgacgtcataggcccggactcgcgtgagtgcgcgtgcgttggggcctcagcctttatctccactctgcggagattcacgcctggaaaacgctcttctgagaggatctgtggaggtcaacccaggagagagaagacaggactgaagcactgaaagggtcctgccgttaagggcgcaggattgtatagaatatataatagcagtagcagctctgtttacggagcattaaccttacgtggagttatttcctgcatttcctcctttcgtctttacaaggtagccgtttggcgagattgggtctctccacattgccccggctgctctccaacccctgagttcaagtgattcacctcccttggcctcccaaagtactgggattacaggcgtgagccaccgtgcctggctgagaagatggatttaagacatattttggagcggaaagtgaccagaagaggtgtgcagtttccaggcctggcccatacagacctccaacaggtgctcccctgtgctgttactccttctgccaactggaagcagatggtgaccaggctctggagaaggcaaggcctgaagatgggagattcctaagtggaggagaactgtgccttactgacctaaatatccactcagtattgttatgtgagaataaataaacttgtgttgaccgttta

SEQ ID NO: 374711 - DNA, 507 bp, Homo sapiens
cagctgagcacaaatcacactcaccagggaagctggcgggagtcggacacacacctacacccacacccataacccttggccccagggctgtaaagcgcgatccacggaatccgggggaggccgaaacccggtagtcgatggaacctctcactgcaaaatctccctgctttttgaggctagagccgagaagaacgccacaggacaacgcgggggaagagggggcacctcccccttaccttgatggctttgtccatgtcgctctcctccgacatactcagtggggcccccacagccgggagaggcggaggctgctcagcagccctgtccccgcgcggccgagggagcaaagggctcggcactcgggcccctgggcctcgtggcgacgggcagcagccgcccctcgggaccggtggggatgaggaccccggcgccggctctgcttcggcgggcggctctaggctggcggcagcagcagcggcggaggcggcggcccctggggacaggtct

SEQ ID NO: 374712 - DNA, 496 bp, Homo sapiens
tgtataataggagttgaacatatggatcaggaactctagagagaaatccgagtttgagattggtatatgtgcatgtatctacatacatattacttttgggggagtggaagagtggagcagtaggcatgctccatatcagataagctcatccgaagaagtgtgttgagattaggaagagtaaaggaacagaaatggaaccctaaagaacaccatcacttgagaaatagacaaaaagaataagcagctagacatgtagaaaacaaaactaacaagtgtaccgaagccaagaactaaaaattcagagtcagtagcagtaagtgctacaaagtggtcatttcagattagcacttccaaacattttctgaatttagcaagagagtgattattagtaacctttgtgaaagcagactcagtagaggggtgcaggcaggaggcaggttgcagtgggtgagggaggcatggcagacagtgtgtgccaacaatggtctcagcctcg

SEQ ID NO: 374713 - DNA, 407 bp, Homo sapiens
taaattatattttatatttattagcacagaagaataatgagagccacattttagttcaacttcttgtgttagctttgatcaaagtcaggacaataatcattgagaaggtgcatgtctaataaaataggtaaatttaataattgtgagacttccagtttttatctccaaggttgtatttagagtggagaaacccaacaactcattacagtttcgctaagatttgaaaggttaaaaaaatttatttccttatgatagatgccatacttttccatatggagtagtcaggaaccatgaaattttttgcattcagtttttttaataacatttgttttctcacagtatggatctagttcataatgattcagattcttttgctgaaacacaattagcattgcagggagccttct

SEQ ID NO: 374714 - DNA, 965 bp, Homo sapiens
agcgggcgggctcctttctccgtcgccgctccaggacgcggcctcgggggagccctaccgggacggagccgcggggcctgcgacttcccccggagctggcctgagggattctcctgtccatggctgccaccaaaactgcgagttatgatgaacatttcaggccagaaaagttaagagaatggccggagcccgagtccgtttctttaatggaggtattagctagagaagacattgatgaagcagtatgtgcaatattatttaaagaaaattccattgtgaagagattggatatgtattttcagcatgtggatacttttaaggaaagaagaaaagagatgttacataaaaaatgggttgaaaatgttgcagagcctcttcagcagagaattatggaaaaagtaatttcatataaagagcttaaaatgaaacaagagaatgttgaatattatttacagcacagacataaaatggttacagtcccaccatttgttgatcctctgtttcaaagacagcaagaggtggatgaagagaggagaactggtcttcagtgtgagacaggaaaacgacattccataaaagaacttgaagaaatagagaaggccaggctgcatgccagctcgccctacttcactttcacttcacactgtgtgattccaaaagagtggcataaagcctctgcaagagccaggagtaaaacttacaaatacagtcctgaaaagctcatctgtgcagacaagaaacagaaaagaaaagagaaaaagacggccgacctaagtcaggctgcgtttgaaaggcagttcctttcctcaaagctcagccagaagaacaaagttggagagaattccctgttaaatccctcaagtgaaccccagtccctttgggaactggcaaagcgtgtgaagaatctcaccactcagaaattttccgaggttcgaaatggttaacgaatccatgttagaacatcc

SEQ ID NO: 374715 - DNA, 1138 bp, Homo sapiens
agcgggcgggctcctttctccgtcgccgctccaggacgcggcctcgggggagccctaccgggacggagccgcggggcctgcgacttcccccggagctggcctgagggattctcctgtccatggctgccaccaaaactgcgagttatgatgaacatttcaggccagaaaagttaagagaatggccggagcccgagtccgtttctttaatggaggtattagctagagaagacattgatgaagcagtatgtgcaatattatttaaagaaaattccattgtgaagagattggatatgtattttcagcatgtggatacttttaaggaaagaagaaaagagatgttacataaaaaatgggttgaaaatgttgcagagcctcttcagcagagaattatggaaaaagtaatttcatataaagagcttaaaatgaaacaagagaatgttgaatattatttacagcacagacataaaatggttacagtcccaccatttgttgatcctctgtttcaaagacagcaagaggtggatgaagagaggagaactggtcttcagtgtgagacaggaaaacgacattccataaaagaacttgaagaaatagagaaggccaggctgcatgccagctcgccctacttcactttcacttcacactgtgtgattccaaaagagtggcataaagcctctgcaagagccaggagtaaaacttacaaatacagtcctgaaaagctcatctgtgcagacaagaaacagaaaagaaaagagaaaaagacggccgacctaagtcaggctgcgtttgaaaggcagttcctttcctcaaagctcagccagaagaacaaagtgggtgaaagaaagggtctggttttaggaaccagacagcagagaccccgttcctgggctgctggggacagccaacagcacaggggtccccagcctgtgggaaaaagagtgatgacagctgaggtgctggggcagcacctggcctccctgcagaaggtggccaggcagggccacccttggtactgaagcttcgtggacttgacttggcagtgtctgtacagcagttaaaatactctaaacatattttcttcctccagaagtggaaataaattgcaagaaatacccaaatcacaggagttcttatttat

SEQ ID NO: 374716 - DNA, 842 bp, Homo sapiens
agcgggcgggctcctttctccgtcgccgctccaggacgcggcctcgggggagccctaccgggacggagccgcggggcctgcgacttcccccggagctggcctgaggtattagctagagaagacattgatgaagcagtatgtgcaatattatttaaagaaaattccattgtgaaggttacagtcccaccatttgttgatcctctgtttcaaagacagcaagaggtggatgaagagaggagaactggtcttcagtgtgagacaggaaaacgacattccataaaagaacttgaagaaatagagaaggccaggctgcatgccagctcgccctacttcactttcacttcacactgtgtgattccaaaagagtggcataaagcctctgcaagagccaggagtaaaacttacaaatacagtcctgaaaagctcatctgtgcagacaagaaacagaaaagaaaagagaaaaagacggccgacctaagtcaggctgcgtttgaaaggcagttcctttcctcaaagctcagccagaagaacaaagtgggtgaaagaaagggtctggttttaggaaccagacagcagagaccccgttcctgggctgctggggacagccaacagcacaggggtccccagcctgtgggaaaaagagtgatgacagctgaggtgctggggcagcacctggcctccctgcagaaggtggccaggcagggccacccttggtactgaagcttcgtggacttgacttggcagtgtctgtacagcagttaaaatactctaaacatattttcttcctccagaagtggaaataaattgcaagaaatacccaaatcacaggagttcttatttat

SEQ ID NO: 374717 - DNA, 819 bp, Homo sapiens
gtactcaaagagtctcatttctcttgtaggttacagtcccaccatttgttgatcctctgtttcaaagacagcaagaggtggatgaagagaggagaactggtcttcagtgtgagacaggtgctttgtgatcactgggcctcatttttttgagactgctaattgtccagtgatttctcactccttcaagagcaactggagttcttgaagagtgttgatttcgattttttatcttcctgtaggaaaacgacattccataaaagaacttgaagaaatagagaaggccaggctgcatgccagctcgccctacttcactttcacttcacactgtgtgattccaaaagagtggcataaagcctctgcaagagccaggagtaaaacttacaaatacagtcctgaaaagctcatctgtgcagacaagaaacagaaaagaaaagagaaaaagacggccgacctaagtcaggctgcgtttgaaaggcagttcctttcctcaaagctcagccagaagaacaaagtgggtgaaagaaagggtctggttttaggaaccagacagcagagaccccgttcctgggctgctggggacagccaacagcacaggggtccccagcctgtgggaaaaagagtgatgacagctgaggtgctggggcagcacctggcctccctgcagaaggtggccaggcagggccacccttggtactgaagcttcgtggacttgacttggcagtgtctgtacagcagttaaaatactctaaacatattttcttcctccagaagtggaaataaattgcaagaaatacccaaatcacaggagttcttatttat

SEQ ID NO: 374718 - DNA, 1153 bp, Homo sapiens
agcgggcgggctcctttctccgtcgccgctccaggacgcggcctcgggggagccctaccgggacggagccgcggggcctgcgacttcccccggagctggcctgagggattctcctgtccatggctgccaccaaaactgcgagttatgatgaacatttcaggccagaaaagttaagagaatggccggagcccgagtccgtttctttaatggaggtattagctagagaagacattgatgaagcagtatgtgcaatattatttaaagaaaattccattgtgaaggttacagtcccaccatttgttgatcctctgtttcaaagacagcaagaggtggatgaagagaggagaactggtcttcagtgtgagacaggaaaacgacattccataaaagaacttgaagaaatagagaaggccaggctgcatgccagctcgccctacttcactttcacttcacactgtgtgattccaaaagagtggcataaagcctctgcaagagccaggagtaaaacttacaaatacagtcctgaaaagctcatctgtgcagacaagaaacagaaaagaaaagagaaaaagacggccgacctaagtcaggctgcgtttgaaaggcagttcctttcctcaaagctcagccagaagaacaaagtgggtgaaagaaagggtctggtgagcagaggcctggggcggggctggcatgcagggctttgcagcacccacgagcagcacatactggttccagaatgagccaccgccacagccctccctgtcagacaggcacccaagggcggaggaggcatggcccaagaagaagggtgtgaagaggaggagggagaaatggcggtggcctcaggctcagcactgcagctctgacagggcccctcgggcggggaagccttgcatgaagaaactcagacaagtggtaaatgtgggacctggaccccactttccggagacatcctgtccttccgaggtgagggccaacctggccacaggggcttttccccctgagatttcttcagcgccttcgcccgggcctttgcccttctgccactttcctaccattttccacttactccatccaaactgcaccaaagatggtgttctccttagtccacacacaactggtgggaagtttttgaaatgaaatttataccaaa

SEQ ID NO: 374719 - DNA, 949 bp, Homo sapiens
agcgggcgggctcctttctccgtcgccgctccaggacgcggcctcgggggagccctaccgggacggagccgcggggcctgcgacttcccccggagctggcctgagggattctcctgtccatggctgccaccaaaactgcgagttatgatgaacatttcaggccagaaaagttaagagaatggccggagcccgagtccgtttctttaatggaggtattagctagagaagacattgatgaagcagtatgtgcaatattatttaaagaaaattccattgtgaaggttacagtcccaccatttgttgatcctctgtttcaaagacagcaagaggtggatgaagagaggagaactggtcttcagtgtgagacaggaaaacgacattccataaaagaacttgaagaaatagagaaggccaggctgcatgccagctcgccctacttcactttcacttcacactgtgtgattccaaaagagtggcataaagcctctgcaagagccaggagtaaaacttacaaatacagtcctgaaaagctcatctgtgcagacaagaaacagaaaagaaaagagaaaaagacggccgacctaagtcaggctgcgtttgaaaggcagttcctttcctcaaagctcagccagaagaacaaagtgggtgaaagaaagggtctggttttaggaaccagacagcagagaccccgttcctgggctgctggggacagccaacagcacaggggtccccagcctgtgggaaaaagagtgatgacagctgaggtgctggggcagcacctggcctccctgcagaaggtggccaggcagggccacccttggtactgaagcttcgtggacttgacttggcagtgtctgtacagcagttaaaatactctaaacatattttcttcctccagaagtggaaataaattgcaagaaatacccaaatcacaggagttcttatttat

SEQ ID NO: 374720 - DNA, 891 bp, Homo sapiens
agcgggcgggctcctttctccgtcgccgctccaggacgcggcctcgggggagccctaccgggacggagccgcggggcctgcgacttcccccggagctggcctgagggattctcctgtccatggctgccaccaaaactgcgagttatgatgaacatttcaggccagaaaagttaagagaatggccggagcccgagtccgtttctttaatggaggtattagctagagaagacattgatgaagcagtatgtgcaatattatttaaagaaaattccattgtgaagagattggatatgtattttcagcatgtggatacttttaaggaaagaagaaaagagatgttacataaaaaatgggttgaaaatgttgcagagcctcttcagcagagaattatggaaaaagtaatttcatataaagagcttaaaatgaaacaagagaatgttgaatattatttacagcacagacataaaatggttacagtcccaccatttgttgatcctctgtttcaaagacagcaagaggtggatgaagagaggagaactggtcttcagtgtgagacaggaaaacgacattccataaaagaacttgaagaaatagagaaggccaggctgcatgccagctcgccctacttcactttcacttcacactgtgtgattccaaaagagtggcataaagcctctgcaagagccaggagtaaaacttacaaatacaggtacagatgagcagaacaaacaaatatttgtttaacttgcaacttactttatttcctactgaagctcttgtaactagtcacacttttgtcttttagtagtttatagttttattattattatcatcacctttgtattatgaaatatatgtagaggacagaataaaacataaacagcttaccga

SEQ ID NO: 374721 - DNA, 260 bp, Homo sapiens
cagtttagtgtgcagcagtgggtgcaggcgggcgagtgggccccacaccttgtctcttaagtggcctgcacagtgcgaacagctggatctgacaacaagatgtcaccagggtgagagccagagtgagggacgtgctgtttccctctcccagcattgggagtatctgtgggttcagcactagcactcggggacagctcccagccgggttccttgcagctcctggacctgctatttcaaggtgagaatttcctcccccagag

SEQ ID NO: 374722 - DNA, 315 bp, Homo sapiens
gtgggtgagagttctgttgtcctgtggtctagccattgtctctgtatactcagtctctcaaaaacaattcaaaatttgatgtctgaaatactgaaaatgtttttagcatagtctgaaagcagaattcttccttcagcatgcagattgttaccttgaatcttgttattttctgtctatcctgtgatgtctatagcctgaaggaacacaatagagtaggtgggagcaattaattgtgtaacaagttaggaaacagctccacacaaaaaagataaatactttttaatagaaatgagatcaagttatgcaccctatagt

SEQ ID NO: 374723 - DNA, 890 bp, Homo sapiens
agcgggcgcgcgggcccccgccagtcaggtgggtgccaggccctggccgtggcgaaagagccggcggagccggagacccgctcccggagacgccgcctcgcgatccccgcgcgggcgggaccgggcggccggcatcatgaccctgtttcacttcgggaactgcttcgctcttgcctacttcccctacttcatcacctacaagtgcagcggcctgtccgagtacaacgccttctggaaatgcgtccaggctggagtcacctacctctttgtccaactctgcaagatgctgttcttggccactttctttcccacctgggaaggcggcatctatgacttcattggggagttcatgaaggccagcgtggatgtggcagacctgataggtctaaaccttgtcatgtcccggaatgccggcaagggagagtacaagatcatggttgctgccctgggctgggccactgctgagcttattatgtcccgctgcattcccctatgggtcggagcccggggcattgagtttgactggaagtacatccagatgagcatagactccaacatcagtctggtccattacatcgtcgcgtctgctcaggtctggatgataacacgctatgatctgtaccacaccttccggccagctgtcctcctgctgatgttcctcagtgtctacaaggcctttgttatggagaccttcgtccacctctgctcgctgggcagttgggcagctctactggcccgagcagtggtaacggggctgctggccctcagcactttggccctgtatgtcgccgttgtcaatgtgcactcctaggcttggtgtctcagacattgatgtaccttttccctgcctcgctccaggttttagtgaagtaaacagtatttggaaagtt

SEQ ID NO: 374724 - DNA, 904 bp, Homo sapiens
tcgggggagcaaacaatagcgtagtacgaggctcggtggtgaattcggccgaggccctggccgtggcgaaagagccggcggagccggagacccgctcccggagacgccgcctcgcgatccccgcgcgggcgggaccgggcggccggcatcatgaccctgtttcacttcgggaactgcttcgctcttgcctacttcccctacttcatcacctacaagtgcagcggcctgtccgagtacaacgccttctggaaatgcgtccaggctggagtcacctacctctttgtccaactctgcaagatgctgttcttggccactttctttcccacctgggaaggcggcatctatgacttcattggggagttcatgaaggccagcgtggatgtggcagacctgataggtctaaaccttgtcatgtcccggaatgccggcaagggagagtacaagatcatggttgctgccctgggctgggccactgctgagcttattatgtcccgctgcattcccctatgggtcggagcccggggcattgagtttgactggaagtacatccagatgagcatagactccaacatcagtctggtccattacatcgtcgcgtctgctcaggtctggatgataacacgctatgatctgtaccacaccttccggccagctgtcctcctgctgatgttcctcagtgtctacaaggcctttgttatggagaccttcgtccacctctgctcgctgggcagttgggcagctctactggcccgagcagtggtaacggggctgctggccctcagcactttggccctgtatgtcgccgttgtcaatgtgcactcctaggcttggtgtctcagacattgatgtaccttttccctgcctcgctccaggttttagtgaagtaaacagtatttggaaagtt

SEQ ID NO: 374725 - DNA, 1241 bp, Homo sapiens
agcgggcgcgcgggcccccgccagtcaggtgggtgccaggccctggccgtggcgaaagagccggcggagccggagacccgctcccggagacgccgcctcgcgatccccgcgcgggcgggaccgggcggccggcatcatgaccctgtttcacttcgggaactgcttcgctcttgcctacttcccctacttcatcacctacaagtgcagcggcctgtccgagtacaacgccttctggaaatgcgtccaggctggagtcacctacctctttgtccaactctgcaagatgctgttcttggccactttctttcccacctgggaaggcggcatctatgacttcattggggagttcatgaaggccagcgtggatgtggcagacctgataggtctaaaccttgtcatgtcccggaatgccggcaagggagagtacaagatcatggttgctgccctgggctgggccactgctgagcttattatgtcccgctgcattcccctatgggtcggagcccggggcattgagtttgactggaagtacatccagatgagcatagactccaacatcagtctggtccattacatcgtcgcgtctgctcaggtctggatgataacacgctatgatctgtaccacaccttccggccagctgtcctcctgctgatgttcctcagtgtctacaaggcctttgttatggagaccttcgtccacctctgctcgctgggcagttgggcagctctactggcccgagcagtggtaacggggctgctggccctcagcactttggccctgtatgtcgccgttgtcaatgtgcactcctaggcttggtgtctcagacattgatgtaccttttccctgcctcgctccaggttttagtgaagtaaacagtatttggaaagttaaaaaaaaaaaaaaagaggggcggggcggccctttttttttttttttttttttttttttttttgggggggcgaaaaccccctggttttttttgggaaaatttgtgggccaattccctttgtggggggcccccaagggggtgtgggcggtaaaaaagcgggggggggggagaaaatattgcgcgccccggggccccaaaaggttgtaaagctatttgggggaccaggcttggagtgagccctgtgcctctgtggtccccacatcggggctcaatatgccctcttgtccccctggggaactcttggaagttgttcccaagtggccccacacattctcttaagttgtgtcctcg

SEQ ID NO: 374726 - DNA, 859 bp, Homo sapiens
tcgggggagcaaacaatagcgtagtacgaggctcggtggtgaattcggccgaggccctggccgtggcgaaagagccggcggagccggagacccgctcccggcatcatgaccctgtttcacttcgggaactgcttcgctcttgcctacttcccctacttcatcacctacaagtgcagcggcctgtccgagtacaacgccttctggaaatgcgtccaggctggagtcacctacctctttgtccaactctgcaagatgctgttcttggccactttctttcccacctgggaaggcggcatctatgacttcattggggagttcatgaaggccagcgtggatgtggcagacctgataggtctaaaccttgtcatgtcccggaatgccggcaagggagagtacaagatcatggttgctgccctgggctgggccactgctgagcttattatgtcccgctgcattcccctatgggtcggagcccggggcattgagtttgactggaagtacatccagatgagcatagactccaacatcagtctggtccattacatcgtcgcgtctgctcaggtctggatgataacacgctatgatctgtaccacaccttccggccagctgtcctcctgctgatgttcctcagtgtctacaaggcctttgttatggagaccttcgtccacctctgctcgctgggcagttgggcagctctactggcccgagcagtggtaacggggctgctggccctcagcactttggccctgtatgtcgccgttgtcaatgtgcactcctaggcttggtgtctcagacattgatgtaccttttccctgcctcgctccaggttttagtgaagtaaacagtatttggaaagtt

SEQ ID NO: 374727 - DNA, 960 bp, Homo sapiens
  misc_feature (895)..(895): n is a, c, g, or t
  misc_feature (898)..(898): n is a, c, g, or t
agcgggcgcgcgggcccccgccagtcaggtgggtgccaggccctggccgtggcgaaagagccggcggagccggagacccgctcccggagacgccgcctcgcgatccccgcgcgggcgggaccgggcggccggcatcatgaccctgtttcacttcgggaactgcttcgctcttgcctacttcccctacttcatcacctacaagtgcagcggcctgtccgagtacaacgccttctggaaatgcgtccaggctggagtcacctacctctttgtccaactctgcaagatgctgttcttggccactttctttcccacctgggaaggcggcatctatgacttcattggggagttcatgaaggccagcgtggatgtggcagacctgataggtctaaaccttgtcatgtcccggaatgccggcaagggagagtacaagatcatggttgctgccctgggctgggccactgctgagcttattatgtcccgctgcattcccctatgggtcggagcccggggcattgagtttgactggaagtacatccagatgagcatagactccaacatcagtctggtccattacatcgtcgcgtctgctcaggtctggatgataacacgctatgatctgtaccacaccttccggccagctgtcctcctgctgatgttcctcagtgtctacaaggcctttgttatggagaccttcgtccacctctgctcgctgggcagttgggcagctctactggcccgagcagtggtaacggggctgctggccctcagcactttggccctgtatgtcgccgttgtcaatgtgcactcctaggcttggtgtctcagacattgatgtaccttttccctgcctcgctccaggttttagtgaagtaaacagtatttggaaagttcgttnaanaaccaacaagacacaaacacccgcggacatataaaggggcgaaaacagggttcaacacaggc

SEQ ID NO: 374728 - DNA, 1154 bp, Homo sapiens
  misc_feature (943)..(943): n is a, c, g, or t
  misc_feature (964)..(964): n is a, c, g, or t
  misc_feature (1029)..(1029): n is a, c, g, or t
  misc_feature (1074)..(1074): n is a, c, g, or t
  misc_feature (1094)..(1094): n is a, c, g, or t
  misc_feature (1113)..(1113): n is a, c, g, or t
  misc_feature (1126)..(1126): n is a, c, g, or t
  misc_feature (1148)..(1148): n is a, c, g, or t
agcgggcgcgcgggcccccgccagtcaggtgggtgccaggccctggccgtggcgaaagagccggcggagccggagacccgctcccggagacgccgcctcgcgatccccgcgcgggcgggaccgggcggccggcatcatgaccctgtttcacttcgggaactgcttcgctcttgcctacttcccctacttcatcacctacaagtgcagcggcctgtccgagtacaacgccttctggaaatgcgtccaggctggagtcacctacctctttgtccaactctgcaagatgctgttcttggccactttctttcccacctgggaaggcggcatctatgacttcattggggagttcatgaaggccagcgtggatgtggcagacctgataggtctaaaccttgtcatgtcccggaatgccggcaagggagagtacaagatcatggttgctgccctgggctgggccactgctgagcttattatgtcccgctgcattcccctatgggtcggagcccggggcattgagtttgactggaagtacatccagatgagcatagactccaacatcagtctggtccattacatcgtcgcgtctgctcaggtctggatgataacacgctatgatctgtaccacaccttccggccagctgtcctcctgctgatgttcctcagtgtctacaaggcctttgttatggagaccttcgtccacctctgctcgctgggcagttgggcagctctactggcccgagcagtggtaacggggctgctggccctcagcactttggccctgtatgtcgccgttggaacggcggcaagaggggccagaaccaccagaggagagccagggctaggagcaggaacaggatcagcagggcgatggccaggatggaaccgtcagaacagtgtgtggtggtgatgatgacagaactggagataaaagagaggccatcgntcatgctgacctggagtgcanctttcatgccaactcttttaagataggcgctggacacaagtaaataagtatctttcacagaaaanggcttctcattgagtgtgaccgagtcattgatcttgaagctgcanaaggaccctgtccacgttgngggcatgtcggaaagccgnttccttttacganaactttgaaatgactcttctgnacatat

SEQ ID NO: 374729 - DNA, 1040 bp, Homo sapiens
tcgggggagcaaacaatagcgtagtacgaggctcggtggtgaattcggccgaggccctggccgtggcgaaagagccggcggagccggagacccgctcccggagacgccgcctcgcgatccccgcgcgggcgggaccgggcggccggcatcatgaccctgtttcacttcgggaactgcttcgctcttgcctacttcccctacttcatcacctacaagtgcagcggcctgtccgagtacaacgccttctggaaatgcgtccaggctggagtcacctacctctttgtccaactctgcaagatgctgttcttggccactttctttcccacctgggaaggcggcatctatgacttcattggggagttcatgaaggccagcgtggatgtggcagacctgataggtctaaaccttgtcatgtcccggaatgccggcaagggagagtacaagatcatggttgctgccctgggctgggccactgctgagcttattatgtcccggtgcgtacagcagcctggagcccagacccctgagaagggacacctgggttccacgggggtgctggagggcaggggctcaaagcctggtgctgaaggtgtctgagtactggagaatcccatcctttgccttcctcagctgcattcccctatgggtcggagcccggggcattgagtttgactggaagtacatccagatgagcatagactccaacatcagtctggtccattacatcgtcgcgtctgctcaggtctggatgataacacgctatgatctgtaccacaccttccggccagctgtcctcctgctgatgttcctcagtgtctacaaggcctttgttatggagaccttcgtccacctctgctcgctgggcagttgggcagctctactggcccgagcagtggtaacggggctgctggccctcagcactttggccctgtatgtcgccgttgtcaatgtgcactcctaggcttggtgtctcagacattgatgtaccttttccctgcctcgctccaggttttagtgaagtaaacagtatttggaaagtt

SEQ ID NO: 374730 - DNA, 987 bp, Homo sapiens
tcgggggagcaaacaatagcgtagtacgaggctcggtggtgaattcggccgaggccctggccgtggcgaaagagccggcggagccggagacccgctcccggagacgccgcctcgcgatccccgcgcgggcgggaccgggcggccggcatcatgaccctgtttcacttcgggaactgcttcgctcttgcctacttcccctacttcatcacctacaagtgcagcggcctgtccgagtacaacgccttctggaaatgcgtccaggctggagtcacctacctctttgtccaactctgcaagatgctgttcttggccactttctttcccacctgggaaggcggcatctatgacttcattggggagttcatgaaggccagcgtggatgtggcagacctgataggtctaaaccttgtcatgtcccggaatgccggcaagggagagtacaagatcatggttgctgccctgggctgggccactgctgagcttattatgtcccgctgcattcccctatgggtcggagcccggggcattgagtttgactggaagtacatccagatgagcatagactccaacatcagtctggtccattacatcgtcgcgtctgctcaggtctggatgataacacgctatgatctgtaccacaccttccggccagctgtcctcctgctgatgttcctcagtgtctacaaggcctttgttatggagtgagttgggtggggtttagggctgggtccaaagtggggtgggttatctagtctcccttccttattgtgacattttcctgcaggaccttcgtccacctctgctcgctgggcagttgggcagctctactggcccgagcagtggtaacggggctgctggccctcagcactttggccctgtatgtcgccgttgtcaatgtgcactcctaggcttggtgtctcagacattgatgtaccttttccctgcctcgctccaggttttagtgaagtaaacagtatttggaaagtt

SEQ ID NO: 374731 - DNA, 1102 bp, Homo sapiens
cttacacttaggagatttcaacttaacttgaccgctctgaccaaaaaaaaaaaaaaaaaaaaaaccgctcccggagacgccgcctcgcgatccccgcgcgggcgggaccgggcggccggcatcatgaccctgtttcacttcgggaactgcttcgctcttgcctacttcccctacttcatcacctacaagtgcagcggcctgtccgagtacaacgccttctggaaatgcgtccaggctggagtcacctacctctttgtccaactctgcaagatgctgttcttggccactttctttcccacctgggaaggcggcatctatgacttcattggggagttcatgaaggccagcgtggatgtggcagacctgataggtctaaaccttgtcatgtcccggaatgccggcaagggagagtacaagatcatggttgctgccctgggctgggccactgctgagcttattatgtcccggtgcgtacagcagcctggagcccagacccctgagaagggacacctgggttccacgggggtgctggagggcaggggctcaaagcctggtgctgaaggtgtctgagtactggagaatcccatcctttgccttcctcagctgcattcccctatgggtcggagcccggggcattgagtttgactggaagtacatccagatgagcatagactccaacatcagtctggtaggcagtcgtgctctcccacatacacatttctgctggcggccatactcctccccaaggcctggccccgactttctgcctccctctaggtccattacatcgtcgcgtctgctcaggtctggatgataacacgctatgatctgtaccacaccttccggccagctgtcctcctgctgatgttcctcagtgtctacaaggcctttgttatggagaccttcgtccacctctgctcgctgggcagttgggcagctctactggcccgagcagtggtaacggggctgctggccctcagcactttggccctgtatgtcgccgttgtcaatgtgcactcctaggcttggtgtctcagacattgatgtaccttttccctgcctcgctccaggttttagtgaagtaaacagtatttggaaagtt

SEQ ID NO: 374732 - DNA, 741 bp, Homo sapiens
tcgggggagcaaacaatagcgtagtacgaggctcggtggtgaattcggccgaggccctggccgtggcgaaagagccggcggagccggagacccgctcccggagacgccgcctcgcgatccccgcgcgggcgggaccgggcggccggcatcatgaccctgtttcacttcgggaactgcttcgctcttgcctacttcccctacttcatcacctacaagtgcagcggcctgtgagtgcgggaagggcgcggggcggagagggcgcggggcccgggccgaccctcacctcccgcttctccaggtccgagtacaacgccttctggaaatgcgtccaggctggagtcacctacctctttgtccaactctgcaaggtgagggccaccgggaagccacgtgttctggcccccaggctctgcagacccaggggaacccgggcgcacggtgagctcatcccgcgcaacgcagacgccaccgaccggtgaggacacgacccaccgggacatcccagacacctatgaagagcgcgatcaggatacctagacgagggactgcgactcgaaaaagcaggcggcacgaaccagtgcaagcacagaagacccctagaacagcacaattggtagacgctagccaccactacggtaccagcctgaagcacaaccccgccgcaaaaacacacaaacacaaacacacgcaggtagaccatcacaatcaccgagggcaggaaacaagcgggggcaaagagag

SEQ ID NO: 374733 - DNA, 670 bp, Homo sapiens
tcgggggagcaaacaatagcgtagtacgaggctcggtggtgaattcggccgaggccctggccgtggcgaaagagccggcggagccggagacccgctcccggagacgccgcctcgcgatccccgcgcgggcgggaccgggcggccggcatcatgaccctgtttcacttcgggaactgcttcgctcttgcctacttcccctacttcatcacctacaagtgcagcggcctgtccgagtacaacgccttctggaaatgcgtccaggctggagtcacctacctctttgtccaactctgcaaggtgagggccaccgggaagccacgtgttctggcccccaggctctgcagacccaggggaacccgggcgcacggtgagctcatcccgcgcaacgcagacgccaccgaccggtgaggacacgacccaccgggacatcccagacacctatgaagagcgcgatcaggatacctagacgagggactgcgactcgaaaaagcaggcggcacgaaccagtgcaagcacagaagacccctagaacagcacaattggtagacgctagccaccactacggtaccagcctgaagcacaaccccgccgcaaaaacacacaaacacaaacacacgcaggtagaccatcacaatcaccgagggcaggaaacaagcgggggcaaagagag

SEQ ID NO: 374734 - DNA, 877 bp, Homo sapiens
cttacacttaggagatttcaacttaacttgaccgctctgaccaaaaaaaaaaaaaaaaaaaaaaccgctcccggagacgccgcctcgcgatccccgcgcgggcgggaccgggcggccggcatcatgaccctgtttcacttcgggaactgcttcgctcttgcctacttcccctacttcatcacctacaagtgcagcggcctgtccgagtacaacgccttctggaaatgcgtccaggctggagtcacctacctctttgtccaactctgcaagatgctgttcttggccactttctttcccacctgggaaggcggcatctatgacttcattggggagttcatgaaggccagcgtggatgtggcagacctgataggtctaaaccttgtcatgtcccggaatgccggcaagggagagtacaagatcatggttgctgccctgggctgggccactgctgagcttattatgtcccgctgcattcccctatgggtcggagcccggggcattgagtttgactggaagtacatccagatgagcatagactccaacatcagtctggtccattacatcgtcgcgtctgctcaggtctggatgataacacgctatgatctgtaccacaccttccggccagctgtcctcctgctgatgttcctcagtgtctacaaggcctttgttatggagaccttcgtccacctctgctcgctgggcagttgggcagctctactggcccgagcagtggtaacggggctgctggccctcagcactttggccctgtatgtcgccgttgtcaatgtgcactcctaggcttggtgtctcagacattgatgtaccttttccctgcctcgctccaggttttagtgaagtaaacagtatttggaaagtt

SEQ ID NO: 374735 - DNA, 975 bp, Homo sapiens
tcgggggagcaaacaatagcgtagtacgaggctcggtggtgaattcggccgaggccctggccgtggcgaaagagccggcggagccggagacccgctcccggagacgccgcctcgcgatccccgcgcgggcgggaccgggcggccggcatcatgaccctgtttcacttcgggaactgcttcgctcttgcctacttcccctacttcatcacctacaagtgcagcggcctgtgagtgcgggaagggcgcggggcggagagggcgcggggcccgggccgaccctcacctcccgcttctccaggtccgagtacaacgccttctggaaatgcgtccaggctggagtcacctacctctttgtccaactctgcaagatgctgttcttggccactttctttcccacctgggaaggcggcatctatgacttcattggggagttcatgaaggccagcgtggatgtggcagacctgataggtctaaaccttgtcatgtcccggaatgccggcaagggagagtacaagatcatggttgctgccctgggctgggccactgctgagcttattatgtcccgctgcattcccctatgggtcggagcccggggcattgagtttgactggaagtacatccagatgagcatagactccaacatcagtctggtccattacatcgtcgcgtctgctcaggtctggatgataacacgctatgatctgtaccacaccttccggccagctgtcctcctgctgatgttcctcagtgtctacaaggcctttgttatggagaccttcgtccacctctgctcgctgggcagttgggcagctctactggcccgagcagtggtaacggggctgctggccctcagcactttggccctgtatgtcgccgttgtcaatgtgcactcctaggcttggtgtctcagacattgatgtaccttttccctgcctcgctccaggttttagtgaagtaaacagtatttggaaagtt

SEQ ID NO: 374736 - DNA, 808 bp, Homo sapiens
atattttgtcaccaagaccctacttctaacctccctgttcttatgaattcgaacagcatacccccgattccgctacgaccaactcatacacgccaggtagacctaaccatcacctacaagtgcagcggcctgtccgagtacaacgccttctggaaatgcgtccaggctggagtcacctacctctttgtccaactctgcaagatgctgttcttggccactttctttcccacctgggaaggcggcatctatgacttcattggggagttcatgaaggccagcgtggatgtggcagacctgataggtctaaaccttgtcatgtcccggaatgccggcaagggagagtacaagatcatggttgctgccctgggctgggccactgctgagcttattatgtcccgctgcattcccctatgggtcggagcccggggcattgagtttgactggaagtacatccagatgagcatagactccaacatcagtctggtccattacatcgtcgcgtctgctcaggtctggatgataacacgctatgatctgtaccacaccttccggccagctgtcctcctgctgatgttcctcagtgtctacaaggcctttgttatggagaccttcgtccacctctgctcgctgggcagttgggcagctctactggcccgagcagtggtaacggggctgctggccctcagcactttggccctgtatgtcgccgttgtcaatgtgcactcctaggcttggtgtctcagacattgatgtaccttttccctgcctcgctccaggttttagtgaagtaaacagtatttggaaagtt

SEQ ID NO: 374737 - DNA, 1120 bp, Homo sapiens
agagaggatggactttaaagagggcacgacctgagaagagacctagaagcaacttttgcgtagcacttagtaaaactgagaaaacctcagtagtgtggttggctaacaggttttttttggtgcggttaagagtgatcactgattccgtacgtgctgctaacactgcccaaggagcagcaccttcagacctgactcagatgccctgtgatcacccagaactcaaacttccagccccctcggggacccggggacctatcctctatctccccgattcctgtaattttgccaccatctggtggttcctcttccagatgggcccccagaacctgtcctgccctcttcctacccacgaacttcccacaaatcccacgtggtttatcttgatcccctcaccttgaagtgacctctttctgctttctgttctcagatgctgttcttggccactttctttcccacctgggaaggcggcatctatgacttcattggggtgagaggggccagggaagggaagggagttcaggaatggggctccctgtccccctgtgcttacttaagcctcaacctgacccgcaggagttcatgaaggccagcgtggatgtggcagacctgataggtctaaaccttgtcatgtcccggaatgccggcaagggagagtacaagatcatggttgctgccctgggctgggccactgctgagcttattatgtcccgctgcattcccctatgggtcggagcccggggcattgagtttgactggaagtacatccagatgagcatagactccaacatcagtctggtccattacatcgtcgcgtctgctcaggtctggatgataacacgctatgatctgtaccacaccttccggccagctgtcctcctgctgatgttcctcagtgtctacaaggcctttgttatggagaccttcgtccacctctgctcgctgggcagttgggcagctctactggcccgagcagtggtaacggggctgctggccctcagcactttggccctgtatgtcgccgttgtcaatgtgcactcctaggcttggtgtctcagacattgatgtaccttttccctgcctcgctccaggttttagtgaagtaaacagtatttggaaagtt

SEQ ID NO: 374738 - DNA, 1256 bp, Homo sapiens
agagaggatggactttaaagagggcacgacctgagaagagacctagaagcaacttttgcgtagcacttagtaaaactgagaaaacctcagtagtgtggttggctaacaggttttttttggtgcggttaagagtgatcactgattccgtacgtgctgctaacactgcccaaggagcagcaccttcagacctgactcagatgccctgtgatcacccagaactcaaacttccagccccctcggggacccggggacctatcctctatctccccgattcctgtaattttgccaccatctggtggttcctcttccagatgggcccccagaacctgtcctgccctcttcctacccacgaacttcccacaaatcccacgtggtttatcttgatcccctcaccttgaagtgacctctttctgctttctgttctcagatgctgttcttggccactttctttcccacctgggaaggcggcatctatgacttcattggggtgagaggggccagggaagggaagggagttcaggaatggggctccctgtccccctgtgcttacttaagcctcaacctgacccgcaggagttcatgaaggccagcgtggatgtggcagacctgataggtctaaaccttgtcatgtcccggaatgccggcaagggagagtacaagatcatggttgctgccctgggctgggccactgctgagcttattatgtcccggtgcgtacagcagcctggagcccagacccctgagaagggacacctgggttccacgggggtgctggagggcaggggctcaaagcctggtgctgaaggtgtctgagtactggagaatcccatcctttgccttcctcagctgcattcccctatgggtcggagcccggggcattgagtttgactggaagtacatccagatgagcatagactccaacatcagtctggtccattacatcgtcgcgtctgctcaggtctggatgataacacgctatgatctgtaccacaccttccggccagctgtcctcctgctgatgttcctcagtgtctacaaggcctttgttatggagaccttcgtccacctctgctcgctgggcagttgggcagctctactggcccgagcagtggtaacggggctgctggccctcagcactttggccctgtatgtcgccgttgtcaatgtgcactcctaggcttggtgtctcagacattgatgtaccttttccctgcctcgctccaggttttagtgaagtaaacagtatttggaaagtt

SEQ ID NO: 374739 - DNA, 966 bp, Homo sapiens
cttacacttaggagatttcaacttaacttgaccgctctgaccaaaaaaaaaaaaaaaaaaaaaaccgctcccggagacgccgcctcgcgatccccgcgcgggcgggaccgggcggccggcatcatgaccctgtttcacttcgggaactgcttcgctcttgcctacttcccctacttcatcacctacaagtgcagcggcctgtccgagtacaacgccttctggaaatgcgtccaggctggagtcacctacctctttgtccaactctgcaagatgctgttcttggccactttctttcccacctgggaaggcggcatctatgacttcattggggagttcatgaaggccagcgtggatgtggcagacctgataggtctaaaccttgtcatgtcccggaatgccggcaagggagagtacaagatcatggttgctgccctgggctgggccactgctgagcttattatgtcccgctgcattcccctatgggtcggagcccggggcattgagtttgactggaagtacatccagatgagcatagactccaacatcagtctggtaggcagtcgtgctctcccacatacacatttctgctggcggccatactcctccccaaggcctggccccgactttctgcctccctctaggtccattacatcgtcgcgtctgctcaggtctggatgataacacgctatgatctgtaccacaccttccggccagctgtcctcctgctgatgttcctcagtgtctacaaggcctttgttatggagaccttcgtccacctctgctcgctgggcagttgggcagctctactggcccgagcagtggtaacggggctgctggccctcagcactttggccctgtatgtcgccgttgtcaatgtgcactcctaggcttggtgtctcagacattgatgtaccttttccctgcctcgctccaggttttagtgaagtaaacagtatttggaaagtt

SEQ ID NO: 374740 - DNA, 698 bp, Homo sapiens
tggttagctagggccacgagtcgtacccagcgggggagggcggaatcgatgactgcgtgggggagttcatgaaggccagcgtggatgtggcagacctgataggtctaaaccttgtcatgtcccggaatgccggcaagggagagtacaagatcatggttgctgccctgggctgggccactgctgagcttattatgtcccgctgcattcccctatgggtcggagcccggggcattgagtttgactggaagtacatccagatgagcatagactccaacatcagtctggtaggcagtcgtgctctcccacatacacatttctgctggcggccatactcctccccaaggcctggccccgactttctgcctccctctaggtccattacatcgtcgcgtctgctcaggtctggatgataacacgctatgatctgtaccacaccttccggccagctgtcctcctgctgatgttcctcagtgtctacaaggcctttgttatggagaccttcgtccacctctgctcgctgggcagttgggcagctctactggcccgagcagtggtaacggggctgctggccctcagcactttggccctgtatgtcgccgttgtcaatgtgcactcctaggcttggtgtctcagacattgatgtaccttttccctgcctcgctccaggttttagtgaagtaaacagtatttggaaagtt

SEQ ID NO: 374741 - DNA, 2115 bp, Homo sapiens
agcgtctgcgcctgcgcgcaagagaggcggggccagcgctcggcatggcggagccagatctggagtgcgagcagatccgtctgaagtgtattcgtaaggagggcttcttcacggtgcctccggaacacaggggtctagcgctctcgcccaggctggaatgcagtggcgtgatcacggctcagtgcatcgtcagcctcctgggctcaagtgatcttcctgcctcggcctcccaagtgctggaattacaggcgtgagccaccgcccccagcctggcctggcatttctttgagttcaggaagtgtgacaaggatttggacacccagaaataagcgtgtcgagaagagcacaagcagaggatccagcgctcggcatggcggagccagatctggagtgcgagcagatccgtctgaagtgtattcgtaaggagggcttcttcacggtgcctccggaacacaggctgggacgatgccggagtgtgaaggagtttgagaagctgaaccgcattggagagggtacctacggcattgtgtatcgggcccgggacacccagacagatgagattgtcgcactgaagaaggtgcggatggacaaggagaaggatggcatccccatcagcagcttgcgggagatcacgctgctgctccgcctgcgtcatccgaacatcgtggagctgaaggaggtggttgtggggaaccacctggagagcatcttcctggtgatgggttactgtgagcaggacctggccagcctcctggagaatatgccaacacccttctcggaggctcaggtcaagtgcatcgtgctgcaggtgctccggggcctccagtatctgcacaggaacttcattatccacagggacctgaaggtttccaacttgctcatgaccgacaagggttgtgtgaagacagcggatttcggcctggcccgggcctatggtgtcccagtaaagccaatgacccccaaggtggtcactctctggtaccgagcccctgaactgctgttgggaaccaccacgcagaccaccagcatcgacatgtgggctgtgggctgcatactggccgagctgctggcgcacaggcctcttctccccggcacttccgagatccaccagatcgacttgatcgtgcagctgctgggcacgcccagtgagaacatctggccgggcttttccaagctgccactggtcggccagtacagcctccggaagcagccctacaacaacctgaagcacaagttcccatggctgtcggaggccgggctgcgcctgctgcacttcctgttcatgtacgaccctaagaaaagggcgacggccggggactgcctggagagctcctatttcaaggagaagcccctaccctgtgagccggagctcatgccgacctttccccaccaccgcaacaagcgggccgccccagccacctccgagggccagagcaagcgctgtaaaccctgacggtgggcctggcacacgcctgtattcccacaccaggtcttccgatcagtggtgtctgtgaagggtgccgcgagccaggctgaccaggcgcccgggatccagctcatccccttggctgggaacatcctccactgacttcctcccactgtctgccctgaacccactgctgcccccagaaaaaggccgggtgacaccggggggctcccagcccgtgcaccctggaagggcaggtctggcggctccatccgtggctgcaggggtctcatgtggtcctcctcgctatgttggaaatgtgcaaccactgcttcttgggaggagtggtgggtgcagtccccccgctgtctttgagttgtggtggacgctggcctgggatgagagggcccagaagaccttcgtatcccctctcagtcgcccggggctgtcccgtgcatgggttggctgtggggaccccaggtgggcctggcaggactccagatgaggacaagagggacaaggtatggggtgggagccacaattgaggataccccgagactaccaggagagccctgggctggaggctgagctgcatccctgctccccacatggaggacccaacaggaggccgtggctctgatgctgagcgaagctataggctcttgttggataaaagcttttttaacaga

SEQ ID NO: 374742 - DNA, 2997 bp, Homo sapiens
agcgtctgcgcctgcgcgcaagagaggcggggccagcgctcggcatggcggagccagatctggagtgcgagcagatccgtctgaagtgtattcgtaaggagggcttcttcacggtgcctccggaacacaggctgggacgatgccggagtgtgaaggagtttgagaagctgaaccgcattggagagggtacctacggcattgtgtatcgggcccgggacacccagacagatgagattgtcgcactgaagaaggtgcggatggacaaggagaaggatggcatccccatcagcagcttgcgggagatcacgctgctgctccgcctgcgtcatccgaacatcgtggagctgaaggaggtggttgtggggaaccacctggagagcatcttcctggtgatgggttactgtgagcaggacctggccagcctcctggagaatatgccaacacccttctcggaggctcaggtcaagtgcatcgtgctgcaggtgctccggggcctccagtatctgcacaggaacttcattatccacagggacctgaaggtttccaacttgctcatgaccgacaagggttgtgtgaagacaggtgggtgcaacttgggccaggccctgtccctagatggcacttggtgacacacactcccctctctgctgcagcggatttcggcctggcccgggcctatggtgtcccagtaaagccaatgacccccaaggtggtcactctctggtaagtccttctgaagcatggtggcccctggggaccaggcctgtctggtggaggtctccttggggatgtcaggccgaagctgcaactggccttgggaatgttaagctacagggtctgtgcacactcagaaacgttgggtctaggacagcctccaggacacagcagggctgtgccacaaaatggtgagagacgggctcagtggcgtcaagggcctgcctagatcagacacacctcgccttgagagctggaaacaccgtggccgtgaaaccatctctggagggaaggctgcttcacggactgaaggacaggcagcttgcatgctttccctggttcttcctcctggatacttttaaccaaacagggtcatgcttagccagggctgaatatcagagttggtcagaatcaggtcaggaccccagtgtcgtgtactccccatctgagaacgggttggtagtggctggtgtggctgtgtgccgagggtccgtggtccctgcgactctcaggacaccgctgcacgtgacagctctcgcccccggcaaccattgctgtgtgtgccacctggatctgcagggcctggggcagagggtggtccgagttgggacaggtttccaggccaccacaggctctcggggaggctgtgtcctgtggaggcctgggctgggggagaggagccggccgtattgaggtgggtgcttctgtgtgtaggtaccgagcccctgaactgctgttgggaaccaccacgcagaccaccagcatcgacatgtggtgaggagatacggttaccgctcctggggcctcaggaagggctgggacaggagccgggtcacctggttcctgagctcagcctcaggggaggggcaggagtgcagtggggtctttgccagcctcccactcccagggaggtgggcctgagcctggaaacccaggaggaggtgtgagaacttagcttgctgttctcaggctgggagcacagaggtctggaggaggcacgcctgcccctgcacttgtcaccccgggaggcctgcggggcccaggaggggagccagtggtccctgcctgtccttcacagtgtccctgacccagcgtgcctcacactggcagggtcagcaaaggtctggctgcagtcaggtcctctgttcctcgcgctggcggggtcagcagacgtctggccgcagtgaggtccactgttctctgcagggctgtgggctgcatactggccgagctgctggcgcacaggcctcttctccccggcacttccgagatccaccagatcgacttgatcgtgcagctgctgggcacgcccagtgagaacatctggccgggcttttccaagctgccactggtcggccagtacagcctccggaagcagccctacaacaacctgaagcacaagttcccatggctgtcggaggccgggctgcgcctgctgcacttcctgttcatgtacgaccctaagaaaagggcgacggccggggactgcctggagagctcctatttcaaggagaagcccctaccctgtgagccggagctcatgccgacctttccccaccaccgcaacaagcgggccgccccagccacctccgagggccagagcaagcgctgtaaaccctgacggtgggcctggcacacgcctgtattcccacaccaggtcttccgatcagtggtgtctgtgaagggtgccgcgagccaggctgaccaggcgcccgggatccagctcatccccttggctgggaacatcctccactgacttcctcccactgtctgccctgaacccactgctgcccccagaaaaaggccgggtgacaccggggggctcccagcccgtgcaccctggaagggcaggtctggcggctccatccgtggctgcaggggtctcatgtggtcctcctcgctatgttggaaatgtgcaaccactgcttcttgggaggagtggtgggtgcagtccccccgctgtctttgagttgtggtggacgctggcctgggatgagagggcccagaagaccttcgtatcccctctcagtcgcccggggctgtcccgtgcatgggttggctgtggggaccccaggtgggcctggcaggactccagatgaggacaagagggacaaggtatggggtgggagccacaattgaggataccccgagactaccaggagagccctgggctggaggctgagctgcatccctgctccccacatggaggacccaacaggaggccgtggctctgatgctgagcgaagctataggctcttgttggataaaagcttttttaacaga

SEQ ID NO: 374743 - DNA, 2891 bp, Homo sapiens
cactggcaacacccttctgtttcagctgggacgatgccggagtgtgaaggagtttgagaagctgaaccgcattggagagggtacctacggcattgtgtatcgggcccgggacacccagacagatgagattgtcgcactgaagaaggtgcggatggacaaggagaaggatggcatccccatcagcagcttgcgggagatcacgctgctgctccgcctgcgtcatccgaacatcgtggagctgaaggaggtggttgtggggaaccacctggagagcatcttcctggtgatgggttactgtgagcaggacctggccagcctcctggagaatatgccaacacccttctcggaggctcaggtcaagtgcatcgtgctgcaggtgctccggggcctccagtatctgcacaggaacttcattatccacagggacctgaaggtttccaacttgctcatgaccgacaagggttgtgtgaagacaggtgggtgcaacttgggccaggccctgtccctagatggcacttggtgacacacactcccctctctgctgcagcggatttcggcctggcccgggcctatggtgtcccagtaaagccaatgacccccaaggtggtcactctctggtaagtccttctgaagcatggtggcccctggggaccaggcctgtctggtggaggtctccttggggatgtcaggccgaagctgcaactggccttgggaatgttaagctacagggtctgtgcacactcagaaacgttgggtctaggacagcctccaggacacagcagggctgtgccacaaaatggtgagagacgggctcagtggcgtcaagggcctgcctagatcagacacacctcgccttgagagctggaaacaccgtggccgtgaaaccatctctggagggaaggctgcttcacggactgaaggacaggcagcttgcatgctttccctggttcttcctcctggatacttttaaccaaacagggtcatgcttagccagggctgaatatcagagttggtcagaatcaggtcaggaccccagtgtcgtgtactccccatctgagaacgggttggtagtggctggtgtggctgtgtgccgagggtccgtggtccctgcgactctcaggacaccgctgcacgtgacagctctcgcccccggcaaccattgctgtgtgtgccacctggatctgcagggcctggggcagagggtggtccgagttgggacaggtttccaggccaccacaggctctcggggaggctgtgtcctgtggaggcctgggctgggggagaggagccggccgtattgaggtgggtgcttctgtgtgtaggtaccgagcccctgaactgctgttgggaaccaccacgcagaccaccagcatcgacatgtggtgaggagatacggttaccgctcctggggcctcaggaagggctgggacaggagccgggtcacctggttcctgagctcagcctcaggggaggggcaggagtgcagtggggtctttgccagcctcccactcccagggaggtgggcctgagcctggaaacccaggaggaggtgtgagaacttagcttgctgttctcaggctgggagcacagaggtctggaggaggcacgcctgcccctgcacttgtcaccccgggaggcctgcggggcccaggaggggagccagtggtccctgcctgtccttcacagtgtccctgacccagcgtgcctcacactggcagggtcagcaaaggtctggctgcagtcaggtcctctgttcctcgcgctggcggggtcagcagacgtctggccgcagtgaggtccactgttctctgcagggctgtgggctgcatactggccgagctgctggcgcacaggcctcttctccccggcacttccgagatccaccagatcgacttgatcgtgcagctgctgggcacgcccagtgagaacatctggccgggcttttccaagctgccactggtcggccagtacagcctccggaagcagccctacaacaacctgaagcacaagttcccatggctgtcggaggccgggctgcgcctgctgcacttcctgttcatgtacgaccctaagaaaagggcgacggccggggactgcctggagagctcctatttcaaggagaagcccctaccctgtgagccggagctcatgccgacctttccccaccaccgcaacaagcgggccgccccagccacctccgagggccagagcaagcgctgtaaaccctgacggtgggcctggcacacgcctgtattcccacaccaggtcttccgatcagtggtgtctgtgaagggtgccgcgagccaggctgaccaggcgcccgggatccagctcatccccttggctgggaacatcctccactgacttcctcccactgtctgccctgaacccactgctgcccccagaaaaaggccgggtgacaccggggggctcccagcccgtgcaccctggaagggcaggtctggcggctccatccgtggctgcaggggtctcatgtggtcctcctcgctatgttggaaatgtgcaaccactgcttcttgggaggagtggtgggtgcagtccccccgctgtctttgagttgtggtggacgctggcctgggatgagagggcccagaagaccttcgtatcccctctcagtcgcccggggctgtcccgtgcatgggttggctgtggggaccccaggtgggcctggcaggactccagatgaggacaagagggacaaggtatggggtgggagccacaattgaggataccccgagactaccaggagagccctgggctggaggctgagctgcatccctgctccccacatggaggacccaacaggaggccgtggctctgatgctgagcgaagctataggctcttgttggataaaagcttttttaacaga

SEQ ID NO: 374744 - DNA, 2924 bp, Homo sapiens
agcgtctgcgcctgcgcgcaagagaggcggggccagcgctcggcatggcggagccagatctggagtgcgagcagatccgtctgaagtgtattcgtaaggagggcttcttcacggtgcctccggaacacaggatcgggcccgggacacccagacagatgagattgtcgcactgaagaaggtgcggatggacaaggagaaggatggcatccccatcagcagcttgcgggagatcacgctgctgctccgcctgcgtcatccgaacatcgtggagctgaaggaggtggttgtggggaaccacctggagagcatcttcctggtgatgggttactgtgagcaggacctggccagcctcctggagaatatgccaacacccttctcggaggctcaggtcaagtgcatcgtgctgcaggtgctccggggcctccagtatctgcacaggaacttcattatccacagggacctgaaggtttccaacttgctcatgaccgacaagggttgtgtgaagacaggtgggtgcaacttgggccaggccctgtccctagatggcacttggtgacacacactcccctctctgctgcagcggatttcggcctggcccgggcctatggtgtcccagtaaagccaatgacccccaaggtggtcactctctggtaagtccttctgaagcatggtggcccctggggaccaggcctgtctggtggaggtctccttggggatgtcaggccgaagctgcaactggccttgggaatgttaagctacagggtctgtgcacactcagaaacgttgggtctaggacagcctccaggacacagcagggctgtgccacaaaatggtgagagacgggctcagtggcgtcaagggcctgcctagatcagacacacctcgccttgagagctggaaacaccgtggccgtgaaaccatctctggagggaaggctgcttcacggactgaaggacaggcagcttgcatgctttccctggttcttcctcctggatacttttaaccaaacagggtcatgcttagccagggctgaatatcagagttggtcagaatcaggtcaggaccccagtgtcgtgtactccccatctgagaacgggttggtagtggctggtgtggctgtgtgccgagggtccgtggtccctgcgactctcaggacaccgctgcacgtgacagctctcgcccccggcaaccattgctgtgtgtgccacctggatctgcagggcctggggcagagggtggtccgagttgggacaggtttccaggccaccacaggctctcggggaggctgtgtcctgtggaggcctgggctgggggagaggagccggccgtattgaggtgggtgcttctgtgtgtaggtaccgagcccctgaactgctgttgggaaccaccacgcagaccaccagcatcgacatgtggtgaggagatacggttaccgctcctggggcctcaggaagggctgggacaggagccgggtcacctggttcctgagctcagcctcaggggaggggcaggagtgcagtggggtctttgccagcctcccactcccagggaggtgggcctgagcctggaaacccaggaggaggtgtgagaacttagcttgctgttctcaggctgggagcacagaggtctggaggaggcacgcctgcccctgcacttgtcaccccgggaggcctgcggggcccaggaggggagccagtggtccctgcctgtccttcacagtgtccctgacccagcgtgcctcacactggcagggtcagcaaaggtctggctgcagtcaggtcctctgttcctcgcgctggcggggtcagcagacgtctggccgcagtgaggtccactgttctctgcagggctgtgggctgcatactggccgagctgctggcgcacaggcctcttctccccggcacttccgagatccaccagatcgacttgatcgtgcagctgctgggcacgcccagtgagaacatctggccgggcttttccaagctgccactggtcggccagtacagcctccggaagcagccctacaacaacctgaagcacaagttcccatggctgtcggaggccgggctgcgcctgctgcacttcctgttcatgtacgaccctaagaaaagggcgacggccggggactgcctggagagctcctatttcaaggagaagcccctaccctgtgagccggagctcatgccgacctttccccaccaccgcaacaagcgggccgccccagccacctccgagggccagagcaagcgctgtaaaccctgacggtgggcctggcacacgcctgtattcccacaccaggtcttccgatcagtggtgtctgtgaagggtgccgcgagccaggctgaccaggcgcccgggatccagctcatccccttggctgggaacatcctccactgacttcctcccactgtctgccctgaacccactgctgcccccagaaaaaggccgggtgacaccggggggctcccagcccgtgcaccctggaagggcaggtctggcggctccatccgtggctgcaggggtctcatgtggtcctcctcgctatgttggaaatgtgcaaccactgcttcttgggaggagtggtgggtgcagtccccccgctgtctttgagttgtggtggacgctggcctgggatgagagggcccagaagaccttcgtatcccctctcagtcgcccggggctgtcccgtgcatgggttggctgtggggaccccaggtgggcctggcaggactccagatgaggacaagagggacaaggtatggggtgggagccacaattgaggataccccgagactaccaggagagccctgggctggaggctgagctgcatccctgctccccacatggaggacccaacaggaggccgtggctctgatgctgagcgaagctataggctcttgttggataaaagcttttttaacaga

SEQ ID NO: 374745 - DNA, 3110 bp, Homo sapiens
ggatgcctcgcgcccgcggagagacgggcccgggacttgggaagagcaagctccgggatccagctcgggcgctgctgggttcagcgcccgagctgggctttgcaggctgagccgcgagccacttgtttgtggggagaatttacacccgcgacgagttcgagcttgaaggctcccgctgggcttgggctgcatggagcggggtccagcgctgcctggcggcttcacgcgaaccctgggcgcgtcccttgcggaggtgccggtgcctccctctgcagagaccaggagagagcctctgggcgttgggcggtgttgcccagatcgggcccgggacacccagacagatgagattgtcgcactgaagaaggtgcggatggacaaggagaaggatggcatccccatcagcagcttgcgggagatcacgctgctgctccgcctgcgtcatccgaacatcgtggagctgaaggaggtggttgtggggaaccacctggagagcatcttcctggtgatgggttactgtgagcaggacctggccagcctcctggagaatatgccaacacccttctcggaggctcaggtcaagtgcatcgtgctgcaggtgctccggggcctccagtatctgcacaggaacttcattatccacagggacctgaaggtttccaacttgctcatgaccgacaagggttgtgtgaagacaggtgggtgcaacttgggccaggccctgtccctagatggcacttggtgacacacactcccctctctgctgcagcggatttcggcctggcccgggcctatggtgtcccagtaaagccaatgacccccaaggtggtcactctctggtaagtccttctgaagcatggtggcccctggggaccaggcctgtctggtggaggtctccttggggatgtcaggccgaagctgcaactggccttgggaatgttaagctacagggtctgtgcacactcagaaacgttgggtctaggacagcctccaggacacagcagggctgtgccacaaaatggtgagagacgggctcagtggcgtcaagggcctgcctagatcagacacacctcgccttgagagctggaaacaccgtggccgtgaaaccatctctggagggaaggctgcttcacggactgaaggacaggcagcttgcatgctttccctggttcttcctcctggatacttttaaccaaacagggtcatgcttagccagggctgaatatcagagttggtcagaatcaggtcaggaccccagtgtcgtgtactccccatctgagaacgggttggtagtggctggtgtggctgtgtgccgagggtccgtggtccctgcgactctcaggacaccgctgcacgtgacagctctcgcccccggcaaccattgctgtgtgtgccacctggatctgcagggcctggggcagagggtggtccgagttgggacaggtttccaggccaccacaggctctcggggaggctgtgtcctgtggaggcctgggctgggggagaggagccggccgtattgaggtgggtgcttctgtgtgtaggtaccgagcccctgaactgctgttgggaaccaccacgcagaccaccagcatcgacatgtggtgaggagatacggttaccgctcctggggcctcaggaagggctgggacaggagccgggtcacctggttcctgagctcagcctcaggggaggggcaggagtgcagtggggtctttgccagcctcccactcccagggaggtgggcctgagcctggaaacccaggaggaggtgtgagaacttagcttgctgttctcaggctgggagcacagaggtctggaggaggcacgcctgcccctgcacttgtcaccccgggaggcctgcggggcccaggaggggagccagtggtccctgcctgtccttcacagtgtccctgacccagcgtgcctcacactggcagggtcagcaaaggtctggctgcagtcaggtcctctgttcctcgcgctggcggggtcagcagacgtctggccgcagtgaggtccactgttctctgcagggctgtgggctgcatactggccgagctgctggcgcacaggcctcttctccccggcacttccgagatccaccagatcgacttgatcgtgcagctgctgggcacgcccagtgagaacatctggccgggcttttccaagctgccactggtcggccagtacagcctccggaagcagccctacaacaacctgaagcacaagttcccatggctgtcggaggccgggctgcgcctgctgcacttcctgttcatgtacgaccctaagaaaagggcgacggccggggactgcctggagagctcctatttcaaggagaagcccctaccctgtgagccggagctcatgccgacctttccccaccaccgcaacaagcgggccgccccagccacctccgagggccagagcaagcgctgtaaaccctgacggtgggcctggcacacgcctgtattcccacaccaggtcttccgatcagtggtgtctgtgaagggtgccgcgagccaggctgaccaggcgcccgggatccagctcatccccttggctgggaacatcctccactgacttcctcccactgtctgccctgaacccactgctgcccccagaaaaaggccgggtgacaccggggggctcccagcccgtgcaccctggaagggcaggtctggcggctccatccgtggctgcaggggtctcatgtggtcctcctcgctatgttggaaatgtgcaaccactgcttcttgggaggagtggtgggtgcagtccccccgctgtctttgagttgtggtggacgctggcctgggatgagagggcccagaagaccttcgtatcccctctcagtcgcccggggctgtcccgtgcatgggttggctgtggggaccccaggtgggcctggcaggactccagatgaggacaagagggacaaggtatggggtgggagccacaattgaggataccccgagactaccaggagagccctgggctggaggctgagctgcatccctgctccccacatggaggacccaacaggaggccgtggctctgatgctgagcgaagctataggctcttgttggataaaagcttttttaacaga

SEQ ID NO: 374746 - DNA, 3067 bp, Homo sapiens
agcgtctgcgcctgcgcgcaagagaggcggggccagcgctcggcatggcggagccagatctggagtgcgagcagatccgtctgaagtgtattcctgggacgatgccggagtgtgaaggagtttgagaagctgaaccgcattggagagggtacctacggcattgtgtatcgggcccgggacacccagacagatgagattgtcgcactgaagaaggtgcggatggacaaggagaaggatggcatccccatcagcagcttgcgggagatcacgctgctgctccgcctgcgtcatccgaacatcgtggagctgaaggaggtggttgtggggaaccacctggagagcatcttcctggtgatgggttactgtgagcaggacctggccagcctcctggagaatatgccaacacccttctcggaggctcaggtcaagtgcatcgtgctgcaggtgctccggggcctccagtatctgcacaggaacttcattatccacagggacctgaaggtttccaacttgctcatgaccgacaagggttgtgtgaagacaggtgggtgcaacttgggccaggccctgtccctagatggcacttggtgacacacactcccctctctgctgcagcggatttcggcctggcccgggcctatggtgtcccagtaaagccaatgacccccaaggtggtcactctctggtaagtccttctgaagcatggtggcccctggggaccaggcctgtctggtggaggtctccttggggatgtcaggccgaagctgcaactggccttgggaatgttaagctacagggtctgtgcacactcagaaacgttgggtctaggacagcctccaggacacagcagggctgtgccacaaaatggtgagagacgggctcagtggcgtcaagggcctgcctagatcagacacacctcgccttgagagctggaaacaccgtggccgtgaaaccatctctggagggaaggctgcttcacggactgaaggacaggcagcttgcatgctttccctggttcttcctcctggatacttttaaccaaacagggtcatgcttagccagggctgaatatcagagttggtcagaatcaggtcaggaccccagtgtcgtgtactccccatctgagaacgggttggtagtggctggtgtggctgtgtgccgagggtccgtggtccctgcgactctcaggacaccgctgcacgtgacagctctcgcccccggcaaccattgctgtgtgtgccacctggatctgcagggcctggggcagagggtggtccgagttgggacaggtttccaggccaccacaggctctcggggaggctgtgtcctgtggaggcctgggctgggggagaggagccggccgtattgaggtgggtgcttctgtgtgtaggtaccgagcccctgaactgctgttgggaaccaccacgcagaccaccagcatcgacatgtggtgaggagatacggttaccgctcctggggcctcaggaagggctgggacaggagccgggtcacctggttcctgagctcagcctcaggggaggggcaggagtgcagtggggtctttgccagcctcccactcccagggaggtgggcctgagcctggaaacccaggaggaggtgtgagaacttagcttgctgttctcaggctgggagcacagaggtctggaggaggcacgcctgcccctgcacttgtcaccccgggaggcctgcggggcccaggaggggagccagtggtccctgcctgtccttcacagtgtccctgacccagcgtgcctcacactggcagggtcagcaaaggtctggctgcagtcaggtcctctgttcctcgcgctggcggggtcagcagacgtctggccgcagtgaggtccactgttctctgcagggctgtgggctgcatactggccgagctgctggcgcacaggcctcttctccccggcacttccgagatccaccagatcgacttgatcgtgcagctgctgggcacgcccagtgagaacatctggccggtgggcgtcctgggcagacccgcagcccccgcccgtgcccacgccctctgcgcccgcagcccccgcccgtgcccacgccctctgcgcctcagctcctgcctcccatagggcttttccaagctgccactggtcggccagtacagcctccggaagcagccctacaacaacctgaagcacaagttcccatggctgtcggaggccgggctgcgcctgctgcacttcctgttcatgtacgaccctaagaaaagggcgacggccggggactgcctggagagctcctatttcaaggagaagcccctaccctgtgagccggagctcatgccgacctttccccaccaccgcaacaagcgggccgccccagccacctccgagggccagagcaagcgctgtaaaccctgacggtgggcctggcacacgcctgtattcccacaccaggtcttccgatcagtggtgtctgtgaagggtgccgcgagccaggctgaccaggcgcccgggatccagctcatccccttggctgggaacatcctccactgacttcctcccactgtctgccctgaacccactgctgcccccagaaaaaggccgggtgacaccggggggctcccagcccgtgcaccctggaagggcaggtctggcggctccatccgtggctgcaggggtctcatgtggtcctcctcgctatgttggaaatgtgcaaccactgcttcttgggaggagtggtgggtgcagtccccccgctgtctttgagttgtggtggacgctggcctgggatgagagggcccagaagaccttcgtatcccctctcagtcgcccggggctgtcccgtgcatgggttggctgtggggaccccaggtgggcctggcaggactccagatgaggacaagagggacaaggtatggggtgggagccacaattgaggataccccgagactaccaggagagccctgggctggaggctgagctgcatccctgctccccacatggaggacccaacaggaggccgtggctctgatgctgagcgaagctataggctcttgttggataaaagcttttttaacaga

SEQ ID NO: 374747 - DNA, 2221 bp, Homo sapiens
agcgtctgcgcctgcgcgcaagagaggcggggccagcgctcggcatggcggagccagatctggagtgcgagcagatccgtctgaagtgtattcgtaaggagggcttcttcacggtgcctccggaacacaggctgggacgatgccggagtgtgaaggagtttgagaagctgaaccgcattggagagggtacctacggcattgtgtatcgggcccgggacacccagacagatgagattgtcgcactgaagaaggtgcggatggacaaggagaaggatggcatccccatcagcagcttgcgggagatcacgctgctgctccgcctgcgtcatccgaacatcgtggagctgaaggaggtggttgtggggaaccacctggagagcatcttcctggtgatgggttactgtgagcaggacctggccagcctcctggagaatatgccaacacccttctcggaggctcaggtcaagtgcatcgtgctgcaggtgctccggggcctccagtatctgcacaggaacttcattatccacagggacctgaaggtttccaacttgctcatgaccgacaagggttgtgtgaagacagcggatttcggcctggcccgggcctatggtgtcccagtaaagccaatgacccccaaggtggtcactctctggtaccgagcccctgaactgctgttgggaaccaccacgcagaccaccagcatcgacatgtggtgaggagatacggttaccgctcctggggcctcaggaagggctgggacaggagccgggtcacctggttcctgagctcagcctcaggggaggggcaggagtgcagtggggtctttgccagcctcccactcccagggaggtgggcctgagcctggaaacccaggaggaggtgtgagaacttagcttgctgttctcaggctgggagcacagaggtctggaggaggcacgcctgcccctgcacttgtcaccccgggaggcctgcggggcccaggaggggagccagtggtccctgcctgtccttcacagtgtccctgacccagcgtgcctcacactggcagggtcagcaaaggtctggctgcagtcaggtcctctgttcctcgcgctggcggggtcagcagacgtctggccgcagtgaggtccactgttctctgcagggctgtgggctgcatactggccgagctgctggcgcacaggcctcttctccccggcacttccgagatccaccagatcgacttgatcgtgcagctgctgggcacgcccagtgagaacatctggccgggcttttccaagctgccactggtcggccagtacagcctccggaagcagccctacaacaacctgaagcacaagttcccatggctgtcggaggccgggctgcgcctgctgcacttcctgttcatgtacgaccctaagaaaagggcgacggccggggactgcctggagagctcctatttcaaggagaagcccctaccctgtgagccggagctcatgccgacctttccccaccaccgcaacaagcgggccgccccagccacctccgagggccagagcaagcgctgtaaaccctgacggtgggcctggcacacgcctgtattcccacaccaggtcttccgatcagtggtgtctgtgaagggtgccgcgagccaggctgaccaggcgcccgggatccagctcatccccttggctgggaacatcctccactgacttcctcccactgtctgccctgaacccactgctgcccccagaaaaaggccgggtgacaccggggggctcccagcccgtgcaccctggaagggcaggtctggcggctccatccgtggctgcaggggtctcatgtggtcctcctcgctatgttggaaatgtgcaaccactgcttcttgggaggagtggtgggtgcagtccccccgctgtctttgagttgtggtggacgctggcctgggatgagagggcccagaagaccttcgtatcccctctcagtcgcccggggctgtcccgtgcatgggttggctgtggggaccccaggtgggcctggcaggactccagatgaggacaagagggacaaggtatggggtgggagccacaattgaggataccccgagactaccaggagagccctgggctggaggctgagctgcatccctgctccccacatggaggacccaacaggaggccgtggctctgatgctgagcgaagctataggctcttgttggataaaagcttttttaacaga

SEQ ID NO: 374748 - DNA, 1617 bp, Homo sapiens
agcgtctgcgcctgcgcgcaagagaggcggggccagcgctcggcatggcggagccagatctggagtgcgagcagatccgtctgaagtgtattcctgggacgatgccggagtgtgaaggagtttgagaagctgaaccgcattggagagggtacctacggcattgtgtatcgggcccgggacacccagacagatgagattgtcgcactgaagaaggtgcggatggacaaggagaaggatggcatccccatcagcagcttgcgggagatcacgctgctgctccgcctgcgtcatccgaacatcgtggagctgaaggaggtggttgtggggaaccacctggagagcatcttcctggtgatgggttactgtgagcaggacctggccagcctcctggagaatatgccaacacccttctcggaggctcaggtcaagtgcatcgtgctgcaggtgctccggggcctccagtatctgcacaggaacttcattatccacagggacctgaaggtttccaacttgctcatgaccgacaagggttgtgtgaagacagcggatttcggcctggcccgggcctatggtgtcccagtaaagccaatgacccccaaggtggtcactctctggtaccgagcccctgaactgctgttgggaaccaccacgcagaccaccagcatcgacatgtgggctgtgggctgcatactggccgagctgctggcgcacaggcctcttctccccggcacttccgagatccaccagatcgacttgatcgtgcagctgctgggcacgcccagtgagaacatctggccgggcttttccaagctgccactggtcggccagtacagcctccggaagcagccctacaacaacctgaagcacaagttcccatggctgtcggaggccgggctgcgcctgctgcacttcctgttcatgtacgaccctaagaaaagggcgacggccggggactgcctggagagctcctatttcaaggagaagcccctacgtcttccgatcagtggtgtctgtgaagggtgccgcgagccaggctgaccaggcgcccgggatccagctcatccccttggctgggaacatcctccactgacttcctcccactgtctgccctgaacccactgctgcccccagaaaaaggccgggtgacaccggggggctcccagcccgtgcaccctggaagggcaggtctggcggctccatccgtggctgcaggggtctcatgtggtcctcctcgctatgttggaaatgtgcaaccactgcttcttgggaggagtggtgggtgcagtccccccgctgtctttgagttgtggtggacgctggcctgggatgagagggcccagaagaccttcgtatcccctctcagtcgcccggggctgtcccgtgcatgggttggctgtggggaccccaggtgggcctggcaggactccagatgaggacaagagggacaaggtatggggtgggagccacaattgaggataccccgagactaccaggagagccctgggctggaggctgagctgcatccctgctccccacatggaggacccaacaggaggccgtggctctgatgctgagcgaagctataggctcttgttggataaaagcttttttaacaga

SEQ ID NO: 374749 - DNA, 1716 bp, Homo sapiens
agcgtctgcgcctgcgcgcaagagaggcggggccagcgctcggcatggcggagccagatctggagtgcgagcagatccgtctgaagtgtattcgtaaggagggcttcttcacggtgcctccggaacacaggatcgggcccgggacacccagacagatgagattgtcgcactgaagaaggtgcggatggacaaggagaaggatggcatccccatcagcagcttgcgggagatcacgctgctgctccgcctgcgtcatccgaacatcgtggagctgaaggaggtggttgtggggaaccacctggagagcatcttcctggtgatgggttactgtgagcaggacctggccagcctcctggagaatatgccaacacccttctcggaggctcaggtcaagtgcatcgtgctgcaggtgctccggggcctccagtatctgcacaggaacttcattatccacagggacctgaaggtttccaacttgctcatgaccgacaagggttgtgtgaagacagcggatttcggcctggcccgggcctatggtgtcccagtaaagccaatgacccccaaggtggtcactctctggtaccgagcccctgaactgctgttgggaaccaccacgcagaccaccagcatcgacatgtgggctgtgggctgcatactggccgagctgctggcgcacaggcctcttctccccggcacttccgagatccaccagatcgacttgatcgtgcagctgctgggcacgcccagtgagaacatctggccgggcttttccaagctgccactggtcggccagtacagcctccggaagcagccctacaacaacctgaagcacaagttcccatggctgtcggaggccgggctgcgcctgctgcacttcctgttcatgtacgaccctaagaaaagggcgacggccggggactgcctggagagctcctatttcaaggagaagcccctaccctgtgagccggagctcatgccgacctttccccaccaccgcaacaagcgggccgccccagccacctccgagggccagagcaagcgctgtaaaccctgacggtgggcctggcacacgcctgtattcccacaccaggtcttccgatcagtggtgtctgtgaagggtgccgcgagccaggctgaccaggcgcccgggatccagctcatccccttggctgggaacatcctccactgacttcctcccactgtctgccctgaacccactgctgcccccagaaaaaggccgggtgacaccggggggctcccagcccgtgcaccctggaagggcaggtctggcggctccatccgtggctgcaggggtctcatgtggtcctcctcgctatgttggaaatgtgcaaccactgcttcttgggaggagtggtgggtgcagtccccccgctgtctttgagttgtggtggacgctggcctgggatgagagggcccagaagaccttcgtatcccctctcagtcgcccggggctgtcccgtgcatgggttggctgtggggaccccaggtgggcctggcaggactccagatgaggacaagagggacaaggtatggggtgggagccacaattgaggataccccgagactaccaggagagccctgggctggaggctgagctgcatccctgctccccacatggaggacccaacaggaggccgtggctctgatgctgagcgaagctataggctcttgttggataaaagcttttttaacaga

SEQ ID NO: 374750 - DNA, 2393 bp, Homo sapiens
agcgtctgcgcctgcgcgcaagagaggcggggccagcgctcggcatggcggagccagatctggagtgcgagcagatccgtctgaagtgtattcctgggacgatgccggagtgtgaaggagtttgagaagctgaaccgcattggagagggtacctacggcattgtgtatcgggcccgggacacccagacagatgagattgtcgcactgaagaaggtgcggatggacaaggagaaggatggcatccccatcagcagcttgcgggagatcacgctgctgctccgcctgcgtcatccgaacatcgtggagctgaaggaggtggttgtggggaaccacctggagagcatcttcctggtgatgggttactgtgagcaggacctggccagcctcctggagaatatgccaacacccttctcggaggctcaggtcaagtgcatcgtgctgcaggtgctccggggcctccagtatctgcacaggaacttcattatccacagggacctgaaggtttccaacttgctcatgaccgacaagggttgtgtgaagacaggtgggtgcaacttgggccaggccctgtccctagatggcacttggtgacacacactcccctctctgctgcagcggatttcggcctggcccgggcctatggtgtcccagtaaagccaatgacccccaaggtggtcactctctggtaagtccttctgaagcatggtggcccctggggaccaggcctgtctggtggaggtctccttggggatgtcaggccgaagctgcaactggccttgggaatgttaagctacagggtctgtgcacactcagaaacgttgggtctaggacagcctccaggacacagcagggctgtgccacaaaatggtgagagacgggctcagtggcgtcaagggcctgcctagatcagacacacctcgccttgagagctggaaacaccgtggccgtgaaaccatctctggagggaaggctgcttcacggactgaaggacaggcagcttgcatgctttccctggttcttcctcctggatacttttaaccaaacagggtcatgcttagccagggctgaatatcagagttggtcagaatcaggtcaggaccccagtgtcgtgtactccccatctgagaacgggttggtagtggctggtgtggctgtgtgccgagggtccgtggtccctgcgactctcaggacaccgctgcacgtgacagctctcgcccccggcaaccattgctgtgtgtgccacctggatctgcagggcctggggcagagggtggtccgagttgggacaggtttccaggccaccacaggctctcggggaggctgtgtcctgtggaggcctgggctgggggagaggagccggccgtattgaggtgggtgcttctgtgtgtaggtaccgagcccctgaactgctgttgggaaccaccacgcagaccaccagcatcgacatgtgggctgtgggctgcatactggccgagctgctggcgcacaggcctcttctccccggcacttccgagatccaccagatcgacttgatcgtgcagctgctgggcacgcccagtgagaacatctggccgggcttttccaagctgccactggtcggccagtacagcctccggaagcagccctacaacaacctgaagcacaagttcccatggctgtcggaggccgggctgcgcctgctgcacttcctgttcatgtacgaccctaagaaaagggcgacggccggggactgcctggagagctcctatttcaaggagaagcccctacgtcttccgatcagtggtgtctgtgaagggtgccgcgagccaggctgaccaggcgcccgggatccagctcatccccttggctgggaacatcctccactgacttcctcccactgtctgccctgaacccactgctgcccccagaaaaaggccgggtgacaccggggggctcccagcccgtgcaccctggaagggcaggtctggcggctccatccgtggctgcaggggtctcatgtggtcctcctcgctatgttggaaatgtgcaaccactgcttcttgggaggagtggtgggtgcagtccccccgctgtctttgagttgtggtggacgctggcctgggatgagagggcccagaagaccttcgtatcccctctcagtcgcccggggctgtcccgtgcatgggttggctgtggggaccccaggtgggcctggcaggactccagatgaggacaagagggacaaggtatggggtgggagccacaattgaggataccccgagactaccaggagagccctgggctggaggctgagctgcatccctgctccccacatggaggacccaacaggaggccgtggctctgatgctgagcgaagctataggctcttgttggataaaagcttttttaacaga

SEQ ID NO: 374751 - DNA, 2385 bp, Homo sapiens
agcgtctgcgcctgcgcgcaagagaggcggggccagcgctcggcatggcggagccagatctggagtgcgagcagatccgtctgaagtgtattcctgggacgatgccggagtgtgaaggagtttgagaagctgaaccgcattggagagggtacctacggcattgtgtatcgggcccgggacacccagacagatgagattgtcgcactgaagaaggtgcggatggacaaggagaaggatggcatccccatcagcagcttgcgggagatcacgctgctgctccgcctgcgtcatccgaacatcgtggagctgaaggaggtggttgtggggaaccacctggagagcatcttcctggtgatgggttactgtgagcaggacctggccagcctcctggagaatatgccaacacccttctcggaggctcaggtcaagtgcatcgtgctgcaggtgctccggggcctccagtatctgcacaggaacttcattatccacagggacctgaaggtttccaacttgctcatgaccgacaagggttgtgtgaagacaggtgggtgcaacttgggccaggccctgtccctagatggcacttggtgacacacactcccctctctgctgcagcggatttcggcctggcccgggcctatggtgtcccagtaaagccaatgacccccaaggtggtcactctctggtaagtccttctgaagcatggtggcccctggggaccaggcctgtctggtggaggtctccttggggatgtcaggccgaagctgcaactggccttgggaatgttaagctacagggtctgtgcacactcagaaacgttgggtctaggacagcctccaggacacagcagggctgtgccacaaaatggtgagagacgggctcagtggcgtcaagggcctgcctagatcagacacacctcgccttgagagctggaaacaccgtggccgtgaaaccatctctggagggaaggctgcttcacggactgaaggacaggcagcttgcatgctttccctggttcttcctcctggatacttttaaccaaacagggtcatgcttagccagggctgaatatcagagttggtcagaatcaggtcaggaccccagtgtcgtgtactccccatctgagaacgggttggtagtggctggtgtggctgtgtgccgagggtccgtggtccctgcgactctcaggacaccgctgcacgtgacagctctcgcccccggcaaccattgctgtgtgtgccacctggatctgcagggcctggggcagagggtggtccgagttgggacaggtttccaggccaccacaggctctcggggaggctgtgtcctgtggaggcctgggctgggggagaggagccggccgtattgaggtgggtgcttctgtgtgtaggtaccgagcccctgaactgctgttgggaaccaccacgcagaccaccagcatcgacatgtgggcttttccaagctgccactggtcggccagtacagcctccggaagcagccctacaacaacctgaagcacaagttcccatggctgtcggaggccgggctgcgcctgctgcacttcctgttcatggcgacggccggggactgcctggagagctcctatttcaaggagaagcccctaccctgtgagccggagctcatgccgacctttccccaccaccgcaacaagcgggccgccccagccacctccgagggccagagcaagcgctgtaaaccctgacggtgggcctggcacacgcctgtattcccacaccaggtcttccgatcagtggtgtctgtgaagggtgccgcgagccaggctgaccaggcgcccgggatccagctcatccccttggctgggaacatcctccactgacttcctcccactgtctgccctgaacccactgctgcccccagaaaaaggccgggtgacaccggggggctcccagcccgtgcaccctggaagggcaggtctggcggctccatccgtggctgcaggggtctcatgtggtcctcctcgctatgttggaaatgtgcaaccactgcttcttgggaggagtggtgggtgcagtccccccgctgtctttgagttgtggtggacgctggcctgggatgagagggcccagaagaccttcgtatcccctctcagtcgcccggggctgtcccgtgcatgggttggctgtggggaccccaggtgggcctggcaggactccagatgaggacaagagggacaaggtatggggtgggagccacaattgaggataccccgagactaccaggagagccctgggctggaggctgagctgcatccctgctccccacatggaggacccaacaggaggccgtggctctgatgctgagcgaagctataggctcttgttggataaaagcttttttaacaga

SEQ ID NO: 374752 - DNA, 1627 bp, Homo sapiens
agcgtctgcgcctgcgcgcaagagaggcggggccagcgctcggcatggcggagccagatctggagtgcgagcagatccgtctgaagtgtattcctgggacgatgccggagtgtgaaggagtttgagaagctgaaccgcattggagagggtacctacggcattgtgtatcgggcccgggacacccagacagatgagattgtcgcactgaagaaggtgcggatggacaaggagaaggatggcatccccatcagcagcttgcgggagatcacgctgctgctccgcctgcgtcatccgaacatcgtggagctgaaggaggtggttgtggggaaccacctggagagcatcttcctggtgatgggttactgtgagcaggacctggccagcctcctggagaatatgccaacacccttctcggaggctcaggtcaagtgcatcgtgctgcaggtgctccggggcctccagtatctgcacaggaacttcattatccacagggacctgaaggtttccaacttgctcatgaccgacaagggttgtgtgaagacagcggatttcggcctggcccgggcctatggtgtcccagtaaagccaatgacccccaaggtggtcactctctggtaccgagcccctgaactgctgttgggaaccaccacgcagaccaccagcatcgacatgtgggcttttccaagctgccactggtcggccagtacagcctccggaagcagccctacaacaacctgaagcacaagttcccatggctgtcggaggccgggctgcgcctgctgcacttcctgttcatgtacgaccctaagaaaagggcgacggccggggactgcctggagagctcctatttcaaggagaagcccctaccctgtgagccggagctcatgccgacctttccccaccaccgcaacaagcgggccgccccagccacctccgagggccagagcaagcgctgtaaaccctgacggtgggcctggcacacgcctgtattcccacaccaggtcttccgatcagtggtgtctgtgaagggtgccgcgagccaggctgaccaggcgcccgggatccagctcatccccttggctgggaacatcctccactgacttcctcccactgtctgccctgaacccactgctgcccccagaaaaaggccgggtgacaccggggggctcccagcccgtgcaccctggaagggcaggtctggcggctccatccgtggctgcaggggtctcatgtggtcctcctcgctatgttggaaatgtgcaaccactgcttcttgggaggagtggtgggtgcagtccccccgctgtctttgagttgtggtggacgctggcctgggatgagagggcccagaagaccttcgtatcccctctcagtcgcccggggctgtcccgtgcatgggttggctgtggggaccccaggtgggcctggcaggactccagatgaggacaagagggacaaggtatggggtgggagccacaattgaggataccccgagactaccaggagagccctgggctggaggctgagctgcatccctgctccccacatggaggacccaacaggaggccgtggctctgatgctgagcgaagctataggctcttgttggataaaagcttttttaacaga

SEQ ID NO: 374753 - DNA, 2815 bp, Homo sapiens
agcgtctgcgcctgcgcgcaagagaggcggggccagcgctcggcatggcggagccagatctggagtgcgagcagatccgtctgaagtgtattcctgggacgatgccggagtgtgaaggagtttgagaagctgaaccgcattggagagggtacctacggcattgtgtatcgggcccgggacacccagacagatgagattgtcgcactgaagaaggtgcggatggacaaggagaaggatggcatccccatcagcagcttgcgggagatcacgctgctgctccgcctgcgtcatccgaacatcgtggagctgaaggaggtggttgtggggaaccacctggagagcatcttcctggtgatgggttactgtgagcaggacctggccagcctcctggagaatatgccaacacccttctcggaggctcaggtcaagtgcatcgtgctgcaggtgctccggggcctccagtatctgcacaggaacttcattatccacagggacctgaaggtttccaacttgctcatgaccgacaagggttgtgtgaagacaggtgggtgcaacttgggccaggccctgtccctagatggcacttggtgacacacactcccctctctgctgcagcggatttcggcctggcccgggcctatggtgtcccagtaaagccaatgacccccaaggtggtcactctctggtaagtccttctgaagcatggtggcccctggggaccaggcctgtctggtggaggtctccttggggatgtcaggccgaagctgcaactggccttgggaatgttaagctacagggtctgtgcacactcagaaacgttgggtctaggacagcctccaggacacagcagggctgtgccacaaaatggtgagagacgggctcagtggcgtcaagggcctgcctagatcagacacacctcgccttgagagctggaaacaccgtggccgtgaaaccatctctggagggaaggctgcttcacggactgaaggacaggcagcttgcatgctttccctggttcttcctcctggatacttttaaccaaacagggtcatgcttagccagggctgaatatcagagttggtcagaatcaggtcaggaccccagtgtcgtgtactccccatctgagaacgggttggtagtggctggtgtggctgtgtgccgagggtccgtggtccctgcgactctcaggacaccgctgcacgtgacagctctcgcccccggcaaccattgctgtgtgtgccacctggatctgcagggcctggggcagagggtggtccgagttgggacaggtttccaggccaccacaggctctcggggaggctgtgtcctgtggaggcctgggctgggggagaggagccggccgtattgaggtgggtgcttctgtgtgtaggtaccgagcccctgaactgctgttgggaaccaccacgcagaccaccagcatcgacatgtggtgaggagatacggttaccgctcctggggcctcaggaagggctgggacaggagccgggtcacctggttcctgagctcagcctcaggggaggggcaggagtgcagtggggtctttgccagcctcccactcccagggaggtgggcctgagcctggaaacccaggaggaggtgtgagaacttagcttgctgttctcaggctgggagcacagaggtctggaggaggcacgcctgcccctgcacttgtcaccccgggaggcctgcggggcccaggaggggagccagtggtccctgcctgtccttcacagtgtccctgacccagcgtgcctcacactggcagggtcagcaaaggtctggctgcagtcaggtcctctgttcctcgcgctggcggggtcagcagacgtctggccgcagtgaggtccactgttctctgcagggctgtgggctgcatactggccgagctgctggcgcacaggcctcttctccccggcacttccgagatccaccagatcgacttgatcgtgcagctgctgggcacgcccagtgagaacatctggccgggcttttccaagctgccactggtcggccagtacagcctccggaagcagccctacaacaacctgaagcacaagttcccatggctgtcggaggccgggctgcgcctgctgcacttcctgttcatgtacgaccctaagaaaagggcgacggccggggactgcctggagagctcctatttcaaggagaagcccctaccctgtgagccggagctcatgccgacctttccccaccaccgcaacaagcgggccgccccagccacctccgagggccagagcaagcgctgtaaaccctgacggtgggcctggcacacgcctgtattcccacaccaggtcttccgatcagtggtgtctgtgaagggtgccgcgagccaggctgaccaggcgcccgggatccagctcatccccttggctgggaacatcctccactgacttcctcccactgtctgccctgaacccactgctgcccccagaaaaaggccgggtgacaccggggggctcccagcccgtgcaccctggaagggcaggtctggcggctccatccgtggctgcaggggtctcatgtggtcctcctcgctatgttggaaatgtgcaaccactgcttcttgggaggagtggtgggtgcagtccccccgctgtctttgagttgtggtggacgctggcctgggatgagagggcccagaagaccttcgtatcccctctcatggaggctgagctgcatccctgctccccacatggaggacccaacaggaggccgtggctctgatgctgagcgaagctataggctcttgttggataaaagcttttttaacaga

SEQ ID NO: 374754 - DNA, 838 bp, Homo sapiens
agggcacttggggacttgaagagctgctgctgcctctgcctccacctcccagtgtttcagcgagcttcagtgaggtggaattcctgtggtgggggcatctgctgggagcgggcagccccagggccgagagccttatgagggcactggtttcctgggctgttgggagcaggcagccccggggctgagagccttctgagggcactggtttcctgggctgctgggagcggggagccctgggcggagagccttctgagggcactggttttctgggctgctgggagagtgcagccccggggccaagagccttgtgagggcactggtttcctgggctgctgggagcgtgcagccccggggccgagagccttctgagggcactggtttcctgggctattgggactgctagtcctgctggccagtgtgggtgtggcagggcccagctgggcttccctgcaggctcaccctgactggtacctctgaccctctgcacaggtcaagtgcatcgtgctgcaggtgctccggggcctccagtatctgcacaggaacttcattatccacaggtgggtgacagctaggcagagttggaagcacaaattcggctgaggcctgactctgctgcccctgtggagttactaaaagctcaggggttcccagctgcagcagcctgcccgctgctcgcactccatttgtgtttttttctaaaatagagaaggggtctctctgtgttgcccaggctggtctcacacacttgggctcaagtgatccacccaccttggcctcccaaagtgctgggattacaggtgggagccaccacacccaggcatgcactccgatttttaaa

SEQ ID NO: 374755 - DNA, 311 bp, Homo sapiens
agcctcactgcggtggagaggcccctccccaggcacagccgctcggagtggccacctggcttcctttgagcatttgaatcacaggctgctcagctgggtgggaggtgaggaagccgcactcacaagtcgcactaacgcaggctgcctcctccagggcgacggccggggactgcctggagagctcctatttcaaggagaagcccctacgtgagtgtgcagggttcctgactcgctctgtggggtatggctgggagcccgttttgcccggggtgggtggtggagaagtggcctgctgccctcactgacggcac

SEQ ID NO: 374756 - DNA, 2959 bp, Homo sapiens
agcgtctgcgcctgcgcgcaagagaggcggggccagcgctcggcatggcggagccagatctggagtgcgagcagatccgtctgaagtgtattcctgggacgatgccggagtgtgaaggagtttgagaagctgaaccgcattggagagggtacctacggcattgtgtatcgggcccgggacacccagacagatgagattgtcgcactgaagaaggtgcggatggacaaggagaaggatggcatccccatcagcagcttgcgggagatcacgctgctgctccgcctgcgtcatccgaacatcgtggagctgaaggaggtggttgtggggaaccacctggagagcatcttcctggtgatgggttactgtgagcaggacctggccagcctcctggagaatatgccaacacccttctcggaggctcaggtcaagtgcatcgtgctgcaggtgctccggggcctccagtatctgcacaggaacttcattatccacagggacctgaaggtttccaacttgctcatgaccgacaagggttgtgtgaagacaggtgggtgcaacttgggccaggccctgtccctagatggcacttggtgacacacactcccctctctgctgcagcggatttcggcctggcccgggcctatggtgtcccagtaaagccaatgacccccaaggtggtcactctctggtaagtccttctgaagcatggtggcccctggggaccaggcctgtctggtggaggtctccttggggatgtcaggccgaagctgcaactggccttgggaatgttaagctacagggtctgtgcacactcagaaacgttgggtctaggacagcctccaggacacagcagggctgtgccacaaaatggtgagagacgggctcagtggcgtcaagggcctgcctagatcagacacacctcgccttgagagctggaaacaccgtggccgtgaaaccatctctggagggaaggctgcttcacggactgaaggacaggcagcttgcatgctttccctggttcttcctcctggatacttttaaccaaacagggtcatgcttagccagggctgaatatcagagttggtcagaatcaggtcaggaccccagtgtcgtgtactccccatctgagaacgggttggtagtggctggtgtggctgtgtgccgagggtccgtggtccctgcgactctcaggacaccgctgcacgtgacagctctcgcccccggcaaccattgctgtgtgtgccacctggatctgcagggcctggggcagagggtggtccgagttgggacaggtttccaggccaccacaggctctcggggaggctgtgtcctgtggaggcctgggctgggggagaggagccggccgtattgaggtgggtgcttctgtgtgtaggtaccgagcccctgaactgctgttgggaaccaccacgcagaccaccagcatcgacatgtggtgaggagatacggttaccgctcctggggcctcaggaagggctgggacaggagccgggtcacctggttcctgagctcagcctcaggggaggggcaggagtgcagtggggtctttgccagcctcccactcccagggaggtgggcctgagcctggaaacccaggaggaggtgtgagaacttagcttgctgttctcaggctgggagcacagaggtctggaggaggcacgcctgcccctgcacttgtcaccccgggaggcctgcggggcccaggaggggagccagtggtccctgcctgtccttcacagtgtccctgacccagcgtgcctcacactggcagggtcagcaaaggtctggctgcagtcaggtcctctgttcctcgcgctggcggggtcagcagacgtctggccgcagtgaggtccactgttctctgcagggctgtgggctgcatactggccgagctgctggcgcacaggcctcttctccccggcacttccgagatccaccagatcgacttgatcgtgcagctgctgggcacgcccagtgagaacatctggccgggcttttccaagctgccactggtcggccagtacagcctccggaagcagccctacaacaacctgaagcacaagttcccatggctgtcggaggccgggctgcgcctgctgcacttcctgttcatgtacgaccctaagaaaagggcgacggccggggactgcctggagagctcctatttcaaggagaagcccctaccctgtgagccggagctcatgccgacctttccccaccaccgcaacaagcgggccgccccagccacctccgagggccagagcaagcgctgtaaaccctgacggtgggcctggcacacgcctgtattcccacaccaggtcttccgatcagtggtgtctgtgaagggtgccgcgagccaggctgaccaggcgcccgggatccagctcatccccttggctgggaacatcctccactgacttcctcccactgtctgccctgaacccactgctgcccccagaaaaaggccgggtgacaccggggggctcccagcccgtgcaccctggaagggcaggtctggcggctccatccgtggctgcaggggtctcatgtggtcctcctcgctatgttggaaatgtgcaaccactgcttcttgggaggagtggtgggtgcagtccccccgctgtctttgagttgtggtggacgctggcctgggatgagagggcccagaagaccttcgtatcccctctcagtcgcccggggctgtcccgtgcatgggttggctgtggggaccccaggtgggcctggcaggactccagatgaggacaagagggacaaggtatggggtgggagccacaattgaggataccccgagactaccaggagagccctgggctggaggctgagctgcatccctgctccccacatggaggacccaacaggaggccgtggctctgatgctgagcgaagctataggctcttgttggataaaagcttttttaacaga

SEQ ID NO: 374757 - DNA, 3224 bp, Homo sapiens
agcgtctgcgcctgcgcgcaagagaggcggggccagcgctcggcatggcggagccagatctggagtgcgagcagatccgtctgaagtgtattcgtaaggagggcttcttcacggtgcctccggaacacaggggtctagcgctctcgcccaggctggaatgcagtggcgtgatcacggctcagtgcatcgtcagcctcctgggctcaagtgatcttcctgcctcggcctcccaagtgctggaattacaggcgtgagccaccgcccccagcctggcctggcatttctttgagttcaggaagtgtgacaaggatttggacacccagaaataagcgtgtcgagaagagcacaagcagaggatctgggacgatgccggagtgtgaaggagtttgagaagctgaaccgcattggagagggtacctacggcattgtgtatcgggcccgggacacccagacagatgagattgtcgcactgaagaaggtgcggatggacaaggagaaggatggcatccccatcagcagcttgcgggagatcacgctgctgctccgcctgcgtcatccgaacatcgtggagctgaaggaggtggttgtggggaaccacctggagagcatcttcctggtgatgggttactgtgagcaggacctggccagcctcctggagaatatgccaacacccttctcggaggctcaggtcaagtgcatcgtgctgcaggtgctccggggcctccagtatctgcacaggaacttcattatccacagggacctgaaggtttccaacttgctcatgaccgacaagggttgtgtgaagacaggtgggtgcaacttgggccaggccctgtccctagatggcacttggtgacacacactcccctctctgctgcagcggatttcggcctggcccgggcctatggtgtcccagtaaagccaatgacccccaaggtggtcactctctggtaagtccttctgaagcatggtggcccctggggaccaggcctgtctggtggaggtctccttggggatgtcaggccgaagctgcaactggccttgggaatgttaagctacagggtctgtgcacactcagaaacgttgggtctaggacagcctccaggacacagcagggctgtgccacaaaatggtgagagacgggctcagtggcgtcaagggcctgcctagatcagacacacctcgccttgagagctggaaacaccgtggccgtgaaaccatctctggagggaaggctgcttcacggactgaaggacaggcagcttgcatgctttccctggttcttcctcctggatacttttaaccaaacagggtcatgcttagccagggctgaatatcagagttggtcagaatcaggtcaggaccccagtgtcgtgtactccccatctgagaacgggttggtagtggctggtgtggctgtgtgccgagggtccgtggtccctgcgactctcaggacaccgctgcacgtgacagctctcgcccccggcaaccattgctgtgtgtgccacctggatctgcagggcctggggcagagggtggtccgagttgggacaggtttccaggccaccacaggctctcggggaggctgtgtcctgtggaggcctgggctgggggagaggagccggccgtattgaggtgggtgcttctgtgtgtaggtaccgagcccctgaactgctgttgggaaccaccacgcagaccaccagcatcgacatgtggtgaggagatacggttaccgctcctggggcctcaggaagggctgggacaggagccgggtcacctggttcctgagctcagcctcaggggaggggcaggagtgcagtggggtctttgccagcctcccactcccagggaggtgggcctgagcctggaaacccaggaggaggtgtgagaacttagcttgctgttctcaggctgggagcacagaggtctggaggaggcacgcctgcccctgcacttgtcaccccgggaggcctgcggggcccaggaggggagccagtggtccctgcctgtccttcacagtgtccctgacccagcgtgcctcacactggcagggtcagcaaaggtctggctgcagtcaggtcctctgttcctcgcgctggcggggtcagcagacgtctggccgcagtgaggtccactgttctctgcagggctgtgggctgcatactggccgagctgctggcgcacaggcctcttctccccggcacttccgagatccaccagatcgacttgatcgtgcagctgctgggcacgcccagtgagaacatctggccgggcttttccaagctgccactggtcggccagtacagcctccggaagcagccctacaacaacctgaagcacaagttcccatggctgtcggaggccgggctgcgcctgctgcacttcctgttcatgtacgaccctaagaaaagggcgacggccggggactgcctggagagctcctatttcaaggagaagcccctaccctgtgagccggagctcatgccgacctttccccaccaccgcaacaagcgggccgccccagccacctccgagggccagagcaagcgctgtaaaccctgacggtgggcctggcacacgcctgtattcccacaccaggtcttccgatcagtggtgtctgtgaagggtgccgcgagccaggctgaccaggcgcccgggatccagctcatccccttggctgggaacatcctccactgacttcctcccactgtctgccctgaacccactgctgcccccagaaaaaggccgggtgacaccggggggctcccagcccgtgcaccctggaagggcaggtctggcggctccatccgtggctgcaggggtctcatgtggtcctcctcgctatgttggaaatgtgcaaccactgcttcttgggaggagtggtgggtgcagtccccccgctgtctttgagttgtggtggacgctggcctgggatgagagggcccagaagaccttcgtatcccctctcagtcgcccggggctgtcccgtgcatgggttggctgtggggaccccaggtgggcctggcaggactccagatgaggacaagagggacaaggtatggggtgggagccacaattgaggataccccgagactaccaggagagccctgggctggaggctgagctgcatccctgctccccacatggaggacccaacaggaggccgtggctctgatgctgagcgaagctataggctcttgttggataaaagcttttttaacaga

SEQ ID NO: 374758 - DNA, 1787 bp, Homo sapiens
agcgtctgcgcctgcgcgcaagagaggcggggccagcgctcggcatggcggagccagatctggagtgcgagcagatccgtctgaagtgtattcgtaaggagggcttcttcacggtgcctccggaacacaggatcgggcccgggacacccagacagatgagattgtcgcactgaagaaggtgcggatggacaaggagaaggatggcatccccatcagcagcttgcgggagatcacgctgctgctccgcctgcgtcatccgaacatcgtggagctgaaggaggtggttgtggggaaccacctggagagcatcttcctggtgatgggttactgtgagcaggacctggccagcctcctggagaatatgccaacacccttctcggaggctcaggtcaagtgcatcgtgctgcaggtgctccggggcctccagtatctgcacaggaacttcattatccacagggacctgaaggtttccaacttgctcatgaccgacaagggttgtgtgaagacaggtgggtgcaacttgggccaggccctgtccctagatggcacttggtgacacacactcccctctctgctgcagcggatttcggcctggcccgggcctatggtgtcccagtaaagccaatgacccccaaggtggtcactctctggtaccgagcccctgaactgctgttgggaaccaccacgcagaccaccagcatcgacatgtgggctgtgggctgcatactggccgagctgctggcgcacaggcctcttctccccggcacttccgagatccaccagatcgacttgatcgtgcagctgctgggcacgcccagtgagaacatctggccgggcttttccaagctgccactggtcggccagtacagcctccggaagcagccctacaacaacctgaagcacaagttcccatggctgtcggaggccgggctgcgcctgctgcacttcctgttcatgtacgaccctaagaaaagggcgacggccggggactgcctggagagctcctatttcaaggagaagcccctaccctgtgagccggagctcatgccgacctttccccaccaccgcaacaagcgggccgccccagccacctccgagggccagagcaagcgctgtaaaccctgacggtgggcctggcacacgcctgtattcccacaccaggtcttccgatcagtggtgtctgtgaagggtgccgcgagccaggctgaccaggcgcccgggatccagctcatccccttggctgggaacatcctccactgacttcctcccactgtctgccctgaacccactgctgcccccagaaaaaggccgggtgacaccggggggctcccagcccgtgcaccctggaagggcaggtctggcggctccatccgtggctgcaggggtctcatgtggtcctcctcgctatgttggaaatgtgcaaccactgcttcttgggaggagtggtgggtgcagtccccccgctgtctttgagttgtggtggacgctggcctgggatgagagggcccagaagaccttcgtatcccctctcagtcgcccggggctgtcccgtgcatgggttggctgtggggaccccaggtgggcctggcaggactccagatgaggacaagagggacaaggtatggggtgggagccacaattgaggataccccgagactaccaggagagccctgggctggaggctgagctgcatccctgctccccacatggaggacccaacaggaggccgtggctctgatgctgagcgaagctataggctcttgttggataaaagcttttttaacaga

SEQ ID NO: 374759 - DNA, 2527 bp, Homo sapiens
agcgtctgcgcctgcgcgcaagagaggcggggccagcgctcggcatggcggagccagatctggagtgcgagcagatccgtctgaagtgtattcctgggacgatgccggagtgtgaaggagtttgagaagctgaaccgcattggagagggtacctacggcattgtgtatcgggcccgggacacccagacagatgagattgtcgcactgaagaaggtgcggatggacaaggagaaggatggcatccccatcagcagcttgcgggagatcacgctgctgctccgcctgcgtcatccgaacatcgtggagctgaaggaggtggttgtggggaaccacctggagagcatcttcctggtgatgggttactgtgagcaggacctggccagcctcctggagaatatgccaacacccttctcggaggctcaggtcaagtgcatcgtgctgcaggtgctccggggcctccagtatctgcacaggaacttcattatccacagggacctgaaggtttccaacttgctcatgaccgacaagggttgtgtgaagacaggtgggtgcaacttgggccaggccctgtccctagatggcacttggtgacacacactcccctctctgctgcagcggatttcggcctggcccgggcctatggtgtcccagtaaagccaatgacccccaaggtggtcactctctggtaagtccttctgaagcatggtggcccctggggaccaggcctgtctggtggaggtctccttggggatgtcaggccgaagctgcaactggccttgggaatgttaagctacagggtctgtgcacactcagaaacgttgggtctaggacagcctccaggacacagcagggctgtgccacaaaatggtgagagacgggctcagtggcgtcaagggcctgcctagatcagacacacctcgccttgagagctggaaacaccgtggccgtgaaaccatctctggagggaaggctgcttcacggactgaaggacaggcagcttgcatgctttccctggttcttcctcctggatacttttaaccaaacagggtcatgcttagccagggctgaatatcagagttggtcagaatcaggtcaggaccccagtgtcgtgtactccccatctgagaacgggttggtagtggctggtgtggctgtgtgccgagggtccgtggtccctgcgactctcaggacaccgctgcacgtgacagctctcgcccccggcaaccattgctgtgtgtgccacctggatctgcagggcctggggcagagggtggtccgagttgggacaggtttccaggccaccacaggctctcggggaggctgtgtcctgtggaggcctgggctgggggagaggagccggccgtattgaggtgggtgcttctgtgtgtaggtaccgagcccctgaactgctgttgggaaccaccacgcagaccaccagcatcgacatgtgggctgtgggctgcatactggccgagctgctggcgcacaggcctcttctccccggcacttccgagatccaccagatcgacttgatcgtgcagctgctgggcacgcccagtgagaacatctggccgggcttttccaagctgccactggtcggccagtacagcctccggaagcagccctacaacaacctgaagcacaagttcccatggctgtcggaggccgggctgcgcctgctgcacttcctgttcatgtacgaccctaagaaaagggcgacggccggggactgcctggagagctcctatttcaaggagaagcccctaccctgtgagccggagctcatgccgacctttccccaccaccgcaacaagcgggccgccccagccacctccgagggccagagcaagcgctgtaaaccctgacggtgggcctggcacacgcctgtattcccacaccaggtcttccgatcagtggtgtctgtgaagggtgccgcgagccaggctgaccaggcgcccgggatccagctcatccccttggctgggaacatcctccactgacttcctcccactgtctgccctgaacccactgctgcccccagaaaaaggccgggtgacaccggggggctcccagcccgtgcaccctggaagggcaggtctggcggctccatccgtggctgcaggggtctcatgtggtcctcctcgctatgttggaaatgtgcaaccactgcttcttgggaggagtggtgggtgcagtccccccgctgtctttgagttgtggtggacgctggcctgggatgagagggcccagaagaccttcgtatcccctctcagtcgcccggggctgtcccgtgcatgggttggctgtggggaccccaggtgggcctggcaggactccagatgaggacaagagggacaaggtatggggtgggagccacaattgaggataccccgagactaccaggagagccctgggctggaggctgagctgcatccctgctccccacatggaggacccaacaggaggccgtggctctgatgctgagcgaagctataggctcttgttggataaaagcttttttaacaga

SEQ ID NO: 374760 - DNA, 2979 bp, Homo sapiens
agcgtctgcgcctgcgcgcaagagaggcggggccagcgctcggcatggcggagccagatctggagtgcgagcagatccgtctgaagtgtattcgtaaggagggcttcttcacggtgcctccggaacacaggctgggacgatgccggagtgtgaaggagtttgagaagctgaaccgcattggagaggatcgggcccgggacacccagacagatgagattgtcgcactgaagaaggtgcggatggacaaggagaaggatggcatccccatcagcagcttgcgggagatcacgctgctgctccgcctgcgtcatccgaacatcgtggagctgaaggaggtggttgtggggaaccacctggagagcatcttcctggtgatgggttactgtgagcaggacctggccagcctcctggagaatatgccaacacccttctcggaggctcaggtcaagtgcatcgtgctgcaggtgctccggggcctccagtatctgcacaggaacttcattatccacagggacctgaaggtttccaacttgctcatgaccgacaagggttgtgtgaagacaggtgggtgcaacttgggccaggccctgtccctagatggcacttggtgacacacactcccctctctgctgcagcggatttcggcctggcccgggcctatggtgtcccagtaaagccaatgacccccaaggtggtcactctctggtaagtccttctgaagcatggtggcccctggggaccaggcctgtctggtggaggtctccttggggatgtcaggccgaagctgcaactggccttgggaatgttaagctacagggtctgtgcacactcagaaacgttgggtctaggacagcctccaggacacagcagggctgtgccacaaaatggtgagagacgggctcagtggcgtcaagggcctgcctagatcagacacacctcgccttgagagctggaaacaccgtggccgtgaaaccatctctggagggaaggctgcttcacggactgaaggacaggcagcttgcatgctttccctggttcttcctcctggatacttttaaccaaacagggtcatgcttagccagggctgaatatcagagttggtcagaatcaggtcaggaccccagtgtcgtgtactccccatctgagaacgggttggtagtggctggtgtggctgtgtgccgagggtccgtggtccctgcgactctcaggacaccgctgcacgtgacagctctcgcccccggcaaccattgctgtgtgtgccacctggatctgcagggcctggggcagagggtggtccgagttgggacaggtttccaggccaccacaggctctcggggaggctgtgtcctgtggaggcctgggctgggggagaggagccggccgtattgaggtgggtgcttctgtgtgtaggtaccgagcccctgaactgctgttgggaaccaccacgcagaccaccagcatcgacatgtggtgaggagatacggttaccgctcctggggcctcaggaagggctgggacaggagccgggtcacctggttcctgagctcagcctcaggggaggggcaggagtgcagtggggtctttgccagcctcccactcccagggaggtgggcctgagcctggaaacccaggaggaggtgtgagaacttagcttgctgttctcaggctgggagcacagaggtctggaggaggcacgcctgcccctgcacttgtcaccccgggaggcctgcggggcccaggaggggagccagtggtccctgcctgtccttcacagtgtccctgacccagcgtgcctcacactggcagggtcagcaaaggtctggctgcagtcaggtcctctgttcctcgcgctggcggggtcagcagacgtctggccgcagtgaggtccactgttctctgcagggctgtgggctgcatactggccgagctgctggcgcacaggcctcttctccccggcacttccgagatccaccagatcgacttgatcgtgcagctgctgggcacgcccagtgagaacatctggccgggcttttccaagctgccactggtcggccagtacagcctccggaagcagccctacaacaacctgaagcacaagttcccatggctgtcggaggccgggctgcgcctgctgcacttcctgttcatgtacgaccctaagaaaagggcgacggccggggactgcctggagagctcctatttcaaggagaagcccctaccctgtgagccggagctcatgccgacctttccccaccaccgcaacaagcgggccgccccagccacctccgagggccagagcaagcgctgtaaaccctgacggtgggcctggcacacgcctgtattcccacaccaggtcttccgatcagtggtgtctgtgaagggtgccgcgagccaggctgaccaggcgcccgggatccagctcatccccttggctgggaacatcctccactgacttcctcccactgtctgccctgaacccactgctgcccccagaaaaaggccgggtgacaccggggggctcccagcccgtgcaccctggaagggcaggtctggcggctccatccgtggctgcaggggtctcatgtggtcctcctcgctatgttggaaatgtgcaaccactgcttcttgggaggagtggtgggtgcagtccccccgctgtctttgagttgtggtggacgctggcctgggatgagagggcccagaagaccttcgtatcccctctcagtcgcccggggctgtcccgtgcatgggttggctgtggggaccccaggtgggcctggcaggactccagatgaggacaagagggacaaggtatggggtgggagccacaattgaggataccccgagactaccaggagagccctgggctggaggctgagctgcatccctgctccccacatggaggacccaacaggaggccgtggctctgatgctgagcgaagctataggctcttgttggataaaagcttttttaacaga

SEQ ID NO: 374761 - DNA, 2853 bp, Homo sapiens
agcgtctgcgcctgcgcgcaagagaggcggggccagcgctcggcatggcggagccagatctggagtgcgagcagatccgtctgaagtgtattcgtaaggagggcttcttcacggtgcctccggaacacaggatcgggcccgggacacccagacagatgagattgtcgcactgaagaaggtgcggatggacaaggagaaggatggcatccccatcagcagcttgcgggagatcacgctgctgctccgcctgcgtcatccgaacatcgtggagctgaaggaggtggttgtggggaaccacctggagagcatcttcctggtgatgggttactgtgagcaggacctggccagcctcctggagaatatgccaacacccttctcggaggctcaggtcaagtgcatcgtgctgcaggtgctccggggcctccagtatctgcacaggaacttcattatccacagggacctgaaggtttccaacttgctcatgaccgacaagggttgtgtgaagacagcggatttcggcctggcccgggcctatggtgtcccagtaaagccaatgacccccaaggtggtcactctctggtaagtccttctgaagcatggtggcccctggggaccaggcctgtctggtggaggtctccttggggatgtcaggccgaagctgcaactggccttgggaatgttaagctacagggtctgtgcacactcagaaacgttgggtctaggacagcctccaggacacagcagggctgtgccacaaaatggtgagagacgggctcagtggcgtcaagggcctgcctagatcagacacacctcgccttgagagctggaaacaccgtggccgtgaaaccatctctggagggaaggctgcttcacggactgaaggacaggcagcttgcatgctttccctggttcttcctcctggatacttttaaccaaacagggtcatgcttagccagggctgaatatcagagttggtcagaatcaggtcaggaccccagtgtcgtgtactccccatctgagaacgggttggtagtggctggtgtggctgtgtgccgagggtccgtggtccctgcgactctcaggacaccgctgcacgtgacagctctcgcccccggcaaccattgctgtgtgtgccacctggatctgcagggcctggggcagagggtggtccgagttgggacaggtttccaggccaccacaggctctcggggaggctgtgtcctgtggaggcctgggctgggggagaggagccggccgtattgaggtgggtgcttctgtgtgtaggtaccgagcccctgaactgctgttgggaaccaccacgcagaccaccagcatcgacatgtggtgaggagatacggttaccgctcctggggcctcaggaagggctgggacaggagccgggtcacctggttcctgagctcagcctcaggggaggggcaggagtgcagtggggtctttgccagcctcccactcccagggaggtgggcctgagcctggaaacccaggaggaggtgtgagaacttagcttgctgttctcaggctgggagcacagaggtctggaggaggcacgcctgcccctgcacttgtcaccccgggaggcctgcggggcccaggaggggagccagtggtccctgcctgtccttcacagtgtccctgacccagcgtgcctcacactggcagggtcagcaaaggtctggctgcagtcaggtcctctgttcctcgcgctggcggggtcagcagacgtctggccgcagtgaggtccactgttctctgcagggctgtgggctgcatactggccgagctgctggcgcacaggcctcttctccccggcacttccgagatccaccagatcgacttgatcgtgcagctgctgggcacgcccagtgagaacatctggccgggcttttccaagctgccactggtcggccagtacagcctccggaagcagccctacaacaacctgaagcacaagttcccatggctgtcggaggccgggctgcgcctgctgcacttcctgttcatgtacgaccctaagaaaagggcgacggccggggactgcctggagagctcctatttcaaggagaagcccctaccctgtgagccggagctcatgccgacctttccccaccaccgcaacaagcgggccgccccagccacctccgagggccagagcaagcgctgtaaaccctgacggtgggcctggcacacgcctgtattcccacaccaggtcttccgatcagtggtgtctgtgaagggtgccgcgagccaggctgaccaggcgcccgggatccagctcatccccttggctgggaacatcctccactgacttcctcccactgtctgccctgaacccactgctgcccccagaaaaaggccgggtgacaccggggggctcccagcccgtgcaccctggaagggcaggtctggcggctccatccgtggctgcaggggtctcatgtggtcctcctcgctatgttggaaatgtgcaaccactgcttcttgggaggagtggtgggtgcagtccccccgctgtctttgagttgtggtggacgctggcctgggatgagagggcccagaagaccttcgtatcccctctcagtcgcccggggctgtcccgtgcatgggttggctgtggggaccccaggtgggcctggcaggactccagatgaggacaagagggacaaggtatggggtgggagccacaattgaggataccccgagactaccaggagagccctgggctggaggctgagctgcatccctgctccccacatggaggacccaacaggaggccgtggctctgatgctgagcgaagctataggctcttgttggataaaagcttttttaacaga

SEQ ID NO: 374762 - DNA, 1751 bp, Homo sapiens
agcgtctgcgcctgcgcgcaagagaggcggggccagcgctcggcatggcggagccagatctggagtgcgagcagatccgtctgaagtgtattcctgggacgatgccggagtgtgaaggagtttgagaagctgaaccgcattggagagggtacctacggcattgtgtatcgggcccgggacacccagacagatgagattgtcgcactgaagaaggtgcggatggacaaggagaaggatggcatccccatcagcagcttgcgggagatcacgctgctgctccgcctgcgtcatccgaacatcgtggagctgaaggaggtggttgtggggaaccacctggagagcatcttcctggtgatgggttactgtgagcaggacctggccagcctcctggagaatatgccaacacccttctcggaggctcaggtcaagtgcatcgtgctgcaggtgctccggggcctccagtatctgcacaggaacttcattatccacagggacctgaaggtttccaacttgctcatgaccgacaagggttgtgtgaagacagcggatttcggcctggcccgggcctatggtgtcccagtaaagccaatgacccccaaggtggtcactctctggtaccgagcccctgaactgctgttgggaaccaccacgcagaccaccagcatcgacatgtgggctgtgggctgcatactggccgagctgctggcgcacaggcctcttctccccggcacttccgagatccaccagatcgacttgatcgtgcagctgctgggcacgcccagtgagaacatctggccgggcttttccaagctgccactggtcggccagtacagcctccggaagcagccctacaacaacctgaagcacaagttcccatggctgtcggaggccgggctgcgcctgctgcacttcctgttcatgtacgaccctaagaaaagggcgacggccggggactgcctggagagctcctatttcaaggagaagcccctaccctgtgagccggagctcatgccgacctttccccaccaccgcaacaagcgggccgccccagccacctccgagggccagagcaagcgctgtaaaccctgacggtgggcctggcacacgcctgtattcccacaccaggtcttccgatcagtggtgtctgtgaagggtgccgcgagccaggctgaccaggcgcccgggatccagctcatccccttggctgggaacatcctccactgacttcctcccactgtctgccctgaacccactgctgcccccagaaaaaggccgggtgacaccggggggctcccagcccgtgcaccctggaagggcaggtctggcggctccatccgtggctgcaggggtctcatgtggtcctcctcgctatgttggaaatgtgcaaccactgcttcttgggaggagtggtgggtgcagtccccccgctgtctttgagttgtggtggacgctggcctgggatgagagggcccagaagaccttcgtatcccctctcagtcgcccggggctgtcccgtgcatgggttggctgtggggaccccaggtgggcctggcaggactccagatgaggacaagagggacaaggtatggggtgggagccacaattgaggataccccgagactaccaggagagccctgggctggaggctgagctgcatccctgctccccacatggaggacccaacaggaggccgtggctctgatgctgagcgaagctataggctcttgttggataaaagcttttttaacaga

SEQ ID NO: 374763 - DNA, 2151 bp, Homo sapiens
agcgtctgcgcctgcgcgcaagagaggcggggccagcgctcggcatggcggagccagatctggagtgcgagcagatccgtctgaagtgtattcgtaaggagggcttcttcacggtgcctccggaacacaggctgggacgatgccggagtgtgaaggagtttgagaagctgaaccgcattggagagggtacctacggcattgtgtatcgggcccgggacacccagacagatgagattgtcgcactgaagaaggtgcggatggacaaggagaaggatggcatccccatcagcagcttgcgggagatcacgctgctgctccgcctgcgtcatccgaacatcgtggagctgaaggaggtggttgtggggaaccacctggagagcatcttcctggtgatgggttactgtgagcaggacctggccagcctcctggagaatatgccaacacccttctcggaggctcaggtcaagtgcatcgtgctgcaggtgctccggggcctccagtatctgcacaggaacttcattatccacagggacctgaaggtttccaacttgctcatgaccgacaagggttgtgtgaagacaggtaccgagcccctgaactgctgttgggaaccaccacgcagaccaccagcatcgacatgtggtgaggagatacggttaccgctcctggggcctcaggaagggctgggacaggagccgggtcacctggttcctgagctcagcctcaggggaggggcaggagtgcagtggggtctttgccagcctcccactcccagggaggtgggcctgagcctggaaacccaggaggaggtgtgagaacttagcttgctgttctcaggctgggagcacagaggtctggaggaggcacgcctgcccctgcacttgtcaccccgggaggcctgcggggcccaggaggggagccagtggtccctgcctgtccttcacagtgtccctgacccagcgtgcctcacactggcagggtcagcaaaggtctggctgcagtcaggtcctctgttcctcgcgctggcggggtcagcagacgtctggccgcagtgaggtccactgttctctgcagggctgtgggctgcatactggccgagctgctggcgcacaggcctcttctccccggcacttccgagatccaccagatcgacttgatcgtgcagctgctgggcacgcccagtgagaacatctggccgggcttttccaagctgccactggtcggccagtacagcctccggaagcagccctacaacaacctgaagcacaagttcccatggctgtcggaggccgggctgcgcctgctgcacttcctgttcatgtacgaccctaagaaaagggcgacggccggggactgcctggagagctcctatttcaaggagaagcccctaccctgtgagccggagctcatgccgacctttccccaccaccgcaacaagcgggccgccccagccacctccgagggccagagcaagcgctgtaaaccctgacggtgggcctggcacacgcctgtattcccacaccaggtcttccgatcagtggtgtctgtgaagggtgccgcgagccaggctgaccaggcgcccgggatccagctcatccccttggctgggaacatcctccactgacttcctcccactgtctgccctgaacccactgctgcccccagaaaaaggccgggtgacaccggggggctcccagcccgtgcaccctggaagggcaggtctggcggctccatccgtggctgcaggggtctcatgtggtcctcctcgctatgttggaaatgtgcaaccactgcttcttgggaggagtggtgggtgcagtccccccgctgtctttgagttgtggtggacgctggcctgggatgagagggcccagaagaccttcgtatcccctctcagtcgcccggggctgtcccgtgcatgggttggctgtggggaccccaggtgggcctggcaggactccagatgaggacaagagggacaaggtatggggtgggagccacaattgaggataccccgagactaccaggagagccctgggctggaggctgagctgcatccctgctccccacatggaggacccaacaggaggccgtggctctgatgctgagcgaagctataggctcttgttggataaaagcttttttaacaga

SEQ ID NO: 374764 - DNA, 1822 bp, Homo sapiens
agcgtctgcgcctgcgcgcaagagaggcggggccagcgctcggcatggcggagccagatctggagtgcgagcagatccgtctgaagtgtattcctgggacgatgccggagtgtgaaggagtttgagaagctgaaccgcattggagagggtacctacggcattgtgtatcgggcccgggacacccagacagatgagattgtcgcactgaagaaggtgcggatggacaaggagaaggatggcatccccatcagcagcttgcgggagatcacgctgctgctccgcctgcgtcatccgaacatcgtggagctgaaggaggtggttgtggggaaccacctggagagcatcttcctggtgatgggttactgtgagcaggacctggccagcctcctggagaatatgccaacacccttctcggaggctcaggtcaagtgcatcgtgctgcaggtgctccggggcctccagtatctgcacaggaacttcattatccacagggacctgaaggtttccaacttgctcatgaccgacaagggttgtgtgaagacaggtgggtgcaacttgggccaggccctgtccctagatggcacttggtgacacacactcccctctctgctgcagcggatttcggcctggcccgggcctatggtgtcccagtaaagccaatgacccccaaggtggtcactctctggtaccgagcccctgaactgctgttgggaaccaccacgcagaccaccagcatcgacatgtgggctgtgggctgcatactggccgagctgctggcgcacaggcctcttctccccggcacttccgagatccaccagatcgacttgatcgtgcagctgctgggcacgcccagtgagaacatctggccgggcttttccaagctgccactggtcggccagtacagcctccggaagcagccctacaacaacctgaagcacaagttcccatggctgtcggaggccgggctgcgcctgctgcacttcctgttcatgtacgaccctaagaaaagggcgacggccggggactgcctggagagctcctatttcaaggagaagcccctaccctgtgagccggagctcatgccgacctttccccaccaccgcaacaagcgggccgccccagccacctccgagggccagagcaagcgctgtaaaccctgacggtgggcctggcacacgcctgtattcccacaccaggtcttccgatcagtggtgtctgtgaagggtgccgcgagccaggctgaccaggcgcccgggatccagctcatccccttggctgggaacatcctccactgacttcctcccactgtctgccctgaacccactgctgcccccagaaaaaggccgggtgacaccggggggctcccagcccgtgcaccctggaagggcaggtctggcggctccatccgtggctgcaggggtctcatgtggtcctcctcgctatgttggaaatgtgcaaccactgcttcttgggaggagtggtgggtgcagtccccccgctgtctttgagttgtggtggacgctggcctgggatgagagggcccagaagaccttcgtatcccctctcagtcgcccggggctgtcccgtgcatgggttggctgtggggaccccaggtgggcctggcaggactccagatgaggacaagagggacaaggtatggggtgggagccacaattgaggataccccgagactaccaggagagccctgggctggaggctgagctgcatccctgctccccacatggaggacccaacaggaggccgtggctctgatgctgagcgaagctataggctcttgttggataaaagcttttttaacaga

SEQ ID NO: 374765 - DNA, 3878 bp, Homo sapiens
  misc_feature (3019)..(3019): n is a, c, g, or t
  misc_feature (3022)..(3022): n is a, c, g, or t
  misc_feature (3024)..(3024): n is a, c, g, or t
agcgtctgcgcctgcgcgcaagagaggcggggccagcgctcggcatggcggagccagatctggagtgcgagcagatccgtctgaagtgtattcctgggacgatgccggagtgtgaaggagtttgagaagctgaaccgcattggagagggtacctacggcattgtgtatcgggcccgggacacccagacagatgagattgtcgcactgaagaaggtgcggatggacaaggagaaggatggcatccccatcagcagcttgcgggagatcacgctgctgctccgcctgcgtcatccgaacatcgtggagctgaaggaggtggttgtggggaaccacctggagagcatcttcctggtgatgggttactgtgagcaggacctggccagcctcctggagaatatgccaacacccttctcggaggctcaggtcaagtgcatcgtgctgcaggtgctccggggcctccagtatctgcacaggaacttcattatccacagggacctgaaggtttccaacttgctcatgaccgacaagggttgtgtgaagacaggtgggtgcaacttgggccaggccctgtccctagatggcacttggtgacacacactcccctctctgctgcagcggatttcggcctggcccgggcctatggtgtcccagtaaagccaatgacccccaaggtggtcactctctggtaagtccttctgaagcatggtggcccctggggaccaggcctgtctggtggaggtctccttggggatgtcaggccgaagctgcaactggccttgggaatgttaagctacagggtctgtgcacactcagaaacgttgggtctaggacagcctccaggacacagcagggctgtgccacaaaatggtgagagacgggctcagtggcgtcaagggcctgcctagatcagacacacctcgccttgagagctggaaacaccgtggccgtgaaaccatctctggagggaaggctgcttcacggactgaaggacaggcagcttgcatgctttccctggttcttcctcctggatacttttaaccaaacagggtcatgcttagccagggctgaatatcagagttggtcagaatcaggtcaggaccccagtgtcgtgtactccccatctgagaacgggttggtagtggctggtgtggctgtgtgccgagggtccgtggtccctgcgactctcaggacaccgctgcacgtgacagctctcgcccccggcaaccattgctgtgtgtgccacctggatctgcagggcctggggcagagggtggtccgagttgggacaggtttccaggccaccacaggctctcggggaggctgtgtcctgtggaggcctgggctgggggagaggagccggccgtattgaggtgggtgcttctgtgtgtaggtaccgagcccctgaactgctgttgggaaccaccacgcagaccaccagcatcgacatgtggtgaggagatacggttaccgctcctggggcctcaggaagggctgggacaggagccgggtcacctggttcctgagctcagcctcaggggaggggcaggagtgcagtggggtctttgccagcctcccactcccagggaggtgggcctgagcctggaaacccaggaggaggtgtgagaacttagcttgctgttctcaggctgggagcacagaggtctggaggaggcacgcctgcccctgcacttgtcaccccgggaggcctgcggggcccaggaggggagccagtggtccctgcctgtccttcacagtgtccctgacccagcgtgcctcacactggcagggtcagcaaaggtctggctgcagtcaggtcctctgttcctcgcgctggcggggtcagcagacgtctggccgcagtgaggtccactgttctctgcagggctgtgggctgcatactggccgagctgctggcgcacaggcctcttctccccggcacttccgagatccaccagatcgacttgatcgtgcagctgctgggcacgcccagtgagaacatctggccgggcttttccaagctgccactggtcggccagtacagcctccggaagcagccctacaacaacctgaagcacaagttcccatggctgtcggaggccgggctgcgcctgctgcacttcctgttcatgtacgaccctaagaaaagggcgacggccggggactgcctggagagctcctatttcaaggagaagcccctaccctgtgagccggagctcatgccgacctttccccaccaccgcaacaagcgggccgccccagccacctccgagggccagagcaagcgctgtaaaccctgacggtgggcctggcacacgcctgtattcccacaccaggtcttccgatcagtggtgtctgtgaagggtgccgcgagccaggctgaccaggcgcccgggatccagctcatccccttggctgggaacatcctccactgacttcctcccactgtctgccctgaacccactgctgcccccagaaaaaggccgggtgacaccggggggctcccagcccgtgcaccctggaagggcaggtctggcggctccatccgtggctgcaggggtctcatgtggtcctcctcgctatgttggaaatgtgcaaccactgcttcttgggaggagtggtgggtgcagtccccccgctgtctttgagttgtggtggacgctggcctgggatgagagggcccagaagaccttcgtatcccctctcagtcgcccggggctgtcccgtgcatgggttggctgtggggaccccaggtgggcctggcaggactccagatgaggacaagagggacaaggtatggggtgggagccacaattgaggataccccgagactaccaggagagccctgggctggaggctgagctgcatccctgctccccacatggaggacccaacaggaggccgtggctctgatgctgagcgaagctataggctcttgttggataaaagcttttttaacagaaaaaaaaaaaaaaaaaaaaaaaaaaaaaaaaaaaaaaaaaaaaaaaaaaaaaaaaaaaanaananaaaaaaaaaagaaaaaaaaacaaaaaaaaaaaaagaaaggaggcgggggcggcgcggcaaaactacactcccccgcggaccggccagcgcgacgacgcgacgcagcccacgcgcggggtaggaggggaaggaggagcggccgcccaaccagagaagaagcgaggtcagagtagataaacgtcagaacgcccaagagcgagccgccggcagctaaaaataaagagaggagagcaagaagcgcgagagaagcaaaagacgatagaagagtagcaagagccacaatacacagagagagagagaagagaaacagccacacagttcgacgacacgcgaataggcagagatgctgagacgagcagcgaacatatagaacgagagagaagaaagacagcacagacagtcgacacagactagacgcagtaggctgaatcagactactactgcagtccccagccagggcgcggagaggcaccgaagagtaggagagtcgtcacaggccgcgcggggacgaggggtggggatagatagtagttacggggctgatgtgcggctaagacacagacggaaggaacgtgagcgagacagatagaagaggggtaggacacaacgatatcgtaagatgatgcagcagcgagaacagtcgaggcttaaggtacacaggcacgagtctgacaaggtacgtgagtcgagaggagagagtagagcaacggagcatgaggaggtgaggagagcaggcgacatcagagcgtgaagccagtcagagagagaagctagcgcggaagaacccagcaggtaacgcaactgtagagatgacaacatgacaacaagagacgcgagccgctgaggccaagacg

SEQ ID NO: 374766 - DNA, 3082 bp, Homo sapiens
agcgtctgcgcctgcgcgcaagagaggcggggccagcgctcggcatggcggagccagatctggagtgcgagcagatccgtctgaagtgtattcctgggacgatgccggagtgtgaaggagtttgagaagctgaaccgcattggagagggtacctacggcattgtgtatcgggcccgggacacccagacagatgagattgtcgcactgaagaaggtgcggatggacaaggagaaggatggcatccccatcagcagcttgcgggagatcacgctgctgctccgcctgcgtcatccgaacatcgtggagctgaaggaggtggttgtggggaaccacctggagagcatcttcctggtgatgggttactgtgagcaggacctggccagcctcctggagaatatgccaacacccttctcggaggctcaggtcaagtgcatcgtgctgcaggtgctccggggcctccagtatctgcacaggaacttcattatccacagggacctgaaggtttccaacttgctcatgaccgacaagggttgtgtgaagacaggtgggtgcaacttgggccaggccctgtccctagatggcacttggtgacacacactcccctctctgctgcagcggatttcggcctggcccgggcctatggtgtcccagtaaagccaatgacccccaaggtggtcactctctggtaagtccttctgaagcatggtggcccctggggaccaggcctgtctggtggaggtctccttggggatgtcaggccgaagctgcaactggccttgggaatgttaagctacagggtctgtgcacactcagaaacgttgggtctaggacagcctccaggacacagcagggctgtgccacaaaatggtgagagacgggctcagtggcgtcaagggcctgcctagatcagacacacctcgccttgagagctggaaacaccgtggccgtgaaaccatctctggagggaaggctgcttcacggactgaaggacaggcagcttgcatgctttccctggttcttcctcctggatacttttaaccaaacagggtcatgcttagccagggctgaatatcagagttggtcagaatcaggtcaggaccccagtgtcgtgtactccccatctgagaacgggttggtagtggctggtgtggctgtgtgccgagggtccgtggtccctgcgactctcaggacaccgctgcacgtgacagctctcgcccccggcaaccattgctgtgtgtgccacctggatctgcagggcctggggcagagggtggtccgagttgggacaggtttccaggccaccacaggctctcggggaggctgtgtcctgtggaggcctgggctgggggagaggagccggccgtattgaggtgggtgcttctgtgtgtaggtaccgagcccctgaactgctgttgggaaccaccacgcagaccaccagcatcgacatgtggtgaggagatacggttaccgctcctggggcctcaggaagggctgggacaggagccgggtcacctggttcctgagctcagcctcaggggaggggcaggagtgcagtggggtctttgccagcctcccactcccagggaggtgggcctgagcctggaaacccaggaggaggtgtgagaacttagcttgctgttctcaggctgggagcacagaggtctggaggaggcacgcctgcccctgcacttgtcaccccgggaggcctgcggggcccaggaggggagccagtggtccctgcctgtccttcacagtgtccctgacccagcgtgcctcacactggcagggtcagcaaaggtctggctgcagtcaggtcctctgttcctcgcgctggcggggtcagcagacgtctggccgcagtgaggtccactgttctctgcagggctgtgggctgcatactggccgagctgctggcgcacaggcctcttctccccggcacttccgagatccaccagatcgacttgatcgtgcagctgctgggcacgcccagtgagaacatctggccgggcttttccaagctgccactggtcggccagtacagcctccggaagcagccctacaacaacctgaagcacaagttcccatggctgtcggaggccgggctgcgcctgctgcacttcctgttcatgtacgaccctaagaaaagggcgacggccggggactgcctggagagctcctatttcaaggagaagcccctaccctgtgagccggagctcatgccgacctttccccaccaccgcaacaagcgggccgccccagccacctccgagggccagagcaagcgctgtaaaccctgacggtgggcctggcacacgcctgtattcccacaccaggtcttccgatcagtggtgtctgtgaagggtgccgcgagccaggctgaccaggcgcccgggatccagctcatccccttggctgggaacatcctccactgacttcctcccactgtctgccctgaacccactgctgcccccagaaaaaggccgggtgacaccggggggctcccagcccgtgcaccctggaagggcaggtctggcggctccatccgtggctgcaggggtctcatgtggtcctcctcgctatgttggaaatgtgcaaccactgcttcttgggaggagtggtgggtgcagtccccccgctgtctttgagttgtggtggacgctggcctgggatgagagggcccagaagaccttcgtatcccctctcagtcgcccggggctgtcccgtgcatgggttggctgtggggaccccaggtgggcctggcaggactccagatgaggacaagagggacaaggtatggggtgggagccacaattgaggataccccgagactaccaggagagccctgggctggaggctgagctgcatccctgctccccacatggaggacccaacaggaggccgtggctctgatgctgagcgaagctataggctcttgttggataaaagcttttttaacagatcacagtaaaaaaaaactatgaaatacttcgagggggggggcccccggtacccaaattccgcccctattatgggagtgccgttattaccaaatttaactgggcccgtgtgtttttacaacacc

SEQ ID NO: 374767 - DNA, 842 bp, Homo sapiens
agcgtctgcgcctgcgcgcaagagaggcggggccagcgctcggcatggcggagccagatctggagtgcgagcagatccgtctgaagtgtattcgtaaggagggcttcttcacggtgcctccggaacacaggatcgggcccgggacacccagacagatgagattgtcgcactgaagaaggtgcggatggacaaggagaaggatggcatccccatcagcagcttgcgggagatcacgctgctgctccgcctgcgtcatccgaacatcgtggagctgaaggaggtggttgtggggaaccacctggagagcatcttcctggtgatgggttactgtgagcaggacctggccagcctcctggagaatatgccaacacccttctcggaggctcaggtcaagtgcatcgtgctgcaggtgctccggggcctccagtatctgcacaggaacttcattatccacaggtgggtgacagctaggcagagttggaagcacaaattcggctgaggcctgactctgctgcccctgtggagttactaaaagctcaggggttcccagctgcagcagcctgcccgctgctcgcactccatttgtgtttttttctaaaatagagaaggggtctctctgtgtaaattgcctttatttttacagagtgatgttaggagctttctatactactcctcccttaaactcacagtagccatcattcagtgagcccaaatttaggggttagggctgaatttccgaatattggtaaatccttgctttccccatgggtggggtggcaatcccttcaaagccagggtatctcccagtggggctagaagagtggtggtgatgggtgggaccc

SEQ ID NO: 374768 - DNA, 405 bp, Homo sapiens
aaggtaatataaaggggaagagtctaagtgttgtgttggacagactctttgggtggtttccatgattcctgtttcctgatgttcatgcctttgtgtgatcctctcccttggagtatgtttgagacctgtgatttgcttgtaactatacaatacagcaaagtcacaggttgtacatgactatattgcatgagattttagtgccaattttgctggaatcttgcactctttactggcttcaaagacatgagctgctatgttaggagactcatgacaaggagctgaggacagtctccggatgaatccttcagtgctccccagtcaagcctcagatgagaccacagccatgctcaacctgtagattgaagccttatgagatcctaagcagaggactcagctaagccatgt

SEQ ID NO: 374769 - DNA, 425 bp, Homo sapiens
acccaataaacatcgtgtatgtgggagtatatagcattatggtatacagtacatgtcatgcatatgggagtgtattgcagtgtacctactcagacttaggtcagagaaggatttgagaatgtgacatataaaattgaaacctcaaggatgaaaataggcattcatagctgggcgtggtggctcaggcctctaatcccagcattttgagaggctgaggtgggtggatcacgaggtcaggaattcaagaccagcctggccaacatggtgaaaccccatctctactaaaatacaaaaattagctgggtgtggtggcacatgcctgtaatcccagctacttgggaggctgaggcaggagaatcgcttgaaccagggagtcagaggttgcagtgagctgagatagtgccactgcactccagtgtctcaaa

SEQ ID NO: 374770 - DNA, 2554 bp, Homo sapiens
  misc_feature (764)..(764): n is a, c, g, or t
actggtagagctcggcttcgtggctgtttcggagccaccgaaagataagctccctcgtcaccctgacatctctccgggaagactggaagggaaatggcctttcgggggatgttgaacgcatttgggcaggcggggagccaagcccggcttgagagcagagccggggacgaagttccggaaatggaattaccgagtcagatgagaaacacaagtcatcaatgaattaacaagcaacacattgtcacatccagctgttgaagagtggttaactcagcttgatctccgaagactcttctgcaccccaccccgcccccaactgctttccaaagagaaacagaaaatgattgagtcccaggaaccagtgacatttgaggatgtggctgtggacttcacgcaggaagagtggcagcagttgaatcctgctcagaagaccctgcatagggatgtgatgctggagacctataatcacctggtctccgtggggtgttcaggtataaaaccagatgtaatctttaagttggaacatggaaaggacccatggatcatagagagtgagttgtcaaggtggatctacccagacagagtgaaaggccttgaatcttcccagcagatcatttctggagaacttttatttcaaagggagatactagaaagagccccaaaggataattcattgtactctgttttaaaaatctggcatattgataatcagatggatagatatcaaggaaatcaagacagagttttgaggcaggtcacagtcntcagtcgtgaaacattgactgatgagatgggttccaagtacagtgcatttgggaaaatgttcaatcggtgcacagaccttgctcctttaagtcaaaaattccataagtttgattcatgtgaaaatagcttgaagtctaattcagacttactaaattataacaggagctatgcaagaaagaaccccactaagagatttagatgtgggagaccacctaagtataatgcttcctgttctgtgcctgagaaggaaggcttcattcatactggaatggagccctatggagatagtcaatgtgaaaaagttctcagtcataagcaagcccatgttcagtataagaaatttcaagccagagagaaacccaatgtttgtagtatgtgtgggaaagcctttatcaagaagtcacagctcattatacatcaaagaattcatactggagagaaaccatatgtatgtggagattgtaggaaagccttcagtgagaaatcacacctcattgtgcatcagaggattcatactggggagaaaccctatgaatgtactaagtatggaagagcattctcccggaagtcacctttcactgttcatcagagagtccatactggagagaaaccctatgagtgttttgagtgtccaaaagctttctcccagaagtcacatctaattatacatcagagagttcataccagagagaagccctttgaatgcagtgaatgcaggaaagccttctgtgagatgtctcacctttttatacaccagataactcatactgggaagaagccctatgaatgtactgaatgtgggaagaccttccctcggaaaacacagctcattatacatcagagaacgcatactggagagaagccctataagtgtggtgaatgtgggaaaactttctgccaacagtcccacctcataggacatcaaagaattcatacaggagaaaaaccttatgtgtgtactgactgtgggaaggccttttcccagaagtcacacctcactggccatcaaagacttcatactggagagaaaccttatatgtgtactgaatgtggaaaatccttctctcagaaatcacctcttatcatacaccagagaattcatacaggggagaaaccttatcagtgtggtgaatgtggcaaaaccttctcccagaaatcactcctcattattcatctgagagttcacacaggggagaaaccttatgagtgtactgagtgtgggagggccttttccctgaagtcacatctcattctacatcagagaggtcatactggagagaaaccctatgaatgtagtgaatgtggaaaggccttctgtggaaagtctccactcattatacatcagaaaactcatcctagggagaaaacccctgaatgtgctgagtctggaatgacttttttctggaaatcacagatgattacatatcagagaagacacactggggagaaaccctccagatgcagtgactgtgggaaggcattctgccagcatgtatactttactgggcatcagaatccatataggaaagacaccttgtatatatgctgattgtgggaaggcctattcccagaagtcagtcctcattgtctatgggaaaactcacattgaatagaaatagtgacaacttctcaactgtagaatagactaatatgttcctcagtatacatgattacccttccacagaatgatctgcttaggccctcagaatattttcaacatcacaaatatggaatcaatttgctcaccctcaaactgtctcagccctcttcacagaataaatgtatctgg

SEQ ID NO: 374771 - DNA, 2600 bp, Homo sapiens
  misc_feature (764)..(764): n is a, c, g, or t
actggtagagctcggcttcgtggctgtttcggagccaccgaaagataagctccctcgtcaccctgacatctctccgggaagactggaagggaaatggcctttcgggggatgttgaacgcatttgggcaggcggggagccaagcccggcttgagagcagagccggggacgaagttccggaaatggaattaccgagtcagatgagaaacacaagtcatcaatgaattaacaagcaacacattgtcacatccagctgttgaagagtggttaactcagcttgatctccgaagactcttctgcaccccaccccgcccccaactgctttccaaagagaaacagaaaatgattgagtcccaggaaccagtgacatttgaggatgtggctgtggacttcacgcaggaagagtggcagcagttgaatcctgctcagaagaccctgcatagggatgtgatgctggagacctataatcacctggtctccgtggggtgttcaggtataaaaccagatgtaatctttaagttggaacatggaaaggacccatggatcatagagagtgagttgtcaaggtggatctacccagacagagtgaaaggccttgaatcttcccagcagatcatttctggagaacttttatttcaaagggagatactagaaagagccccaaaggataattcattgtactctgttttaaaaatctggcatattgataatcagatggatagatatcaaggaaatcaagacagagttttgaggcaggtcacagtcntcagtcgtgaaacattgactgatgagatgggttccaagtacagtgcatttgggaaaatgttcaatcggtgcacagaccttgctcctttaagtcaaaaattccataagtttgattcatgtgaaaatagcttgaagtctaattcagacttactaaattataacaggagctatgcaagaaagaaccccactaagagatttagatgtgggagaccacctaagtataatgcttcctgttctgtgcctgagaaggaaggcttcattcatactggaatggagccctatggagatagtcaatgtgaaaaagttctcagtcataagcaagcccatgttcagtataagaaatttcaagccagagagaaacccaatgtttgtagtatgtgtgggaaagcctttatcaagaagtcacagctcattatacatcaaagaattcatactggagagaaaccatatgtatgtggagattgtaggaaagccttcagtgagaaatcacacctcattgtgcatcagaggattcatactggggagaaaccctatgaatgtactaagtatggaagagcattctcccggaagtcacctttcactgttcatcagagagtccatactggagagaaaccctatgagtgttttgagtgtccaaaagctttctcccagaagtcacatctaattatacatcagagagttcataccagagagaagccctttgaatgcagtgaatgcaggaaagccttctgtgagatgtctcacctttttatacaccagataactcatactgggaagaagccctatgaatgtactgaatgtgggaagaccttccctcggaaaacacagctcattatacatcagagaacgcatactggagagaagccctataagtgtggtgaatgtgggaaaactttctgccaacagtcccacctcataggacatcaaagaattcatacaggagaaaaaccttatgtgtgtactgactgtgggaaggccttttcccagaagtcacacctcactggccatcaaagacttcatactggagagaaaccttatatgtgtactgaatgtggaaaatccttctctcagaaatcacctcttatcatacaccagagaattcatacaggggagaaaccttatcagtgtggtgaatgtggcaaaaccttctcccagaaatcactcctcattattcatctgagagttcacacaggggagaaaccttatgagtgtactgagtgtgggagggccttttccctgaagtcacatctcattctacatcagagaggtcatactggagagaaaccctatgaatgtagtgaatgtggaaaggccttctgtggaaagtctccactcattatacatcagaaaactcatcctagggagaaaacccctgaatgtgctgagtctggaatgacttttttctggaaatcacagatgattacatatcagagaagacacactggggagaaaccctccagatgcagtgactgtgggaaggcattctgccagcatgtatactttactgggcatcagaatccatataggaaagacaccttgtatatatgctgattgtgggaaggcctattcccagaagtcagtcctcattgtctatgggaaaactcacattgaatagaaatagtgacaacttctcaactgtagaatagactaatatgttcctcagtatacatgattacccttccacagaatgatctgcttaggccctcagaatattttcaacatcacaaatatggaatcaatttgctcaccctcaaactgtctcagccctcttcacagaataaatgtatctggaagaattagcactactttggtgttgtttggtcattaaatgctttat

SEQ ID NO: 374772 - DNA, 3499 bp, Homo sapiens
  misc_feature (8)..(8): n is a, c, g, or t
  misc_feature (89)..(91): n is a, c, g, or t
gacatcantacccagcccttgaaagatgagctgttcccgccgccactccagctctggcttctgggctccgaggaggggtggggacggtnnngacggtggggacatcaggctgccccgcagtaccagggagcgactgaagtgcccatgccgcttgctccggagaagcccaggtgtggcctcactcacatcccactctgagtccaaatgttctctccctggaagatatcaatgtttctgtctgttcgtgaggactccgtgcccaccacggcctctttcagcgccgacatgctcaatgtcaccttgcaagggcccactcttaacgggacctttgcccagagcaaatgcccccaagtggagtggctgggctggctcaacaccatccagccccccttcctctgggtgctgttcgtgctggccaccctagagaacatctttgtcctcagcgtcttctgcctgcacaagagcagctgcacggtggcagagatctacctggggaacctggccgcagcagacctgatcctggcctgcgggctgcccttctgggccatcaccatctccaacaacttcgactggctctttggggagacgctctgccgcgtggtgaatgccattatctccatgaacctgtacagcagcatctgtttcctgatgctggtgagcatcgaccgctacctggccctggtgaaaaccatgtccatgggccggatgcgcggcgtgcgctgggccaagctctacagcttggtgatctgggggtgtacgctgctcctgagctcacccatgctggtgttccggaccatgaaggagtacagcgatgagggccacaacgtcaccgcttgtgtcatcagctacccatccctcatctgggaagtgttcaccaacatgctcctgaatgtcgtgggcttcctgctgcccctgagtgtcatcaccttctgcacgatgcagatcatgcaggtgctgcggaacaacgagatgcagaagttcaaggagatccagacggagaggagggccacggtgctagtcctggttgtgctgctgctattcatcatctgctggctgcccttccagatcagcaccttcctggatacgctgcatcgcctcggcatcctctccagctgccaggacgagcgcatcatcgatgtaatcacacagatcgcctccttcatggcctacagcaacagctgcctcaacccactggtgtacgtgatcgtgggcaagcgcttccgaaagaagtcttgggaggtgtaccagggagtgtgccagaaagggggctgcaggtcagaacccattcagatggagaactccatgggcacactgcggacctccatctccgtggaacgccagattcacaaactgcaggactgggcagggagcagacagtgagcaaacgccagcagggctgctgtgaatttgtgtaaggattgagggacagttgcttttcagcatgggcccaggaatgccaaggagacatctatgcacgaccttgggaaatgagttgatgtctccggtaaaacaccggagactaattcctgccctgcccaattttgcagggagcatggctgtgaggatggggtgaactcacgcacagccaaggactccaaaatcacaacagcattactgttcttatttgctgccacacctgagccagcctgctccttcccaggagtggaggaggcctggggggagggagaggagtgactgagcttccctcccgtgtgttctccgtccctgccccagcaagacaacttagatctccaggagaactgccatccagctttggtgcaatggctgagtgcacaagtgagttgttgccctgggtttctttaatctattcagctagaactttgaaggacaatttcttgcattaataaaggttaagccctgaggggtccctgataacaacctggagaccaggattttatggctcccctcactgatggacaaggaggtctgtgccaaagaagaatccaataagcacatattgagcacttgctgtatatgcagtattgagcactgtaggcaagagggaagaaagagaaggagccatctccatcttgaaggaactcaaagactcaagtgggaacgactgggcactgccaccaccagaaagctgttcgacgagacggtcgagcagggtgctgtgggtgatatggacagcagaagggggagaccaaggttccagctcaaccaataactattgcacaaccacctgtccctgcctcagttcccttttatgtaacatgaagtcgttgtgagggttaaaggcagtaacaggtataaagtacttagaaaagcaaagggtgctacgtacatgtgaggcatcattacgcagacgtaactgggatatgtttactataaggaaaagacactgaggtctagaaatagctccgtggagcagaatcagtattgggagccggtggcggtgtgaagcaccagtgtctggcacacagtaggtgctcattggctcccttccacctgtcattcccaccaccctgaggccccaaccgccacacacacaggagcatttggagagaaggccatgtcttcaaagtctgatttgtgatgaggcagaggaagatatttctaatcggtcttgcccagaggatcacagtgctgagaccccccaccaccagccggtacctgggaagggggagagtgcaggcctgctcagggactgttcctgtctcagcaaccaagggattgttcctgtcaatcaatggtttattggaaggtggcccagtatgagccctagaagagtgtgaaaaggaatggcaatggtgttcaccatcggcagtgccagggcagcactcattcacttgataaatgaatatttattagctggttggagagctagaacctggagagctagaacctggagaaaggctagaacctggcaagctagaacctggagggaatgaacctggagggctagaacctggagaatgagaaaaatttacatggcaaagagcccataaatcctgaccaatccaactctgaattttaaagcaaaagcgtcaaaaaaaagattccctccttacccccaacccactcttttttcccaccacccactctcctctgcctcagtaagtatctggaggaagaaaacaggtgaaagaagaagtaaaaaccatttagtattagtattagaatgaagtcaaactgtgccacacatggtgaatgaaaaaaaaaaaaaagaggctgtgttttgtcacacagggcagtcattcagcaccagagcacgtgatggtctgagactctcttaggagcagagctctgccgcaatggccatgtggggatccacacctggtctgaggggcaactgagtctgcgggagaagagcggccctatgcatggtgtagatgccctgataaagaacatctgtcctgtgaaagactcaatgagctgttatgttgtaaacaggaagcatttcacatccaaacgagaaaatcatgtaaacatgtgtcttttctgtagagcataataaatggatgaggtttttgca

SEQ ID NO: 374773 - DNA, 4164 bp, Homo sapiens
  misc_feature (8)..(8): n is a, c, g, or t
  misc_feature (89)..(91): n is a, c, g, or t
gacatcantacccagcccttgaaagatgagctgttcccgccgccactccagctctggcttctgggctccgaggaggggtggggacggtnnngacggtggggacatcaggctgccccgcagtaccagggagcgactgaagtgcccatgccgcttgctccggagaagcccaggtgtggcctcactcacatcccactctgagtccaaatgttctctccctggaagatatcaatgtttctgtctgttcgtgaggactccgtgcccaccacggcctctttcagcgccgacatgctcaatgtcaccttgcaagggcccactcttaacgggacctttgcccagagcaaatgcccccaagtggagtggctgggctggctcaacaccatccagccccccttcctctgggtgctgttcgtgctggccaccctagagaacatctttgtcctcagcgtcttctgcctgcacaagagcagctgcacggtggcagagatctacctggggaacctggccgcagcagacctgatcctggcctgcgggctgcccttctgggccatcaccatctccaacaacttcgactggctctttggggagacgctctgccgcgtggtgaatgccattatctccatgaacctgtacagcagcatctgtttcctgatgctggtgagcatcgaccgctacctggccctggtgaaaaccatgtccatgggccggatgcgcggcgtgcgctgggccaagctctacagcttggtgatctgggggtgtacgctgctcctgagctcacccatgctggtgttccggaccatgaaggagtacagcgatgagggccacaacgtcaccgcttgtgtcatcagctacccatccctcatctgggaagtgttcaccaacatgctcctgaatgtcgtgggcttcctgctgcccctgagtgtcatcaccttctgcacgatgcagatcatgcaggtgctgcggaacaacgagatgcagaagttcaaggagatccagacggagaggagggccacggtgctagtcctggttgtgctgctgctattcatcatctgctggctgcccttccagatcagcaccttcctggatacgctgcatcgcctcggcatcctctccagctgccaggacgagcgcatcatcgatgtaatcacacagatcgcctccttcatggcctacagcaacagctgcctcaacccactggtgtacgtgatcgtgggcaagcgcttccgaaagaagtcttgggaggtgtaccagggagtgtgccagaaagggggctgcaggtcagaacccattcagatggagaactccatgggcacactgcggacctccatctccgtggaacgccagattcacaaactgcaggactgggcagggagcagacagtgagcaaacgccagcagggctgctgtgaatttgtgtaaggattgagggacagttgcttttcagcatgggcccaggaatgccaaggagacatctatgcacgaccttgggaaatgagttgatgtctccggtaaaacaccggagactaattcctgccctgcccaattttgcagggagcatggctgtgaggatggggtgaactcacgcacagccaaggactccaaaatcacaacagcattactgttcttatttgctgccacacctgagccagcctgctccttcccaggagtggaggaggcctggggggagggagaggagtgactgagcttccctcccgtgtgttctccgtccctgccccagcaagacaacttagatctccaggagaactgccatccagctttggtgcaatggctgagtgcacaagtgagttgttgccctgggtttctttaatctattcagctagaactttgaaggacaatttcttgcattaataaaggttaagccctgaggggtccctgataacaacctggagaccaggattttatggctcccctcactgatggacaaggaggtctgtgccaaagaagaatccaataagcacatattgagcacttgctgtatatgcagtattgagcactgtaggcaagagggaagaaagagaaggagccatctccatcttgaaggaactcaaagactcaagtgggaacgactgggcactgccaccaccagaaagctgttcgacgagacggtcgagcagggtgctgtgggtgatatggacagcagaagggggagaccaaggttccagctcaaccaataactattgcacaaccacctgtccctgcctcagttcccttttatgtaacatgaagtcgttgtgagggttaaaggcagtaacaggtataaagtacttagaaaagcaaagggtgctacgtacatgtgaggcatcattacgcagacgtaactgggatatgtttactataaggaaaagacactgaggtctagaaatagctccgtggagcagaatcagtattgggagccggtggcggtgtgaagcaccagtgtctggcacacagtaggtgctcattggctcccttccacctgtcattcccaccaccctgaggccccaaccgccacacacacaggagcatttggagagaaggccatgtcttcaaagtctgatttgtgatgaggcagaggaagatatttctaatcggtcttgcccagaggatcacagtgctgagaccccccaccaccagccggtacctgggaagggggagagtgcaggcctgctcagggactgttcctgtctcagcaaccaagggattgttcctgtcaatcaatggtttattggaaggtggcccagtatgagccctagaagagtgtgaaaaggaatggcaatggtgttcaccatcggcagtgccagggcagcactcattcacttgataaatgaatatttattagctggttggagagctagaacctggagagctagaacctggagaactagaacctggagggctagaacctggagaggctagaaccaagaagggctagaacctggaggggctagaacctagagaagctaaaacctgagctagaagctggaggactagaacctggagggctggaatctgaagggctagaacctggagggctggaatctggagagctagaacctggagggctagaacctggagggctagaacctagaagggctagaacctggagggctggaatctggagagctagaacctggagggctagaacctggagggctagaacctagaagggctagaacctggagggctagaacctggcaggttagaacctagaagggctagaacctggagagccagaacctggagggctagaacctggaagggctagaacctgtagagctagaacatggagagctagaacccggcaggctagaacctggcaagctagaacctggagggaatgaacctggagggctagaacctggagaatgagaaaaatttacatggcaaagagcccataaatcctgaccaatccaactctgaattttaaagcaaaagcgtcaaaaaaaagattccctccttacccccaacccactcttttttcccaccacccactctcctctgcctcagtaagtatctggaggaagaaaacaggtgaaagaagaagtaaaaaccatttagtattagtattagaatgaagtcaaactgtgccacacatggtgaatgaaaaaaaaaaaaaagaggctgtgttttgtcacacagggcagtcattcagcaccagagcacgtgatggtctgagactctcttaggagcagagctctgccgcaatggccatgtggggatccacacctggtctgaggggcaactgagtctgcgggagaagagcggccctatgcatggtgtagatgccctgataaagaacatctgtcctgtgaaagactcaatgagctgttatgttgtaaacaggaagcatttcacatccaaacgagaaaatcatgtaaacatgtgtcttttctgtagagcataataaatggatgaggtttttgcatagctctagcatttgttacaactcccgaaacccccgagtttggtccctggggtaccgccttgcacactcagaagcctttgggaaggggtgctattcatttctgctcaatctgttaacaggcttctggcatgtagatcagtggtctccaagcttttgtgattgtatattcctttccgccctccaccaccttggcaaggcagccagatgcatctccgaagtccagctcactcaggccagctctct

SEQ ID NO: 374774 - DNA, 3942 bp, Homo sapiens
agctctcccatatggtcgacctgcaggcggccgcgaattcactagtgatctgagtccaaatgttctctccctggaagatatcaatgtttctgtctgttcgtgaggactccgtgcccaccacggcctctttcaggtgaggccattgtggttcaaggacgttaagtaacttccccagcgtcacacggcttataagtaaggcagccaggatgtgaacccagtaggactatctggctgcaaagtccccaccctccctcgccatctgtatcctccaatcatcttcagtgctttgctgatagaagcgccgacatgctcaatgtcaccttgcaagggcccactcttaacgggacctttgcccagagcaaatgcccccaagtggagtggctgggctggctcaacaccatccagccccccttcctctgggtgctgttcgtgctggccaccctagagaacatctttgtcctcagcgtcttctgcctgcacaagagcagctgcacggtggcagagatctacctggggaacctggccgcagcagacctgatcctggcctgcgggctgcccttctgggccatcaccatctccaacaacttcgactggctctttggggagacgctctgccgcgtggtgaatgccattatctccatgaacctgtacagcagcatctgtttcctgatgctggtgagcatcgaccgctacctggccctggtgaaaaccatgtccatgggccggatgcgcggcgtgcgctgggccaagctctacagcttggtgatctgggggtgtacgctgctcctgagctcacccatgctggtgttccggaccatgaaggagtacagcgatgagggccacaacgtcaccgcttgtgtcatcagctacccatccctcatctgggaagtgttcaccaacatgctcctgaatgtcgtgggcttcctgctgcccctgagtgtcatcaccttctgcacgatgcagatcatgcaggtgctgcggaacaacgagatgcagaagttcaaggagatccagacggagaggagggccacggtgctagtcctggttgtgctgctgctattcatcatctgctggctgcccttccagatcagcaccttcctggatacgctgcatcgcctcggcatcctctccagctgccaggacgagcgcatcatcgatgtaatcacacagatcgcctccttcatggcctacagcaacagctgcctcaacccactggtgtacgtgatcgtgggcaagcgcttccgaaagaagtcttgggaggtgtaccagggagtgtgccagaaagggggctgcaggtcagaacccattcagatggagaactccatgggcacactgcggacctccatctccgtggaacgccagattcacaaactgcaggactgggcagggagcagacagtgagcaaacgccagcagggctgctgtgaatttgtgtaaggattgagggacagttgcttttcagcatgggcccaggaatgccaaggagacatctatgcacgaccttgggaaatgagttgatgtctccggtaaaacaccggagactaattcctgccctgcccaattttgcagggagcatggctgtgaggatggggtgaactcacgcacagccaaggactccaaaatcacaacagcattactgttcttatttgctgccacacctgagccagcctgctccttcccaggagtggaggaggcctggggggagggagaggagtgactgagcttccctcccgtgtgttctccgtccctgccccagcaagacaacttagatctccaggagaactgccatccagctttggtgcaatggctgagtgcacaagtgagttgttgccctgggtttctttaatctattcagctagaactttgaaggacaatttcttgcattaataaaggttaagccctgaggggtccctgataacaacctggagaccaggattttatggctcccctcactgatggacaaggaggtctgtgccaaagaagaatccaataagcacatattgagcacttgctgtatatgcagtattgagcactgtaggcaagagggaagaaagagaaggagccatctccatcttgaaggaactcaaagactcaagtgggaacgactgggcactgccaccaccagaaagctgttcgacgagacggtcgagcagggtgctgtgggtgatatggacagcagaagggggagaccaaggttccagctcaaccaataactattgcacaaccacctgtccctgcctcagttcccttttatgtaacatgaagtcgttgtgagggttaaaggcagtaacaggtataaagtacttagaaaagcaaagggtgctacgtacatgtgaggcatcattacgcagacgtaactgggatatgtttactataaggaaaagacactgaggtctagaaatagctccgtggagcagaatcagtattgggagccggtggcggtgtgaagcaccagtgtctggcacacagtaggtgctcattggctcccttccacctgtcattcccaccaccctgaggccccaaccgccacacacacaggagcatttggagagaaggccatgtcttcaaagtctgatttgtgatgaggcagaggaagatatttctaatcggtcttgcccagaggatcacagtgctgagaccccccaccaccagccggtacctgggaagggggagagtgcaggcctgctcagggactgttcctgtctcagcaaccaagggattgttcctgtcaatcaatggtttattggaaggtggcccagtatgagccctagaagagtgtgaaaaggaatggcaatggtgttcaccatcggcagtgccagggcagcactcattcacttgataaatgaatatttattagctggttggagagctagaacctggagagctagaacctggagaactagaacctggagggctagaacctggagaggctagaaccaagaagggctagaacctggaggggctagaacctagagaagctaaaacctgagctagaagctggaggactagaacctggagggctggaatctgaagggctagaacctggagggctggaatctggagagctagaacctggagggctagaacctggagggctagaacctagaagggctagaacctggagggctggaatctggagagctagaacctggagggctagaacctggagggctagaacctagaagggctagaacctggagggctagaacctggcaggttagaacctagaagggctagaacctggagagccagaacctggagggctagaacctggaagggctagaacctgtagagctagaacatggagagctagaacccggcaggctagaacctggcaagctagaacctggagggaatgaacctggagggctagaacctggagaatgagaaaaatttacatggcaaagagcccataaatcctgaccaatccaactctgaattttaaagcaaaagcgtcaaaaaaaagattccctccttacccccaacccactcttttttcccaccacccactctcctctgcctcagtaagtatctggaggaagaaaacaggtgaaagaagaagtaaaaaccatttagtattagtattagaatgaagtcaaactgtgccacacatggtgaatgaaaaaaaaaaaaaagaggctgtgttttgtcacacagggcagtcattcagcaccagagcacgtgatggtctgagactctcttaggagcagagctctgccgcaatggccatgtggggatccacacctggtctgaggggcaactgagtctgcgggagaagagcggccctatgcatggtgtagatgccctgataaagaacatctgtcctgtgaaagactcaatgagctgttatgttgtaaacaggaagcatttcacatccaaacgagaaaatcatgtaaacatgtgtcttttctgtagagcataataaatggatgaggtttttgca

SEQ ID NO: 374775 - DNA, 428 bp, Homo sapiens
ccctgataaagaacatctgtcctgtgaaagactcaatgagctgttatgttgtaaacaggaagcatttcacatccaaacgagaaaatcatgtaaacatgtgtcttttctgtagagcataataaatggatgaggtttttgcatagctctagcatttgttacaactcccgaaacccccgagtttggtccctggggtaccgccttgcacactcagaagcctttgggaaggggtgctattcatttctgctcaatctgttaacaggcttctggcatgtagatcagtggtctccaagcttttgtgattgtatattcctataggaaaaaaagaattgattatgcatacccagtatgtatacttattaatctgtatgaagatgtacattctaaaatataatcaaccagtagaaatttaagaaagaagatgtaaaaaa

SEQ ID NO: 374776 - DNA, 383 bp, Homo sapiens
cactcattcacttgataaatgaatatttattagctggttggagagctagaacctggagagctagaacctggagaactagaacctggagggctagaacctggagaggctagaaccaagaagggctagaacctggaggggctagaacctagagaagctaaaacctgagctagaagctggaggactagaacctggagggctggaatctggagagctagaacctggagggctagaacctggagggctagaatctggagagctagaacctggagggctagaatctggagagctagaacctggagggctagaacctggagagctagaacctgaagggctagaacctggagggctggaatctggagagctagaacctggagggctagaac

SEQ ID NO: 374777 - DNA, 3921 bp, Homo sapiens
  misc_feature (8)..(8): n is a, c, g, or t
  misc_feature (89)..(91): n is a, c, g, or t
gacatcantacccagcccttgaaagatgagctgttcccgccgccactccagctctggcttctgggctccgaggaggggtggggacggtnnngacggtggggacatcaggctgccccgcagtaccagggagcgactgaagtgcccatgccgcttgctccggagaagcccaggtgtggcctcactcacatcccactctgagtccaaatgttctctccctggaagatatcaatgtttctgtctgttcgtgaggactccgtgcccaccacggcctctttcagcgccgacatgctcaatgtcaccttgcaagggcccactcttaacgggacctttgcccagagcaaatgcccccaagtggagtggctgggctggctcaacaccatccagccccccttcctctgggtgctgttcgtgctggccaccctagagaacatctttgtcctcagcgtcttctgcctgcacaagagcagctgcacggtggcagagatctacctggggaacctggccgcagcagacctgatcctggcctgcgggctgcccttctgggccatcaccatctccaacaacttcgactggctctttggggagacgctctgccgcgtggtgaatgccattatctccatgaacctgtacagcagcatctgtttcctgatgctggtgagcatcgaccgctacctggccctggtgaaaaccatgtccatgggccggatgcgcggcgtgcgctgggccaagctctacagcttggtgatctgggggtgtacgctgctcctgagctcacccatgctggtgttccggaccatgaaggagtacagcgatgagggccacaacgtcaccgcttgtgtcatcagctacccatccctcatctgggaagtgttcaccaacatgctcctgaatgtcgtgggcttcctgctgcccctgagtgtcatcaccttctgcacgatgcagatcatgcaggtgctgcggaacaacgagatgcagaagttcaaggagatccagacggagaggagggccacggtgctagtcctggttgtgctgctgctattcatcatctgctggctgcccttccagatcagcaccttcctggatacgctgcatcgcctcggcatcctctccagctgccaggacgagcgcatcatcgatgtaatcacacagatcgcctccttcatggcctacagcaacagctgcctcaacccactggtgtacgtgatcgtgggcaagcgcttccgaaagaagtcttgggaggtgtaccagggagtgtgccagaaagggggctgcaggtcagaacccattcagatggagaactccatgggcacactgcggacctccatctccgtggaacgccagattcacaaactgcaggactgggcagggagcagacagtgagcaaacgccagcagggctgctgtgaatttgtgtaaggattgagggacagttgcttttcagcatgggcccaggaatgccaaggagacatctatgcacgaccttgggaaatgagttgatgtctccggtaaaacaccggagactaattcctgccctgcccaattttgcagggagcatggctgtgaggatggggtgaactcacgcacagccaaggactccaaaatcacaacagcattactgttcttatttgctgccacacctgagccagcctgctccttcccaggagtggaggaggcctggggggagggagaggagtgactgagcttccctcccgtgtgttctccgtccctgccccagcaagacaacttagatctccaggagaactgccatccagctttggtgcaatggctgagtgcacaagtgagttgttgccctgggtttctttaatctattcagctagaactttgaaggacaatttcttgcattaataaaggttaagccctgaggggtccctgataacaacctggagaccaggattttatggctcccctcactgatggacaaggaggtctgtgccaaagaagaatccaataagcacatattgagcacttgctgtatatgcagtattgagcactgtaggcaagagggaagaaagagaaggagccatctccatcttgaaggaactcaaagactcaagtgggaacgactgggcactgccaccaccagaaagctgttcgacgagacggtcgagcagggtgctgtgggtgatatggacagcagaagggggagaccaaggttccagctcaaccaataactattgcacaaccacctgtccctgcctcagttcccttttatgtaacatgaagtcgttgtgagggttaaaggcagtaacaggtataaagtacttagaaaagcaaagggtgctacgtacatgtgaggcatcattacgcagacgtaactgggatatgtttactataaggaaaagacactgaggtctagaaatagctccgtggagcagaatcagtattgggagccggtggcggtgtgaagcaccagtgtctggcacacagtaggtgctcattggctcccttccacctgtcattcccaccaccctgaggccccaaccgccacacacacaggagcatttggagagaaggccatgtcttcaaagtctgatttgtgatgaggcagaggaagatatttctaatcggtcttgcccagaggatcacagtgctgagaccccccaccaccagccggtacctgggaagggggagagtgcaggcctgctcagggactgttcctgtctcagcaaccaagggattgttcctgtcaatcaatggtttattggaaggtggcccagtatgagccctagaagagtgtgaaaaggaatggcaatggtgttcaccatcggcagtgccagggcagcactcattcacttgataaatgaatatttattagctggttggagagctagaacctggagagctagaacctggagaactagaacctggagggctagaacctggagaggctagaaccaagaagggctagaacctggaggggctagaacctagagaagctaaaacctgagctagaagctggaggactagaacctggagggctggaatctgaagggctagaacctggagggctggaatctggagagctagaacctggagggctagaacctggagggctagaacctagaagggctagaacctggagggctggaatctggagagctagaacctggagggctagaacctggagggctagaacctagaagggctagaacctggagggctagaacctggcaggttagaacctagaagggctagaacctggagagccagaacctggagggctagaacctggaagggctagaacctgtagagctagaacatggagagctagaacccggcaggctagaacctggcaagctagaacctggagggaatgaacctggagggctagaacctggagaatgagaaaaatttacatggcaaagagcccataaatcctgaccaatccaactctgaattttaaagcaaaagcgtcaaaaaaaagattccctccttacccccaacccactcttttttcccaccacccactctcctctgcctcagtaagtatctggaggaagaaaacaggtgaaagaagaagtaaaaaccatttagtattagtattagaatgaagtcaaactgtgccacacatggtgaatgaaaaaaaaaaaaaagaggctgtgttttgtcacacagggcagtcattcagcaccagagcacgtgatggtctgagactctcttaggagcagagctctgccgcaatggccatgtggggatccacacctggtctgaggggcaactgagtctgcgggagaagagcggccctatgcatggtgtagatgccctgataaagaacatctgtcctgtgaaagactcaatgagctgttatgttgtaaacaggaagcatttcacatccaaacgagaaaatcatgtaaacatgtgtcttttctgtagagcataataaatggatgaggtttttgca

SEQ ID NO: 374778 - DNA, 437 bp, Homo sapiens
gaattcttctcccatcttgtggttgaatatgctgagacagaggatattgtcctactttccacctcattcaagaagaagaaaatgctaagtatgaatttccagttttctccagtccctttcctgttgctaaatgaagatcattccatcattgtgtatcaaatgcagcatttgtgaaaatacctcccgatcatctttcacaggaattctttccaagtgagaaagccaccataaaagaagaaggccaccattgtatttatgaactatgccctgatatatttcaggaggctggtgaacactcattgtaacatttaagactttgtacaatttaatcacattcaggagtaatgaatgaagttaagactgacataaagcccagtattctcagcaggatggcatgtggcaaattcacagcaataaaataacaacatacattgaaa

SEQ ID NO: 374779 - DNA, 2737 bp, Homo sapiens
ggggattctcggagcactgtcgggcctactgggaccatggaccgtctccaccagcaacctagtgcatcgtgagtgttgctggtggggccactcgggctgccctgaccgtgcaccaggctcggaggaacaacatggctgacgtgtcagccaaggacagcagccaggagacgctggtgaacctggcggggctcttggtcagcctcctgatgctccctctggtgtcaggttgccctggcttcagccttggatgtttcttcttcctcactgccctccacatctacgccaactaccgcgcggtccgagccctggtcatggagaccttgaacgaaggccggctccggctggtcctgaagcactaccttcagaggggagaggtactcgacccaactgcagccaatcgcatggagccgctgtggacaggtttctggccagctccgtctctatccctgggggtccccttacaccgcttggtctccagtgtctttgagctgcagcagctggttgaggggcaccaagaatcctacctcctctgctgggaccagtcacaaaaccaggtacaggtagttctgaaccagaaggcaggccccaagaccatcctaagggccgccacacatgggctgatgcttggggccctgcagggagatggaccccttccagcagagctggaggagctgaggaaccgggtgcgggcaggtcctaagaaagagagctgggtcgtcgtcaaggagacacacgaagtgttggacatgctgttcccaaagttcttgaaaggactgcaggatgccggctggaagaccgagaagcaccagctagaggtggatgagtggagggccacatggcttctgtctcccgaaaagaaggtcttgtgagcagcccagacggaggcccaagcccagggcaggaacctggagcaaggacactttggccacagcaggacaggggaaaggcagctttatttttccttagggcaactgcagcgggtgggccaggccctcatgggaagtgactgccaatcagatgcagtgggccccaggcagaggaaggccgggagaaggggagccaggaccttctcaccccactgccccttccccttttctggggagcaccgcaggctcctcacccccacttcctgtgaggctgtggcttatggtgtccaacgcagttggtcttaggcatagaagccccagaggaacacggccactgccatcatgagcagggcattgaggttgaccacacgggcccagctcgggtcctcgctgatgtcctccagccgcctggctgctgccgctgcctcctcctgggtaaggggcggaggactgcccaccccacctctgctcattccacaaaaccagagcaggcactggcggaagaggcttggtgccggggcctggggctctgagggaaattgaggccctgcagttagtttgcgggaactcagctcctccagccccacctcccagcatggtgccctaccattcatctccatggcactctctgggcacccattctgtacagggagtgaggagccttgctgctcatcagcatccaggtcctcccgttcctccttgctatgccggagactgaagaccaggcggtggagctggggagggtgggagcacgaacgaggtgggagttctgtccccccatgcctggccctaaagtctcttgcacaccagctcgtcactgcctgccctacccacctctgtccagtctacacacccagcccaggcttaactcatgccaactccaccctacatggctgccctgtgccctcgggataaaccccaagcccctgagcttgtgtttaaagccgttggccttgctcccccagctttgtcagctcaggtctgtctacacccagatggtagcgcttgtgacactggcctggcagtcctgctcacagtgttctgtgcctgtgtgctcccaccctttcctcctgctgctgcagaaacccggccatccttccacacccagatctcttgtcctgtcctcaccccaccctgccaccatcagccctgcctggagccacctgccctttggcaacaaaaccaaacctttttgtgggcgttcaagatggtattgtgcccaccagtcagatcctgtgttttgagtcccaaaggccatgccaaggattggctttgggaggctttaatcaccaacccatcaacatcaagcctcccccaggccggttcaaataaatgtatttaaataaaaaaaaaaaccagcacaagaaatacaccagacaatacagagaaagaagaaaaacaccacgcacacacgcaacaccaccgcacaaccacaaacacacagcaaagacccacccaccacaccaccacaccaacacacccactccccaccccacaagcaacacgaccgccacacaacaccacaccccccaccgccgcgcccacacactaccacgagccggcacaccacgcagacgcaacaagtacgagccagccaacgaataaagagcgaccaaaagcccaaccacaacagagcatcacgcccccaggcagtcatccgtgccagtgctacgggtacaagatgggatcaaacaaatctgttataggagcctgacctcccgctgcgggcacaggtagactgtcattctcctcgctcggacatcgaccatagccactcttattgtcgtcgatgatgcatcatggcccgcataaatacttactacgtaacgcgtgagcaccacacaccaacgcggccgaacagtctattcacg

SEQ ID NO: 374780 - DNA, 299 bp, Homo sapiens
gagagagagagagagagagagagagagagagagagagagagagagagagagagagagagtctcttgtcctgtcctcaccccaccctgccaccatcagccctgcctggagccacctgccctttggcaacaaaaccaaacctttttgtgggcgttcaagatggtattgtgcccaccagtcagatcctgtgttttgagtcccaaaggccatgccaaggattggctttgggaggctttaatcaccaacccatcaacatcaagcctcccccaggccggttcaaataaatgtatttaaataaaaa

SEQ ID NO: 374781 - DNA, 2781 bp, Homo sapiens
gggcggggctgggatccaaaagctcggcatggctgacgacgcgggtttggagaccccgctgtgttccgagcagttcggctccggggaggcacggggctgccgcgccgccgcggacgggagcctgcagtgggaggtcgggggctggcgctggtgggggctctccagggccttcacggtcaaacctgaaggacgagatgcgggcgaagtgggggcttccggggccccctcaccgcccctctccgggctccaggccgtgttcctgcctcagggcttccctgatagcgtcagcccggactacttgccctaccagctgtgggattccgtgcaggcgtttgcttccagcctctccggctccctagccacccaggcagtcttgctgggcataggggtggggaacgcaaaagccactgtttcagctgccacggccacctggctcgtgaaagattcaactggcatgctgggccgcatcgtctttgcctggtggaaagggagcaaactggactgcaatgccaagcagtggaggctttttgcggacatcctcaatgacgtagccatgttccttgagattatggctcctgtatacccaatctgtttcaccatgaccgtctccaccagcaacctagccaagtgcatcgtgagtgttgctggtggggccactcgggctgccctgaccgtgcaccaggctcggaggaacaacatggctgacgtgtcagccaaggacagcagccaggagacgctggtgaacctggcggggctcttggtcagcctcctgatgctccctctggtgtcaggttgccctggcttcagccttggatgtttcttcttcctcactgccctccacatctacgccaactaccgcgcggtccgagccctggtcatggagaccttgaacgaaggccggctccggctggtcctgaagcactaccttcagaggggagaggtactcgacccaactgcagccaatcgcatggagccgctgtggacaggtttctggccagctccgtctctatccctgggggtccccttacaccgcttggtctccagtgtctttgagctgcagcagctggttgaggggcaccaagaatcctacctcctctgctgggaccagtcacaaaaccaggtacaggtagttctgaaccagaaggcaggccccaagaccatcctaagggccgccacacatgggctgatgcttggggccctgcagggagatggaccccttccagcagagctggaggagctgaggaaccgggtgcgggcaggtcctaagaaagagagctgggtcgtcgtcaaggagacacacgaagtgttggacatgctgttcccaaagttcttgaaaggactgcaggatgccggctggaagaccgagaagcaccagctagaggtggatgagtggagggccacatggcttctgtctcccgaaaagaaggtcttgtgagcagcccagacggaggcccaagcccagggcaggaacctggagcaaggacactttggccacagcaggacaggggaaaggcagctttatttttccttagggcaactgcagcgggtgggccaggccctcatgggaagtgactgccaatcagatgcagtgggccccaggcagaggaaggccgggagaaggggagccaggaccttctcaccccactgccccttccccttttctggggagcaccgcaggctcctcacccccacttcctgtgaggctgtggcttatggtgtccaacgcagttggtcttaggcatagaagccccagaggaacacggccactgccatcatgagcagggcattgaggttgaccacacgggcccagctcgggtcctcgctgatgtcctccagccgcctggctgctgccgctgcctcctcctgggtaaggggcggaggactgcccaccccacctctgctcattccacaaaaccagagcaggcactggcggaagaggcttggtgccggggcctggggctctgagggaaattgaggccctgcagttagtttgcgggaactcagctcctccagccccacctcccagcatggtgccctaccattcatctccatggcactctctgggcacccattctgtacagggagtgaggagccttgctgctcatcagcatccaggtcctcccgttcctccttgctatgccggagactgaagaccaggcggtggagctggggagggtgggagcacgaacgaggtgggagttctgtccccccatgcctggccctaaagtctcttgcacaccagctcgtcactgcctgccctacccacctctgtccagtctacacacccagcccaggcttaactcatgccaactccaccctacatggctgccctgtgccctcgggataaaccccaagcccctgagcttgtgtttaaagccgttggccttgctcccccagctttgtcagctcaggtctgtctacacccagatggtagcgcttgtgacactggcctggcagtcctgctcacagtgttctgtgcctgtgtgctcccaccctttcctcctgctgctgcagaaacccggccatccttccacacccagatctcttgtcctgtcctcaccccaccctgccaccatcagccctgcctggagccacctgccctttggcaacaaaaccaaacctttttgtgggcgttcaagatggtattgtgcccaccagtcagatcctgtgttttgagtcccaaaggccatgccaaggattggctttgggaggctttaatcaccaacccatcaacatcaagcctcccccaggccggttcaaataaatgtatttaaataaaaa

SEQ ID NO: 374782 - DNA, 2859 bp, Homo sapiens
gggcggggctgggatccaaaagctcggcatggctgacgacgcgggtttggagaccccgctgtgttccgagcagttcggctccggggaggcacggggctgccgcgccgccgcggacgggagcctgcagtgggaggtcgggggctggcgctggtgggggctctccagggccttcacggtcaaacctgaaggacgagatgcgggcgaagtgggggcttccggggccccctcaccgcccctctccgggctccaggccgtgttcctgcctcagggcttccctgatagcgtcagcccggactacttgccctaccagctgtgggattccgtgcaggcgtttgcttccagcctctccggctccctagccacccaggcagtcttgctgggcataggggtggggaacgcaaaagccactgtttcagctgccacggccacctggctcgtgaaagattcaactggcatgctgggccgcatcgtctttgcctggtggaaagggagcaaactggactgcaatgccaagcagtggaggctttttgcggacatcctcaatgacgtagccatgttccttgagattatggctcctgtatacccaatctgtttcaccatgaccgtctccaccagcaacctagccaagtgcatcgtgagtgttgctggtggggccactcgggctgccctgaccgtgcaccaggctcggaggaacaacatggctgacgtgtcagccaaggacagcagccaggagacgctggtgaacctggcggggctcttggtcagcctcctgatgctccctctggtgtcaggttgccctggcttcagccttggatgtttcttcttcctcactgccctccacatctacgccaactaccgcgcggtccgagccctggtcatggagaccttgaacgaaggccggctccggctggtcctgaagcactaccttcagaggggagaggtactcgacccaactgcagccaatcgcatggagccgctgtggacaggtgaccctgcccctggtctcgggtcctgtgtctcaacctctcccactgcctaggcatcctgaccccagcttcccacaggtttctggccagctccgtctctatccctgggggtccccttacaccgcttggtctccagtgtctttgagctgcagcagctggttgaggggcaccaagaatcctacctcctctgctgggaccagtcacaaaaccaggtacaggtagttctgaaccagaaggcaggccccaagaccatcctaagggccgccacacatgggctgatgcttggggccctgcagggagatggaccccttccagcagagctggaggagctgaggaaccgggtgcgggcaggtcctaagaaagagagctgggtcgtcgtcaaggagacacacgaagtgttggacatgctgttcccaaagttcttgaaaggactgcaggatgccggctggaagaccgagaagcaccagctagaggtggatgagtggagggccacatggcttctgtctcccgaaaagaaggtcttgtgagcagcccagacggaggcccaagcccagggcaggaacctggagcaaggacactttggccacagcaggacaggggaaaggcagctttatttttccttagggcaactgcagcgggtgggccaggccctcatgggaagtgactgccaatcagatgcagtgggccccaggcagaggaaggccgggagaaggggagccaggaccttctcaccccactgccccttccccttttctggggagcaccgcaggctcctcacccccacttcctgtgaggctgtggcttatggtgtccaacgcagttggtcttaggcatagaagccccagaggaacacggccactgccatcatgagcagggcattgaggttgaccacacgggcccagctcgggtcctcgctgatgtcctccagccgcctggctgctgccgctgcctcctcctgggtaaggggcggaggactgcccaccccacctctgctcattccacaaaaccagagcaggcactggcggaagaggcttggtgccggggcctggggctctgagggaaattgaggccctgcagttagtttgcgggaactcagctcctccagccccacctcccagcatggtgccctaccattcatctccatggcactctctgggcacccattctgtacagggagtgaggagccttgctgctcatcagcatccaggtcctcccgttcctccttgctatgccggagactgaagaccaggcggtggagctggggagggtgggagcacgaacgaggtgggagttctgtccccccatgcctggccctaaagtctcttgcacaccagctcgtcactgcctgccctacccacctctgtccagtctacacacccagcccaggcttaactcatgccaactccaccctacatggctgccctgtgccctcgggataaaccccaagcccctgagcttgtgtttaaagccgttggccttgctcccccagctttgtcagctcaggtctgtctacacccagatggtagcgcttgtgacactggcctggcagtcctgctcacagtgttctgtgcctgtgtgctcccaccctttcctcctgctgctgcagaaacccggccatccttccacacccagatctcttgtcctgtcctcaccccaccctgccaccatcagccctgcctggagccacctgccctttggcaacaaaaccaaacctttttgtgggcgttcaagatggtattgtgcccaccagtcagatcctgtgttttgagtcccaaaggccatgccaaggattggctttgggaggctttaatcaccaacccatcaacatcaagcctcccccaggccggttcaaataaatgtatttaaataaaaa

SEQ ID NO: 374783 - DNA, 3277 bp, Homo sapiens
gggcggggctgggatccaaaagctcggcatggctgacgacgcgggtttggagaccccgctgtgttccgagcagttcggctccggggaggcacggggctgccgcgccgccgcggacgggagcctgcagtgggaggtcgggggctggcgctggtgggggctctccagggccttcacggtcaaacctgaaggacgagatgcgggcgaagtgggggcttccggggccccctcaccgcccctctccgggctccaggccgtgttcctgcctcagggcttccctgatagcgtcagcccggactacttgccctaccagctgtgggattccgtgcaggcgtttgcttccagcctctccggctccctagccacccaggcagtcttgctgggcataggggtggggaacgcaaaagccactgtttcagctgccacggccacctggctcgtgaaagattcaactggcatgctgggccgcatcgtctttgcctggtggaaagggagcaaactggactgcaatgccaagcagtggaggctttttgcggacatcctcaatgacgtagccatgttccttgagattatggctcctgtatacccaatctgtttcaccatgaccgtctccaccagcaacctagccaagtgcatcgtgagtgttgctggtggggccactcgggctgccctgaccgtgcaccaggctcggaggaacaacatggctgacgtgtcagccaaggacagcagccaggagacgctggtgaacctggcggggctcttggtcagcctcctgatgctccctctggtgtcaggttgccctggcttcagccttggatgtttcttcttcctcactgccctccacatctacgccaactaccgcgcggtccgagccctggtcatggagaccttgaacgaaggccggctccggctggtcctgaagcactaccttcagaggggagaggtactcgacccaactgcagccaatcgcatggagccgctgtggacaggtgaccctgcccctggtctcgggtcctgtgtctcaacctctcccactgcctaggcatcctgaccccagcttcccacaggtttctggccagctccgtctctatccctgggggtccccttacaccgcttggtctccaggtgagtggcctagcgtctcccgctcgtcaccaccgccacccacactcccctcactccgattacacactggcctccctggcaaggccccacctctctgtcctgggttcttcattgctgctgaacagacatggggttggtgtgggtgtgtgaggaaggaaagggtgtataacatgaagcagatgtaagagatgtgcttgatgggtgaaggaaggatgggtagatggggaagttggatgactggatacaggaagaaaggatggatttggtgtgtatgggtaatggctgagggagagaggaagcgaggggacctgagtgaagcctggatcatttcagttcactgggtggctgttcagtggctggttgggcatgcctgcctttgctgtcctccacccccactgcactgtcctctcccccacagtgtctttgagctgcagcagctggttgaggggcaccaagaatcctacctcctctgctgggaccagtcacaaaaccaggtacaggtagttctgaaccagaaggcaggccccaagaccatcctaagggccgccacacatgggctgatgcttggggccctgcagggagatggaccccttccagcagagctggaggagctgaggaaccgggtgcgggcaggtcctaagaaagagagctgggtcgtcgtcaaggagacacacgaagtgttggacatgctgttcccaaagttcttgaaaggactgcaggatgccggctggaagaccgagaagcaccagctagaggtggatgagtggagggccacatggcttctgtctcccgaaaagaaggtcttgtgagcagcccagacggaggcccaagcccagggcaggaacctggagcaaggacactttggccacagcaggacaggggaaaggcagctttatttttccttagggcaactgcagcgggtgggccaggccctcatgggaagtgactgccaatcagatgcagtgggccccaggcagaggaaggccgggagaaggggagccaggaccttctcaccccactgccccttccccttttctggggagcaccgcaggctcctcacccccacttcctgtgaggctgtggcttatggtgtccaacgcagttggtcttaggcatagaagccccagaggaacacggccactgccatcatgagcagggcattgaggttgaccacacgggcccagctcgggtcctcgctgatgtcctccagccgcctggctgctgccgctgcctcctcctgggtaaggggcggaggactgcccaccccacctctgctcattccacaaaaccagagcaggcactggcggaagaggcttggtgccggggcctggggctctgagggaaattgaggccctgcagttagtttgcgggaactcagctcctccagccccacctcccagcatggtgccctaccattcatctccatggcactctctgggcacccattctgtacagggagtgaggagccttgctgctcatcagcatccaggtcctcccgttcctccttgctatgccggagactgaagaccaggcggtggagctggggagggtgggagcacgaacgaggtgggagttctgtccccccatgcctggccctaaagtctcttgcacaccagctcgtcactgcctgccctacccacctctgtccagtctacacacccagcccaggcttaactcatgccaactccaccctacatggctgccctgtgccctcgggataaaccccaagcccctgagcttgtgtttaaagccgttggccttgctcccccagctttgtcagctcaggtctgtctacacccagatggtagcgcttgtgacactggcctggcagtcctgctcacagtgttctgtgcctgtgtgctcccaccctttcctcctgctgctgcagaaacccggccatccttccacacccagatctcttgtcctgtcctcaccccaccctgccaccatcagccctgcctggagccacctgccctttggcaacaaaaccaaacctttttgtgggcgttcaagatggtattgtgcccaccagtcagatcctgtgttttgagtcccaaaggccatgccaaggattggctttgggaggctttaatcaccaacccatcaacatcaagcctcccccaggccggttcaaataaatgtatttaaataaaaa

SEQ ID NO: 374784 - DNA, 2637 bp, Homo sapiens
gggcggggctgggatccaaaagctcggcatggctgacgacgcgggtttggagaccccgctgtgttccgagcagttcggctccggggaggcacggggctgccgcgccgccgcggacgggagcctgcagtgggaggtcgggggctggcgctggtgggggctctccagggccttcacggtcaaacctgaaggacgagatgcgggcgaagtgggggcttccggggccccctcaccgcccctctccgggctccaggccgtgttcctgcctcagggcttccctgatagcgtcagcccggactacttgccctaccagctgtgggattccgtgcaggcgtttgcttccagcctctccggctccctagccacccaggcagtcttgctgggcataggggtggggaacgcaaaagccactgtttcagctgccacggccacctggctcgtgaaagattcaactggcatgctgggccgcatcgtctttgcctggtggaaagggagcaaactggactgcaatgccaagcagtggaggctttttgcggacatcctcaatgacgtagccatgttccttgagattatggctcctgtatacccaatctgtttcaccatgaccgtctccaccagcaacctagccaagtgcatcgtgagtgttgctggtggggccactcgggctgccctgaccgtgcaccaggctcggaggaacaacatggctgacgtgtcagccaaggacagcagccaggagacgctggtgaacctggcggggctcttggtcagcctcctgatgctccctctggtgtcaggttgccctggcttcagccttggatgtttcttcttcctcactgccctccacatctacgccaactaccgcgcggtccgagccctggtcatggagaccttgaacgaaggccggctccggctggtcctgaagcactaccttcagaggggagaggtactcgacccaactgcagccaatcgcatggagccgctgtggacaggtttctggccagctccgtctctatccctgggggtccccttacaccgcttggtctccagtgtctttgagctgcagcagctggttgaggggcaccaagaatcctacctcctctgctgggaccagtcacaaagtcctaagaaagagagctgggtcgtcgtcaaggagacacacgaagtgttggacatgctgttcccaaagttcttgaaaggactgcaggatgccggctggaagaccgagaagcaccagctagaggtggatgagtggagggccacatggcttctgtctcccgaaaagaaggtcttgtgagcagcccagacggaggcccaagcccagggcaggaacctggagcaaggacactttggccacagcaggacaggggaaaggcagctttatttttccttagggcaactgcagcgggtgggccaggccctcatgggaagtgactgccaatcagatgcagtgggccccaggcagaggaaggccgggagaaggggagccaggaccttctcaccccactgccccttccccttttctggggagcaccgcaggctcctcacccccacttcctgtgaggctgtggcttatggtgtccaacgcagttggtcttaggcatagaagccccagaggaacacggccactgccatcatgagcagggcattgaggttgaccacacgggcccagctcgggtcctcgctgatgtcctccagccgcctggctgctgccgctgcctcctcctgggtaaggggcggaggactgcccaccccacctctgctcattccacaaaaccagagcaggcactggcggaagaggcttggtgccggggcctggggctctgagggaaattgaggccctgcagttagtttgcgggaactcagctcctccagccccacctcccagcatggtgccctaccattcatctccatggcactctctgggcacccattctgtacagggagtgaggagccttgctgctcatcagcatccaggtcctcccgttcctccttgctatgccggagactgaagaccaggcggtggagctggggagggtgggagcacgaacgaggtgggagttctgtccccccatgcctggccctaaagtctcttgcacaccagctcgtcactgcctgccctacccacctctgtccagtctacacacccagcccaggcttaactcatgccaactccaccctacatggctgccctgtgccctcgggataaaccccaagcccctgagcttgtgtttaaagccgttggccttgctcccccagctttgtcagctcaggtctgtctacacccagatggtagcgcttgtgacactggcctggcagtcctgctcacagtgttctgtgcctgtgtgctcccaccctttcctcctgctgctgcagaaacccggccatccttccacacccagatctcttgtcctgtcctcaccccaccctgccaccatcagccctgcctggagccacctgccctttggcaacaaaaccaaacctttttgtgggcgttcaagatggtattgtgcccaccagtcagatcctgtgttttgagtcccaaaggccatgccaaggattggctttgggaggctttaatcaccaacccatcaacatcaagcctcccccaggccggttcaaataaatgtatttaaataaaaa

SEQ ID NO: 374785 - DNA, 3303 bp, Homo sapiens
gggcggggctgggatccaaaagctcggcatggctgacgacgcgggtttggagaccccgctgtgttccgagcagttcggctccggggaggcacggggctgccgcgccgccgcggacgggagcctgcagtgggaggtcgggggctggcgctggtgggggctctccagggccttcacggtcaaacctgaaggacgagatgcgggcgaagtgggggcttccggggccccctcaccgcccctctccgggctccaggccgtgttcctgcctcagggcttccctgatagcgtcagcccggactacttgccctaccagctgtgggattccgtgcaggcgtttgcttccagcctctccggctccctagccacccaggcagtcttgctgggcataggggtggggaacgcaaaagccactgtttcagctgccacggccacctggctcgtgaaagattcaactggcatgctgggccgcatcgtctttgcctggtggaaagggagcaaactggactgcaatgccaagcagtggaggctttttgcggacatcctcaatgacgtagccatgttccttgagattatggctcctgtatacccaatctgtttcaccatgaccgtctccaccagcaacctagccaagtgcatcgtgagtgttgctggtggggccactcgggctgccctgaccgtgcaccaggctcggaggaacaacatggctgacgtgtcagccaaggacagcagccaggagacgctggtgaacctggcggggctcttggtcagcctcctgatgctccctctggtgtcaggttgccctggcttcagccttggatgtttcttcttcctcactgccctccacatctacgccaactaccgcgcggtccgagccctggtcatggagaccttgaacgaaggccggctccggctggtcctgaagcactaccttcagaggggagaggtactcgacccaactgcagccaatcgcatggagccgctgtggacaggtttctggccagctccgtctctatccctgggggtccccttacaccgcttggtctccagtgtctttgagctgcagcagctggttgaggggcaccaagaatcctacctcctctgctgggaccagtcacaaaaccaggtacaggtagttctgaaccagaaggcaggccccaagaccatcctaagggccgccacacatgggctgatgcttggggccctgcagggagatggaccccttccagcagagctggaggagctgaggaaccgggtgcgggcaggtcctaagaaagagagctgggtcgtcgtcaaggagacacacgaagtgttggacatgctgttcccaaagttcttgaaaggactgcaggatgccggctggaagaccgagaagcaccagctagaggtggatgagtggagggccacatggcttctgtctcccgaaaagaaggtcttgtgagcagcccagacggaggcccaagcccagggcaggaacctggagcaaggacactttggccacagcaggacaggggaaaggcagctttatttttccttagggcaactgcagcgggtgggccaggccctcatgggaagtgactgccaatcagatgcagtgggccccaggcagaggaaggccgggagaaggggagccaggaccttctcaccccactgccccttccccttttctggggagcaccgcaggctcctcacccccacttcctgtgaggctgtggcttatggtgtccaacgcagttggtcttaggcatagaagccccagaggaacacggccactgccatcatgagcagggcattgaggttgaccacacgggcccagctcgggtcctcgctgatgtcctccagccgcctggctgctgccgctgcctcctcctgggtaaggggcggaggactgcccaccccacctctgctcattccacaaaaccagagcaggcactggcggaagaggcttggtgccggggcctggggctctgagggaaattgaggccctgcagttagtttgcgggaactcagctcctccagccccacctcccagcatggtgccctaccattcatctccatggcactctctgggcacccattctgtacagggagtgaggagccttgctgctcatcagcatccaggtcctcccgttcctccttgctatgccggagactgaagaccaggcggtggagctggggagggtgggagcacgaacgaggtgggagttctgtccccccatgcctggccctaaagtctcttgcacaccagctcgtcactgcctgccctacccacctctgtccagtctacacacccagcccaggcttaactcatgccaactccaccctacatggctgccctgtgccctcgggataaaccccaagcccctgagcttgtgtttaaagccgttggccttgctcccccagctttgtcagctcaggtctgtctacacccagatggtagcgcttgtgacactggcctggcagtcctgctcacagtgttctgtgcctgtgtgctcccaccctttcctcctgctgctgcagaaacccggccatccttccacacccagatctcttgtcctgtcctcaccccaccctgccaccatcagccctgcctggagccacctgccctttggcaacaaaaccaaacctttttgtgggcgttcaagatggtattgtgcccaccagtcagatcctgtgttttgagtcccaaaggccatgccaaggattggctttgggaggctttaatcaccaacccatcaacatcaagcctcccccaggccggttcaaataaatgtatttaaataaaaaaaaaaaccagcacaagaaatacaccagacaatacagagaaagaagaaaaacaccacgcacacacgcaacaccaccgcacaaccacaaacacacagcaaagacccacccaccacaccaccacaccaacacacccactccccaccccacaagcaacacgaccgccacacaacaccacaccccccaccgccgcgcccacacactaccacgagccggcacaccacgcagacgcaacaagtacgagccagccaacgaataaagagcgaccaaaagcccaaccacaacagagcatcacgcccccaggcagtcatccgtgccagtgctacgggtacaagatgggatcaaacaaatctgttataggagcctgacctcccgctgcgggcacaggtagactgtcattctcctcgctcggacatcgaccatagccactcttattgtcgtcgatgatgcatcatggcccgcataaatacttactacgtaacgcgtgagcaccacacaccaacgcggccgaacagtctattcacg

SEQ ID NO: 374786 - DNA, 2313 bp, Homo sapiens
  misc_feature (54)..(54): n is a, c, g, or t
ctttgcctggtggcccgggcgccccctgcgccctgccctgccccgccgtggccngctttttgcggacatcctcaatgacgtagccatgttccttgagattatggctcctgtatacccaatctgtttcaccatgaccgtctccaccagcaacctagccaagtgcatcgtgagtgttgctggtggggccactcgggctgccctgaccgtgcaccaggctcggaggaacaacatggctgacgtgtcagccaaggacagcagccaggagacgctggtgaacctggcggggctcttggtcagcctcctgatgctccctctggtgtcaggttgccctggcttcagccttggatgtttcttcttcctcactgccctccacatctacgccaactaccgcgcggtccgagccctggtcatggagaccttgaacgaaggccggctccggctggtcctgaagcactaccttcagaggggagaggtactcgacccaactgcagccaatcgcatggagccgctgtggacaggtttctggccagctccgtctctatccctgggggtccccttacaccgcttggtctccagtgtctttgagctgcagcagctggttgaggggcaccaagaatcctacctcctctgctgggaccagtcacaaaaccaggtacaggtagttctgaaccagaaggcaggccccaagaccatcctaagggccgccacacatgggctgatgcttggggccctgcagggagatggaccccttccagcagagctggaggagctgaggaaccgggtgcgggcaggtcctaagaaagagagctgggtcgtcgtcaaggagacacacgaagtgttggacatgctgttcccaaagttcttgaaaggactgcaggatgccggctggaagaccgagaagcaccagctagaggtggatgagtggagggccacatggcttctgtctcccgaaaagaaggtcttgtgagcagcccagacggaggcccaagcccagggcaggaacctggagcaaggacactttggccacagcaggacaggggaaaggcagctttatttttccttagggcaactgcagcgggtgggccaggccctcatgggaagtgactgccaatcagatgcagtgggccccaggcagaggaaggccgggagaaggggagccaggaccttctcaccccactgccccttccccttttctggggagcaccgcaggctcctcacccccacttcctgtgaggctgtggcttatggtgtccaacgcagttggtcttaggcatagaagccccagaggaacacggccactgccatcatgagcagggcattgaggttgaccacacgggcccagctcgggtcctcgctgatgtcctccagccgcctggctgctgccgctgcctcctcctgggtaaggggcggaggactgcccaccccacctctgctcattccacaaaaccagagcaggcactggcggaagaggcttggtgccggggcctggggctctgagggaaattgaggccctgcagttagtttgcgggaactcagctcctccagccccacctcccagcatggtgccctaccattcatctccatggcactctctgggcacccattctgtacagggagtgaggagccttgctgctcatcagcatccaggtcctcccgttcctccttgctatgccggagactgaagaccaggcggtggagctggggagggtgggagcacgaacgaggtgggagttctgtccccccatgcctggccctaaagtctcttgcacaccagctcgtcactgcctgccctacccacctctgtccagtctacacacccagcccaggcttaactcatgccaactccaccctacatggctgccctgtgccctcgggataaaccccaagcccctgagcttgtgtttaaagccgttggccttgctcccccagctttgtcagctcaggtctgtctacacccagatggtagcgcttgtgacactggcctggcagtcctgctcacagtgttctgtgcctgtgtgctcccaccctttcctcctgctgctgcagaaacccggccatccttccacacccagatctcttgtcctgtcctcaccccaccctgccaccatcagccctgcctggagccacctgccctttggcaacaaaaccaaacctttttgtgggcgttcaagatggtattgtgcccaccagtcagatcctgtgttttgagtcccaaaggccatgccaaggattggctttgggaggctttaatcaccaacccatcaacatcaagcctcccccaggccggttcaaataaatgtatttaaataaaaa

SEQ ID NO: 374787 - DNA, 2338 bp, Homo sapiens
gcggccgcctactctactaaattcgcggccgcgtcgactggaaagggagcaaactggactgcaatgccaagcagtggaggctttttgcggacatcctcaatgacgtagccatgttccttgagattatggctcctgtatacccaatctgtttcaccatgaccgtctccaccagcaacctagccaagtgcatcgtgagtgttgctggtggggccactcgggctgccctgaccgtgcaccaggctcggaggaacaacatggctgacgtgtcagccaaggacagcagccaggagacgctggtgaacctggcggggctcttggtcagcctcctgatgctccctctggtgtcaggttgccctggcttcagccttggatgtttcttcttcctcactgccctccacatctacgccaactaccgcgcggtccgagccctggtcatggagaccttgaacgaaggccggctccggctggtcctgaagcactaccttcagaggggagaggtactcgacccaactgcagccaatcgcatggagccgctgtggacaggtttctggccagctccgtctctatccctgggggtccccttacaccgcttggtctccagtgtctttgagctgcagcagctggttgaggggcaccaagaatcctacctcctctgctgggaccagtcacaaaaccaggtacaggtagttctgaaccagaaggcaggccccaagaccatcctaagggccgccacacatgggctgatgcttggggccctgcagggagatggaccccttccagcagagctggaggagctgaggaaccgggtgcgggcaggtcctaagaaagagagctgggtcgtcgtcaaggagacacacgaagtgttggacatgctgttcccaaagttcttgaaaggactgcaggatgccggctggaagaccgagaagcaccagctagaggtggatgagtggagggccacatggcttctgtctcccgaaaagaaggtcttgtgagcagcccagacggaggcccaagcccagggcaggaacctggagcaaggacactttggccacagcaggacaggggaaaggcagctttatttttccttagggcaactgcagcgggtgggccaggccctcatgggaagtgactgccaatcagatgcagtgggccccaggcagaggaaggccgggagaaggggagccaggaccttctcaccccactgccccttccccttttctggggagcaccgcaggctcctcacccccacttcctgtgaggctgtggcttatggtgtccaacgcagttggtcttaggcatagaagccccagaggaacacggccactgccatcatgagcagggcattgaggttgaccacacgggcccagctcgggtcctcgctgatgtcctccagccgcctggctgctgccgctgcctcctcctgggtaaggggcggaggactgcccaccccacctctgctcattccacaaaaccagagcaggcactggcggaagaggcttggtgccggggcctggggctctgagggaaattgaggccctgcagttagtttgcgggaactcagctcctccagccccacctcccagcatggtgccctaccattcatctccatggcactctctgggcacccattctgtacagggagtgaggagccttgctgctcatcagcatccaggtcctcccgttcctccttgctatgccggagactgaagaccaggcggtggagctggggagggtgggagcacgaacgaggtgggagttctgtccccccatgcctggccctaaagtctcttgcacaccagctcgtcactgcctgccctacccacctctgtccagtctacacacccagcccaggcttaactcatgccaactccaccctacatggctgccctgtgccctcgggataaaccccaagcccctgagcttgtgtttaaagccgttggccttgctcccccagctttgtcagctcaggtctgtctacacccagatggtagcgcttgtgacactggcctggcagtcctgctcacagtgttctgtgcctgtgtgctcccaccctttcctcctgctgctgcagaaacccggccatccttccacacccagatctcttgtcctgtcctcaccccaccctgccaccatcagccctgcctggagccacctgccctttggcaacaaaaccaaacctttttgtgggcgttcaagatggtattgtgcccaccagtcagatcctgtgttttgagtcccaaaggccatgccaaggattggctttgggaggctttaatcaccaacccatcaacatcaagcctcccccaggccggttcaaataaatgtatttaaataaaaa

SEQ ID NO: 374788 - DNA, 2573 bp, Homo sapiens
gggcggggctgggatccaaaagctcggcatggctgacgacgcgggtttggagaccccgctgtgttccgagcagttcggctccggggaggcacggggctgccgcgccgccgcggacgggagcctgcagtgggaggtcgggggctggcgctggtgggggctctccagggccttcacggtcaaacctgaaggacgagatgcgggcgaagtgggggcttccggggccccctcaccgcccctctccgggctccaggccgtgttcctgcctcagggcttccctgatagcgtcagcccggactacttgccctaccagctgtgggattccgtgcaggcgtttgcttccagcctctccggctccctagccacccaggcagtcttgctgggcataggggtggggaacgcaaaagccactgtttcagctgccacggccacctggctcgtgaaagattcaactggcatgctgggccgcatcgtctttgcctggtggaaagggagcaaactggactgcaatgccaagcagtggaggctttttgcggacatcctcaatgacgtagccatgttccttgagattatggctcctgtatacccaatctgtttcaccatgaccgtctccaccagcaacctagccaagtgcatcgtgagtgttgctggtggggccactcgggctgccctgaccgtgcaccaggctcggaggaacaacatggctgacgtgtcagccaaggacagcagccaggagacgctggtgaacctggcggggctcttggtcagcctcctgatgctccctctggtgtcaggttgccctggcttcagccttggatgtttcttcttcctcactgccctccacatctacgccaactaccgcgcggtccgagccctggtcatggagaccttgaacgaaggccggctccggctggtcctgaagcactaccttcagaggggagaggtactcgacccaactgcagccaatcgcatggagccgctgtggacaggtttctggccagctccgtctctatccctgggggtccccttacaccgcttggtctccagtgtctttgagctgcagcagctggttgaggggcaccaagaatcctacctcctctgctgggaccagtcacaaaaccaggtacaggtagttctgaaccagaaggcaggccccaagaccatcctaagggccgccacacatgggctgatgcttggggccctgcagggagatggaccccttccagcagagctggaggagctgaggaaccgggtgcgggcaggtcctaagaaagagagctgggtcgtcgtcaaggagacacacgaagtgttggacatgctgttcccaaagttcttgaaaggactgcaggatgccggctggaagaccgagaagcaccagctagaggtggatgagtggagggccacatggcttctgtctcccgaaaagaaggtcttgtgagcagcccagacggaggcccaagcccagggcaggaacctggagcaaggacactttggccacagcaggacaggggaaaggcagctttatttttccttagggcaactgcagcgggtgggccaggccctcatgggaagtgactgccaatcagatgcagtgggccccaggcagaggaaggccgggagaaggggagccaggaccttctcaccccactgccccttccccttttctggggagcaccgcaggctcctcacccccacttcctgtgaggctgtggcttatggtgtccaacgcagttggtcttaggcatagaagccccagaggaacacggccactgccatcatgagcagggcattgaggttgaccacacgggcccagctcgggtcctcgctgatgtcctccagccgcctggctgctgccgctgcctcctcctgggtaaggggcggaggactgcccaccccacctctgctcattccacaaaaccagagcaggcactggcggaagaggcttggtgccggggcctggggctctgagggaaattgaggccctgcagttagtttgcgggaactcagctcctccagccccacctcccagcatggtgccctaccattcatctccatggcactctctgggcacccattctgtacagggagtgaggagccttgctgctcatcagcatccaggtcctcccgttcctccttgctatgccggagactgaagaccaggcggtggagctggggagggtgggagcacgaacgaggtgggagttctgtccccccatgcctggccctaaagtctcttgcacaccagctcgtcactgcctgccctacccacctctgtccagtctacacacccagcccaggcttaactcatgccaactccaccctacatggctgccctgtgccctcgggataaaccccaagcccctgagcttgtgtttaaagccgttggccttgctcccccagctttgtcagctcaggtctgtctacacccagatggtagcgcttgtgacactggcctggcagtcctgctcacagtgttctgtgcctgtgtgctcccaccctttcctcctgctgctgcagaaacccggccatccttccacacccagacgtcgggtggagcggtaccgagctcgattgta

SEQ ID NO: 374789 - DNA, 2924 bp, Homo sapiens
  misc_feature (2432)..(2432): n is a, c, g, or t
  misc_feature (2455)..(2455): n is a, c, g, or t
  misc_feature (2482)..(2482): n is a, c, g, or t
  misc_feature (2497)..(2497): n is a, c, g, or t
  misc_feature (2499)..(2499): n is a, c, g, or t
gggcggggctgggatccaaaagctcggcatggctgacgacgcgggtttggagaccccgctgtgttccgagcagttcggctccggggaggcacggggctgccgcgccgccgcggacgggagcctgcagtgggaggtcgggggctggcgctggtgggggctctccagggccttcacggtcaaacctgaaggacgagatgcgggcgaagtgggggcttccggggccccctcaccgcccctctccgggctccaggccgtgttcctgcctcagggcttccctgatagcgtcagcccggactacttgccctaccagctgtgggattccgtgcaggcgtttgcttccagcctctccggctccctagccacccaggcagtcttgctgggcataggggtggggaacgcaaaagccactgtttcagctgccacggccacctggctcgtgaaagattcaactggcatgctgggccgcatcgtctttgcctggtggaaagggagcaaactggactgcaatgccaagcagtggaggctttttgcggacatcctcaatgacgtagccatgttccttgagattatggctcctgtatacccaatctgtttcaccatgaccgtctccaccagcaacctagccaagtgcatcgtgagtgttgctggtggggccactcgggctgccctgaccgtgcaccaggctcggaggaacaacatggctgacgtgtcagccaaggacagcagccaggagacgctggtgaacctggcggggctcttggtcagcctcctgatgctccctctggtgtcaggttgccctggcttcagccttggatgtttcttcttcctcactgccctccacatctacgccaactaccgcgcggtccgagccctggtcatggagaccttgaacgaaggccggctccggctggtcctgaagcactaccttcagaggggagaggtactcgacccaactgcagccaatcgcatggagccgctgtggacaggtttctggccagctccgtctctatccctgggggtccccttacaccgcttggtctccagtgtctttgagctgcagcagctggttgaggggcaccaagaatcctacctcctctgctgggaccagtcacaaaaccaggtacaggtagttctgaaccagaaggcaggccccaagaccatcctaagggccgccacacatgggctgatgcttggggccctgcagggagatggaccccttccagcagagctggaggagctgaggaaccgggtgcgggcaggtcctaagaaagagagctgggtcgtcgtcaaggagacacacgaagtgttggacatgctgttcccaaagttcttgaaaggactgcaggatgccggctggaagaccgagaagcaccagctagaggtggatgagtggagggccacatggcttctgtctcccgaaaagaaggtcttgtgagcagcccagacggaggcccaagcccagggcaggaacctggagcaaggacactttggccacagcaggacaggggaaaggcagctttatttttccttagggcaactgcagcgggtgggccaggccctcatgggaagtgactgccaatcagatgcagtgggccccaggcagaggaaggccgggagaaggggagccaggaccttctcaccccactgccccttccccttttctggggagcaccgcaggctcctcacccccacttcctgtgaggctgtggcttatggtgtccaacgcagttggtcttaggcatagaagccccagaggaacacggccactgccatcatgagcagggcattgaggttgaccacacgggcccagctcgggtcctcgctgatgtcctccagccgcctggctgctgccgctgcctcctcctgggtaaggggcggaggactgcccaccccacctctgctcattccacaaaaccagagcaggcactggcggaagaggcttggtgccggggcctggggctctgagggaaattgaggccctgcagttagtttgcgggaactcagctcctccagccccacctcccagcatggtgccctaccattcatctccatggcactctctgggcacccattctgtacagggagtgaggagccttgctgctcatcagcatccaggtcctcccgttcctccttgctatgccggagactgaagaccaggcggtggagctggggagggtgggagcacgaacgaggtgggagttctgtccccccatgcctggccctaaagtctcttgcacaccagctcgtcactgcctgccctacccacctctgtccagtctacacacccagcccaggcttaactcatgccaactccaccctacatggctgccctgtgccctcgggataaaccccaagcccctgagcttgtgtttaaagccgttggccttgctcccccagctttgtcagctcaggtctgtctcccgaaaagaagntcttgtgagcagcccagacggangcccaagcccagggcaggaacctggancaaggacactttggncncagcaggacaggggaaaggcagctttatttttccttagggcaactgcagcgggtgggccaggccctcatgggaagtgactgccaatcagatgcagtgggccccaggcagaggaaggccgggagaaggggagccaggaccttctcaccccactgccccttccccttttctggggagcaccgcaggctctcttgtcctgtcctcaccccaccctgccaccatcagccctgcctggagccacctgccctttggcaacaaaaccaaacctttttgtgggcgttcaagatggtattgtgcccaccagtcagatcctgtgttttgagtcccaaaggccatgccaaggattggctttgggaggctttaatcaccaacccatcaacatcaagcctcccccaggccggttcaaataaatgtatttaaataaaaa

SEQ ID NO: 374790 - DNA, 2866 bp, Homo sapiens
gggcggggctgggatccaaaagctcggcatggctgacgacgcgggtttggagaccccgctgtgttccgagcagttcggctccggggaggcacggggctgccgcgccgccgcggacgggagcctgcagtgggaggtcgggggctggcgctggtgggggctctccagggccttcacggtcaaacctgaaggacgagatgcgggcgaagtgggggcttccggggccccctcaccgcccctctccgggctccaggccgtgttcctgcctcagggcttccctgatagcgtcagcccggactacttgccctaccagctgtgggattccgtgcaggcgtttgcttccagcctctccggctccctagccacccaggcagtcttgctgggcataggggtggggaacgcaaaagccactgtttcagctgccacggccacctggctcgtgaaagattcaactggcatgctgggccgcatcgtctttgcctggtggaaagggagcaaactggactgcaatgccaagcagtggaggctttttgcggacatcctcaatgacgtagccatgttccttgagattatggctcctgtatacccaatctgtttcaccatgaccgtctccaccagcaacctagccaagtgcatcgtgagtgttgctggtggggccactcgggctgccctgaccgtgcaccaggctcggaggaacaacatggctgacgtgtcagccaaggacagcagccaggagacgctggtgaacctggcggggctcttggtcagcctcctgatgctccctctggtgtcaggttgccctggcttcagccttggatgtttcttcttcctcactgccctccacatctacgccaactaccgcgcggtccgagccctggtcatggagaccttgaacgaaggccggctccggctggtcctgaagcactaccttcagaggggagaggtactcgacccaactgcagccaatcgcatggagccgctgtggacaggtttctggccagctccgtctctatccctgggggtccccttacaccgcttggtctccagtgtctttgagctgcagcagctggttgaggggcaccaagaatcctacctcctctgctgggaccagtcacaaaaccaggtacaggtagttctgaaccagaaggcaggccccaagaccatcctaagggccgccacacatgggctgatgcttggggccctgcagggagatggaccccttccagcagagctggaggagctgaggaaccgggtgcgggcaggtcctaagaaagagagctgggtcgtcgtcaaggagacacacgaagtgttggacatgctgttcccaaagttcttgaaaggactgcaggatgccggctggaagaccgagaagcaccagctagaggtggatgagtggagggccacatggcttctgtctcccgaaaagaaggtcttgtgagcagcccagacggaggcccaagcccagggcaggaacctggagcaaggacactttggccacagcaggacaggggaaaggcagctttatttttccttagggcaactgcagcgggtgggccaggccctcatgggaagtgactgccaatcagatgcagtgggccccaggcagaggaaggccgggagaaggggagccaggaccttctcaccccactgccccttccccttttctggggagcaccgcaggctcctcacccccacttcctgtgaggctgtggcttatggtgtccaacgcagttggtcttaggcatagaagccccagaggaacacggccactgccatcatgagcagggcattgaggttgaccacacgggcccagctcgggtcctcgctgatgtcctccagccgcctggctgctgccgctgcctcctcctgggtaaggggcggaggactgcccaccccacctctgctcattccacaaaaccagagcaggcactggcggaagaggcttggtgccggggcctggggctctgagggaaattgaggccctgcagttagtttgcgggaactcagctcctccagccccacctcccagcatggtgccctaccattcatctccatggcactctctgggcacccattctgtacagggagtgaggagccttgctgctcatcagcatccaggtcctcccgttcctccttgctatgccggagactgaagaccaggcggtggagctggggagggtgggagcacgaacgaggtgggagttctgtccccccatgcctggccctaaagtctcttgcacaccagctcgtcactgcctgccctacccacctcttctcttgtcctgtcctcaccccaccctgccaccatcagccctgcctggagccacctgccctttggcaacaaaaccaaacctttttgtgggcgttcaagatggtattgtgcccaccagtcagatcctgtgttttgagtcccaaaggccatgccaaggattggctttgggaggctttaatcaccaacccatcaacatcaagcctcccccaggccggttcaaataaatgtatttaaataaaaataaaaattcttgctcggcaattgcaactgcagctggacccccagcccattcccaaccctcagtcgagaaattcaggtcctcccagctgggcactccaggaagcagagggtaggtgctgtgtcccacagtgcttgcctggggcacctggccactcacgtgctttctggggatgggcgcggtgcacagggagaccgtgagggtgaggaggccagagcagaagaacagcacaatggcgaagtagaggtagtgcacgccgcagaggaaagctgggcacgccgagggctgcacacagctgcccgagccgaaggagaactcgggaatcaggcgtgccaggcccatcagcaggcccccgatga

SEQ ID NO: 374791 - DNA, 1689 bp, Homo sapiens
  misc_feature (219)..(219): n is a, c, g, or t
  misc_feature (228)..(228): n is a, c, g, or t
gcggccgcctactctactaaattcgcggccgcgtcgacggagccttgctgctcatcagcatccaggtcctcccgttcctccttgctatgccggagactgaagaccaggcggtggagctggggagggtgggagcacgaacgaggtgggagttctgtccccccatgcctggccctaaagtctcttgcacaccagctcgtcactgcctgccctacccacctntgtccagtntacacacccacccaggcttaactcatgccaactccaccctacatggctgccctgtgccctcgggataaaccccaagcccctgagcttgtgtttaaagccgttggccttgctcccccagctttgtcagctcaggtctgtctacacccagatggtagcgcaaggacactttggccacagcaggacaggggaaaggcagctttatttttccttagggcaactgcagcgggtgggccaggccctcatgggaagtgactgccaatcagatgcagtgggccccaggcagaggaaggccgggagaaggggagccaggaccttctcaccccactgccccttccccttttctggggagcaccgcaggctcctcacccccacttcctgtgaggctgtggcttatggtgtccaacgcagttggtcttaggcatagaagccccagaggaacacggccactgccatcatgagcagggcattgaggttgaccacacgggcccagctcgggtcctcgctgatgtcctccagccgcctggctgctgccgctgcctcctcctgggtaaggggcggaggactgcccaccccacctctgctcattccacaaaaccagagcaggcactggcggaagaggcttggtgccggggcctggggctctgagggaaattgaggccctgcagttagtttgcgggaactcagctcctccagccccacctcccagcatggtgccctaccattcatctccatggcactctctgggcacccattctgtacagggagtgaggagccttgctgctcatcagcatccaggtcctcccgttcctccttgctatgccggagactgaagaccaggcggtggagctggggagggtgggagcacgaacgaggtgggagttctgtccccccatgcctggccctaaagtctcttgcacaccagctcgtcactgcctgccctacccacctctgtccagtctacacacccagcccaggcttaactcatgccaactccaccctacatggctgccctgtgccctcgggataaaccccaagcccctgagcttgtgtttaaagccgttggccttgctcccccagctttgtcagctcaggtctgtctacacccagatggtagcgcttgtgacactggcctggcagtcctgctcacagtgttctgtgcctgtgtgctcccaccctttcctcctgctgctgcagaaacccggccatccttccacacccagatctcttgtcctgtcctcaccccaccctgccaccatcagccctgcctggagccacctgccctttggcaacaaaaccaaacctttttgtgggcgttcaagatggtattgtgcccaccagtcagatcctgtgttttgagtcccaaaggccatgccaaggattggctttgggaggctttaatcaccaacccatcaacatcaagcctcccccaggccggttcaaataaatgtatttaaataaaaa

SEQ ID NO: 374792 - DNA, 1911 bp, Homo sapiens
gggcggggctgggatccaaaagctcggcatggctgacgacgcgggtttggagaccccgctgtgttccgagcagttcggctccggggaggcacggggctgccgcgccgccgcggacgggagcctgcagtgggaggtcgggggctggcgctggtgggggctctccagggccttcacggtcaaacctgaaggacgagatgcgggcgaagtgggggcttccggggccccctcaccgcccctctccgggctccaggccgtgttcctgcctcagggcttccctgatagcgtcagcccggactacttgccctaccagctgtgggattccgtgcaggcgtttgcttccagcctctccggctccctagccacccaggcagtcttgctgggcataggggtggggaacgcaaaagccactgtttcagctgccacggccacctggctcgtgaaagattcaactggcatgctgggccgcatcgtctttgcctggtggaaagggagcaaactggactgcaatgccaagcagtggaggctttttgcggacatcctcaatgacgtagccatgttccttgagattatggctcctgtatacccaatctgtttcaccatgaccgtctccaccagcaacctagccaagtgcatcgtgagtgttgctggtggggccactcgggctgccctgaccgtgcaccaggctcggaggaacaacatggctgacgtgtcagccaaggacagcagccaggagacgctggtgaacctggcggggctcttggtcagcctcctgatgctccctctggtgtcaggttgccctggcttcagccttggatgtttcttcttcctcactgccctccacatctacgccaactaccgcgcggtccgagccctggtcatggagaccttgaacgaaggccggctccggctggtcctgaagcactaccttcagaggggagaggtactcgacccaactgcagccaatcgcatggagccgctgtggacaggtttctggccagctccgtctctatccctgggggtccccttacaccgcttggtctccagtgtctttgagctgcagcagctggttgaggggcaccaagaatcctacctcctctgctgggaccagtcacaaaaccaggtacaggtagttctgaaccagaaggcaggccccaagaccatcctaagggccgccacacatgggctgatgcttggggccctgcagggagatggaccccttccagcagagctggaggagctgaggaaccgggtgcgggcaggtcctaagaaagagagctgggtcgtcgtcaaggagacacacgaagtgttggacatgctgttcccaaagttcttgaaaggactgcaggatgccggctggaagaccgagaagcaccagctagaggtggatgagtggagggccacatggcttctgtctcccgaaaagaaggtcttgtgagcagcccagacggaggcccaagcccagggcaggaacctggagcaaggacactttggccacagcaggacaggggaaaggcagctttatttttccttagggcaactgcagcgggtgggccaggccctcatgggaagtgactgccaatcagatgcagtgggccccaggcagaggaaggccgggagaaggggagccaggaccttctcaccccactgccccttccccttttctggggagcaccgcaggctcctcacccccacttcctgtgaggctgtggcttatggtgtccaacgcagttggtcttaggcatagaagccccagaggaacacggccactgccatcatgagcagggcattgaggatggtccgcacagggcagcccgagtggccccaccagcaacactcacgatgcacttggctaggttgctggtggagacggtcatgtgaaacagattgggtatacaggaccataatctcagg

SEQ ID NO: 374793 - DNA, 1767 bp, Homo sapiens
gggcggggctgggatccaaaagctcggcatggctgacgacgcgggtttggagaccccgctgtgttccgagcagttcggctccggggaggcacggggctgccgcgccgccgcggacgggagcctgcagtgggaggtcgggggctggcgctggtgggggctctccagggccttcacggtcaaacctgaaggacgagatgcgggcgaagtgggggcttccggggccccctcaccgcccctctccgggctccaggccgtgttcctgcctcagggcttccctgatagcgtcagcccggactacttgccctaccagctgtgggattccgtgcaggcgtttgcttccagcctctccggctccctagccacccaggcagtcttgctgggcataggggtggggaacgcaaaagccactgtttcagctgccacggccacctggctcgtgaaagattcaactggcatgctgggccgcatcgtctttgcctggtggaaagggagcaaactggactgcaatgccaagcagtggaggctttttgcggacatcctcaatgacgtagccatgttccttgagattatggctcctgtatacccaatctgtttcaccatgaccgtctccaccagcaacctagccaagtgcatcgtgagtgttgctggtggggccactcgggctgccctgaccgtgcaccaggctcggaggaacaacatggctgacgtgtcagccaaggacagcagccaggagacgctggtgaacctggcggggctcttggtcagcctcctgatgctccctctggtgtcaggttgccctggcttcagccttggatgtttcttcttcctcactgccctccacatctacgccaactaccgcgcggtccgagccctggtcatggagaccttgaacgaaggccggctccggctggtcctgaagcactaccttcagaggggagaggtactcgacccaactgcagccaatcgcatggagccgctgtggacaggtttctggccagctccgtctctatccctgggggtccccttacaccgcttggtctccagtgtctttgagctgcagcagctggttgaggggcaccaagaatcctacctcctctgctgggaccagtcacaaaaccaggtacaggtagttctgaaccagaaggcaggccccaagaccatcctaagggccgccacacatgggctgatgcttggggccctgcagggagatggaccccttccagcagagctggaggagctgaggaaccgggtgcgggcaggtcctaagaaagagagctgggtcgtcgtcaaggagacacacgaagtgttggacatgctgttcccaaagttcttgaaaggactgcaggatgccggctggaagaccgagaagcaccagctagaggtggatgagtggagggccacatggcttctgtctcccgaaaagaaggtcttgtgagcagcccagacggaggcccaagcccagggcaggaacctggagcaaggacactttggccacagcaggacaggggaaaggcagctttatttttctctcttgtcctgtcctcaccccaccctgccaccatcagccctgcctggagccacctgccctttggcaacaaaaccaaacctttttgtgggcgttcaagatggtattgtgcccaccagtcagatcctgtgttttgagtcccaaaggccatgccaaggattggctttgggaggctttaatcaccaacccatcaacatcaagcctcccccaggccggttcaaataaatgtatttaaataaaaa

SEQ ID NO: 374794 - DNA, 1855 bp, Homo sapiens
gggcggggctgggatccaaaagctcggcatggctgacgacgcgggtttggagaccccgctgtgttccgagcagttcggctccggggaggcacggggctgccgcgccgccgcggacgggagcctgcagtgggaggtcgggggctggcgctggtgggggctctccagggccttcacggtcaaacctgaaggacgagatgcgggcgaagtgggggcttccggggccccctcaccgcccctctccgggctccaggccgtgttcctgcctcagggcttccctgatagcgtcagcccggactacttgccctaccagctgtgggattccgtgcaggcgtttgcttccagcctctccggctccctagccacccaggcagtcttgctgggcataggggtggggaacgcaaaagccactgtttcagctgccacggccacctggctcgtgaaagattcaactggcatgctgggccgcatcgtctttgcctggtggaaagggagcaaactggactgcaatgccaagcagtggaggctttttgcggacatcctcaatgacgtagccatgttccttgagattatggctcctgtatacccaatctgtttcaccatgaccgtctccaccagcaacctagccaagtgcatcgtgagtgttgctggtggggccactcgggctgccctgaccgtgcaccaggctcggaggaacaacatggctgacgtgtcagccaaggacagcagccaggagacgctggtgaacctggcggggctcttggtcagcctcctgatgctccctctggtgtcaggttgccctggcttcagccttggatgtttcttcttcctcactgccctccacatctacgccaactaccgcgcggtccgagccctggtcatggagaccttgaacgaaggccggctccggctggtcctgaagcactaccttcagaggggagaggtactcgacccaactgcagccaatcgcatggagccgctgtggacaggtttctggccagctccgtctctatccctgggggtccccttacaccgcttggtctccagtgtctttgagctgcagcagctggttgaggggcaccaagaatcctacctcctctgctgggaccagtcacaaaaccaggtacaggtagttctgaaccagaaggcaggccccaagaccatcctaagggccgccacacatgggctgatgcttggggccctgcagggagatggaccccttccagcagagctggaggagctgaggaaccgggtgcgggcagtctcttgtcctgtcctcaccccaccctgccaccatcagccctgcctggagccacctgccctttggcaacaaaaccaaacctttttgtgggcgttcaagatggtattgtgcccaccagtcagatcctgtgttttgagtcccaaaggccatgccaaggattggctttgggaggctttaatcaccaacccatcaacatcaagcctcccccaggccggttcaaataaatgtatttaaataaaaataaaaattcttgctcggcaattgcaactgcagctggacccccagcccattcccaaccctcagtcgagaaattcaggtcctcccagctgggcactccaggaagcagagggtaggtgctgtgtcccacagtgcttgcctggggcacctggccactcacgtgctttctggggatgggcgcggtgcacagggagaccgtgagggtgaggaggccagagcagaagaacagcacaatggcgaagtagaggtagtgcacgccgcagaggaaagctgggcacgccgagggctgcacacagctgcccgagccgaaggagaactcgggaatcaggcgtgccaggcccatcagcaggcccccgatga

SEQ ID NO: 374795 - DNA, 479 bp, Homo sapiens
  misc_feature (219)..(219): n is a, c, g, or t
  misc_feature (228)..(228): n is a, c, g, or t
gcggccgcctactctactaaattcgcggccgcgtcgacggagccttgctgctcatcagcatccaggtcctcccgttcctccttgctatgccggagactgaagaccaggcggtggagctggggagggtgggagcacgaacgaggtgggagttctgtccccccatgcctggccctaaagtctcttgcacaccagctcgtcactgcctgccctacccacctntgtccagtntacacacccactctcttgtcctgtcctcaccccaccctgccaccatcagccctgcctggagccacctgccctttggcaacaaaaccaaacctttttgtgggcgttcaagatggtattgtgcccaccagtcagatcctgtgttttgagtcccaaaggccatgccaaggattggctttgggaggctttaatcaccaacccatcaacatcaagcctcccccaggccggttcaaataaatgtatttaaataaaaa

SEQ ID NO: 374796 - DNA, 899 bp, Homo sapiens
gggcggggctgggatccaaaagctcggcatggctgacgacgcgggtttggagaccccgctgtgttccgagcagttcggctccggggaggcacggggctgccgcgccgccgcggacgggagcctgcagtgggaggtcgggggctggcgctggtgggggctctccagggccttcacggtcaaacctgaaggacgagatgcgggcgaagtgggggcttccggggccccctcaccgcccctctccgggctccaggccgtgttcctgcctcagggcttccctgatagcgtcagcccggactacttgcctctcttgtcctgtcctcaccccaccctgccaccatcagccctgcctggagccacctgccctttggcaacaaaaccaaacctttttgtgggcgttcaagatggtattgtgcccaccagtcagatcctgtgttttgagtcccaaaggccatgccaaggattggctttgggaggctttaatcaccaacccatcaacatcaagcctcccccaggccggttcaaataaatgtatttaaataaaaataaaaattcttgctcggcaattgcaactgcagctggacccccagcccattcccaaccctcagtcgagaaattcaggtcctcccagctgggcactccaggaagcagagggtaggtgctgtgtcccacagtgcttgcctggggcacctggccactcacgtgctttctggggatgggcgcggtgcacagggagaccgtgagggtgaggaggccagagcagaagaacagcacaatggcgaagtagaggtagtgcacgccgcagaggaaagctgggcacgccgagggctgcacacagctgcccgagccgaaggagaactcgggaatcaggcgtgccaggcccatcagcaggcccccgatga

SEQ ID NO: 374797 - DNA, 1044 bp, Homo sapiens
  misc_feature (219)..(219): n is a, c, g, or t
  misc_feature (228)..(228): n is a, c, g, or t
gcggccgcctactctactaaattcgcggccgcgtcgacggagccttgctgctcatcagcatccaggtcctcccgttcctccttgctatgccggagactgaagaccaggcggtggagctggggagggtgggagcacgaacgaggtgggagttctgtccccccatgcctggccctaaagtctcttgcacaccagctcgtcactgcctgccctacccacctntgtccagtntacacacccacccaggcttaactcatgccaactccaccctacatggctgccctgtgccctcgggataaaccccaagcccctgagcttgtgtttaaagccgttggccttgctcccccagctttgtcagctcagttctgtctcccgaaaagaaggtcttgtgagcagcccagacggaggcccaagcccagggcaggaacctggagcaaggacactttggccacagcaggacaggggaaaggcagctttatttttccttagggcaactgcagcgggtgggccctttggcaacaaaaccaaacctttttgtgggcgttcaagatggtattgtgcccaccagtcagatcctgtgttttgagtcccaaaggccatgccaaggattggctttgggaggctttaatcaccaacccatcaacatcaagcctcccccaggccggttcaaataaatgtatttaaataaaaataaaaattcttgctcggcaattgcaactgcagctggacccccagcccattcccaaccctcagtcgagaaattcaggtcctcccagctgggcactccaggaagcagagggtaggtgctgtgtcccacagtgcttgcctggggcacctggccactcacgtgctttctggggatgggcgcggtgcacagggagaccgtgagggtgaggaggccagagcagaagaacagcacaatggcgaagtagaggtagtgcacgccgcagaggaaagctgggcacgccgagggctgcacacagctgcccgagccgaaggagaactcgggaatcaggcgtgccaggcccatcagcaggcccccgatga

SEQ ID NO: 374798 - DNA, 2507 bp, Homo sapiens
gggcggggctgggatccaaaagctcggcatggctgacgacgcgggtttggagaccccgctgtgttccgagcagttcggctccggggaggcacggggctgccgcgccgccgcggacgggagcctgcagtgggaggtcgggggctggcgctggtgggggctctccagggccttcacggtcaaacctgaaggacgagatgcgggcgaagtgggggcttccggggccccctcaccgcccctctccgggctccaggccgtgttcctgcctcagggcttccctgatagcgtcagcccggactacttgccctaccagctgtgggattccgtgcaggcgtttgcttccagcctctccggctccctagccacccaggcagtcttgctgggcataggggtggggaacgcaaaagccactgtttcagctgccacggccacctggctcgtgaaagattcaactggcatgctgggccgcatcgtctttgcctggtggaaagggagcaaactggactgcaatgccaagcagtggaggctttttgcggacatcctcaatgacgtagccatgttccttgagattatggctcctgtatacccaatctgtttcaccatgaccgtctccaccagcaacctagccaagtgcatcgtgagtgttgctggtggggccactcgggctgccctgaccgtgcaccaggctcggaggaacaacatggctgacgtgtcagccaaggacagcagccaggagacgctggtgaacctggcggggctcttggtcagcctcctgatgctccctctggtgtcaggttgccctggcttcagccttggatgtttcttcttcctcactgccctccacatctacgccaactaccgcgcggtccgagccctggtcatggagaccttgaacgaaggccggctccggctggtcctgaagcactaccttcagaggggagaggtactcgacccaactgcagccaatcgcatggagccgctgtggacaggtttctggccagctccgtctctatccctgggggtccccttacaccgcttggtctccagtgtctttgagctgcagcagctggttgaggggcaccaagaatcctacctcctctgctgggaccagtcacaaaaccaggtacaggtagttctgaaccagaaggcaggccccaagaccatcctaagggccgccacacatgggctgatgcttggggccctgcagggagatggaccccttccagcagagctggaggagctgaggaaccgggtgcgggcaggtcctaagaaagagagctgggtcgtcgtcaaggagacacacgaagtgttggacatgctgttcccaaagttcttgaaaggactgcaggatgccggctggaagaccgagaagcaccagctagaggtggatgagtggagggccacatggcttctgtctcccgaaaagaaggtcttgtgagcagcccagacggaggcccaagcccagggcaggaacctggagcaaggacactttggccacagcaggacaggggaaaggcagctttatttttccttagggcaactgcagcgggtgggccaggccctcatgggaagtgactgccaatcagatgcagtgggccccaggcagaggaaggccgggagaaggggagccaggaccttctcaccccactgccccttccccttttctggggagcaccgcaggctcctcacccccacttcctgtgaggctgtggcttatggtgtccaacgcagttggtcttaggcatagaagccccagaggaacacggccactgccatcatgagcagggcattgaggttgaccacacgggcccagctcgggtcctcgctgatgtctcagcatccaggtcctcccgttcctccttgctatgccggagactgaagaccaggcggtggagctggggagggtgggagcacgaacgaggtgggagttctgtccccccatgcctggccctaaagtctcttgcacaccagctcgtcactgcctgccctacccacctctgtccagtctacacacccagcccaggcttaactcatgccaactccaccctacatggctgccctgtgccctcgggataaaccccaagcccctgagcttgtgtttaaagccgttggccttgctcccccagctttgtcagctcaggtctgtctacacccagatggtagcgcttgtgacactggcctggcagtcctgctcacagtgttctgtgcctgtgtgctcccaccctttcctcctgctgctgcagaaacccggccatccttccacacccagatctcttgtcctgtcctcaccccaccctgccaccatcagccctgcctggagccacctgccctttggcaacaaaaccaaacctttttgtgggcgttcaagatggtattgtgcccaccagtcagatcctgtgttttgagtcccaaaggccatgccaaggattggctttgggaggctttaatcaccaacccatcaacatcaagcctcccccaggccggttcaaataaatgtatttaaataaaaa

SEQ ID NO: 374799 - DNA, 1184 bp, Homo sapiens
acaaaacaaacttttgttgccaaagggcaggtggctccaggcaggctgatggtggcaggtggggtgaggacaggacaagagatctgggtgtggaaggatggcctttggcaacaaaaccaaacctttttgtgggcgttcaagatggtattgtgcccaccagtcagatcctgtgttttgagtcccaaaggccatgccaaggattggctttgggaggctttaatcaccaacccatcaacatcaagcctcccccaggccggttcaaataaatgtatttaaataaaaaaaaaaaaaaaaacaacaaaaaaaaaaaaaaacaaaaaaacaaacaaaacaaaaaacaaaaacaaccaaaaaacaaacaaaaaaaaacaggggggggcccccaaaaaacccccgcgggggggccccacaacatctgcgcgaccagaccagcgatcagaatatagttatacagagaacggcggccccacaaatgagacgcgagactcaacaataagacaacgccggagccccgagagcaggcagcgcccgcataacagacaaagaccaggaaggctgggggaaagaaccaacagagcaagcggaggaagaactaatgcaggggaaacggagggaccccaacacctcatcgggtgggtggacgaacacacacaatgggcggacagccacctcaacccccacgaccagcagttagagcccagcccgcccctaaggcgcgcgacgcacaacgacgccaacgaccccgacgcagggagctcaacagaggcggcggtacccacacaccacagccgcgcacgacaactctcgcggcccgggccgcacagaagaaacccgcttgcggcaccgcacgcggccacagtggaatactcgcgggaaccgacacaacatcttatacgaccaacgggccagcgccgatggagcaaaagacgagggagcgccagcgaccaggcagacgcccgacacgcgacgcccaccacacgaccagacccgcgaacgcaaaccacacacagccacgacagccgcacccgctgaaccgcgagcagcagagacgaaacgagagcgccagagccagacgcaccacaggcacgcagcgagtcgcccagacagcagcccgaccaccaccagaacgaacgcaaacaaggacggatgacgcaacgcgcagaacgacaacggcgaccacgacc

SEQ ID NO: 374800 - DNA, 3199 bp, Homo sapiens
gggcggggctgggatccaaaagctcggcatggctgacgacgcgggtttggagaccccgctgtgttccgagcagttcggctccggggaggcacggggctgccgcgccgccgcggacgggagcctgcagtgggaggtcgggggctggcgctggtgggggctctccagggccttcacggtcaaacctgaaggacgagatgcgggcgaagtgggggcttccggggccccctcaccgcccctctccgggctccaggccgtgttcctgcctcagggcttccctgatagcgtcagcccggactacttgccctaccagctgtgggattccgtgcaggcgtttgcttccagcctctccggctccctagccacccaggcagtcttgctgggcataggggtggggaacgcaaaagccactgtttcagctgccacggccacctggctcgtgaaagattcaactggcatgctgggccgcatcgtctttgcctggtggaaagggagcaaactggactgcaatgccaagcagtggaggctttttgcggacatcctcaatgacgtagccatgttccttgagattatggctcctgtatacccaatctgtttcaccatgaccgtctccaccagcaacctagccaagtgcatcgtgagtgttgctggtggggccactcgggctgccctgaccgtgcaccaggctcggaggaacaacatggctgacgtgtcagccaaggacagcagccaggagacgctggtgaacctggcggggctcttggtcagcctcctgatgctccctctggtgtcaggttgccctggcttcagccttggatgtttcttcttcctcactgccctccacatctacgccaactaccgcgcggtccgagccctggtcatggagaccttgaacgaaggccggctccggctggtcctgaagcactaccttcagaggggagaggtactcgacccaactgcagccaatcgcatggagccgctgtggacaggtttctggccagctccgtctctatccctgggggtccccttacaccgcttggtctccaggtgagtggcctagcgtctcccgctcgtcaccaccgccacccacactcccctcactccgattacacactggcctccctggcaaggccccacctctctgtcctgggttcttcattgctgctgaacagacatggggttggtgtgggtgtgtgaggaaggaaagggtgtataacatgaagcagatgtaagagatgtgcttgatgggtgaaggaaggatgggtagatggggaagttggatgactggatacaggaagaaaggatggatttggtgtgtatgggtaatggctgagggagagaggaagcgaggggacctgagtgaagcctggatcatttcagttcactgggtggctgttcagtggctggttgggcatgcctgcctttgctgtcctccacccccactgcactgtcctctcccccacagtgtctttgagctgcagcagctggttgaggggcaccaagaatcctacctcctctgctgggaccagtcacaaaaccaggtacaggtagttctgaaccagaaggcaggccccaagaccatcctaagggccgccacacatgggctgatgcttggggccctgcagggagatggaccccttccagcagagctggaggagctgaggaaccgggtgcgggcaggtcctaagaaagagagctgggtcgtcgtcaaggagacacacgaagtgttggacatgctgttcccaaagttcttgaaaggactgcaggatgccggctggaagaccgagaagcaccagctagaggtggatgagtggagggccacatggcttctgtctcccgaaaagaaggtcttgtgagcagcccagacggaggcccaagcccagggcaggaacctggagcaaggacactttggccacagcaggacaggggaaaggcagctttatttttccttagggcaactgcagcgggtgggccaggccctcatgggaagtgactgccaatcagatgcagtgggccccaggcagaggaaggccgggagaaggggagccaggaccttctcaccccactgccccttccccttttctggggagcaccgcaggctcctcacccccacttcctgtgaggctgtggcttatggtgtccaacgcagttggtcttaggcatagaagccccagaggaacacggccactgccatcatgagcagggcattgaggttgaccacacgggcccagctcgggtcctcgctgatgtcctccagccgcctggctgctgccgctgcctcctcctgggtaaggggcggaggactgcccaccccacctctgctcattccacaaaaccagagcaggcactggcggaagaggcttggtgccggggcctggggctctgagggaaattgaggccctgcagttagtttgcgggaactcagctcctccagccccacctcccagcatggtgccctaccattcatctccatggcactctctgggcacccattctgtacagggagtgaggagccttgctgctcatcagcatccaggtcctcccgttcctccttgctatgccggagactgaagaccaggcggtggagctggggagggtgggagcacgaacgaggtgggagttctgtccccccatgcctggccctaaagtctcttgcacaccagctcgtcactgcctgccctacccacctctgtccagtctacacacccagcccaggcttaactcatgccaactccaccctacatggctgccctgtgccctcgggataaaccccaagcccctgagcttgtgtttaaagccgttggccttgctcccccagctttgtcagctcaggtctgtctacacccagatggtagcgcttgtgacactggcctggcagtcctgctcacagtgttctgtgcctgtgtgctcccaccctttcctcctgctgctgcagaaacccggccatccttccacacccagatctcttgtcctgtcctcaccccaccctgccaccatcagccctgcctggagccacctgccctttggcaacaaaaccaaacctttttgtgggcgttcaagatggtattgtgcccaccagtcagatcctgtgttttgagtcccaaaggccatgccaaggattggctttgggaggctttaatcaccaacccatcaacatcaagcctcccccaggccggttcaaataaatgtatttaaataaaaa

SEQ ID NO: 374801 - DNA, 2652 bp, Homo sapiens
gggcggggctgggatccaaaagctcggcatggctgacgacgcgggtttggagaccccgctgtgttccgagcagttcggctccggggaggcacggggctgccgcgccgccgcggacgggagcctgcagtgggaggtcgggggctggcgctggtgggggctctccagggccttcacggtcaaacctgaaggacgagatgcgggcgaagtgggggcttccggggccccctcaccgcccctctccgggctccaggccgtgttcctgcctcagggcttccctgatagcgtcagcccggactacttgccctaccagctgtgggattccgtgcaggcgtttgcttccagcctctccggctccctagccacccaggcagtcttgctgggcataggggtggggaacgcaaaagccactgtttcagctgccacggccacctggctcgtgaaagattcaactggcatgctgggccgcatcgtctttgcctggtggaaagggagcaaactggactgcaatgccaagcagtggaggctttttgcggacatcctcaatgacgtagccatgttccttgagattatggctcctgtatacccaatctgtttcaccatgaccgtctccaccagcaacctagccaagtgcatcgtgagtgttgctggtggggccactcgggctgccctgaccgtgcaccaggctcggaggaacaacatggctgacgtgtcagccaaggacagcagccaggagacgctggtgaacctggcggggctcttggtcagcctcctgatgctccctctggtgtcaggttgccctggcttcagccttggatgtttcttcttcctcactgccctccacatctacgccaactaccgcgcggtccgagccctggtcatggagaccttgaacgaaggccggctccggctggtcctgaagcactaccttcagaggggagaggtactcgacccaactgcagccaatcgcatggagccgctgtggacagaccaggtacaggtagttctgaaccagaaggcaggccccaagaccatcctaagggccgccacacatgggctgatgcttggggccctgcagggagatggaccccttccagcagagctggaggagctgaggaaccgggtgcgggcaggtcctaagaaagagagctgggtcgtcgtcaaggagacacacgaagtgttggacatgctgttcccaaagttcttgaaaggactgcaggatgccggctggaagaccgagaagcaccagctagaggtggatgagtggagggccacatggcttctgtctcccgaaaagaaggtcttgtgagcagcccagacggaggcccaagcccagggcaggaacctggagcaaggacactttggccacagcaggacaggggaaaggcagctttatttttccttagggcaactgcagcgggtgggccaggccctcatgggaagtgactgccaatcagatgcagtgggccccaggcagaggaaggccgggagaaggggagccaggaccttctcaccccactgccccttccccttttctggggagcaccgcaggctcctcacccccacttcctgtgaggctgtggcttatggtgtccaacgcagttggtcttaggcatagaagccccagaggaacacggccactgccatcatgagcagggcattgaggttgaccacacgggcccagctcgggtcctcgctgatgtcctccagccgcctggctgctgccgctgcctcctcctgggtaaggggcggaggactgcccaccccacctctgctcattccacaaaaccagagcaggcactggcggaagaggcttggtgccggggcctggggctctgagggaaattgaggccctgcagttagtttgcgggaactcagctcctccagccccacctcccagcatggtgccctaccattcatctccatggcactctctgggcacccattctgtacagggagtgaggagccttgctgctcatcagcatccaggtcctcccgttcctccttgctatgccggagactgaagaccaggcggtggagctggggagggtgggagcacgaacgaggtgggagttctgtccccccatgcctggccctaaagtctcttgcacaccagctcgtcactgcctgccctacccacctctgtccagtctacacacccagcccaggcttaactcatgccaactccaccctacatggctgccctgtgccctcgggataaaccccaagcccctgagcttgtgtttaaagccgttggccttgctcccccagctttgtcagctcaggtctgtctacacccagatggtagcgcttgtgacactggcctggcagtcctgctcacagtgttctgtgcctgtgtgctcccaccctttcctcctgctgctgcagaaacccggccatccttccacacccagatctcttgtcctgtcctcaccccaccctgccaccatcagccctgcctggagccacctgccctttggcaacaaaaccaaacctttttgtgggcgttcaagatggtattgtgcccaccagtcagatcctgtgttttgagtcccaaaggccatgccaaggattggctttgggaggctttaatcaccaacccatcaacatcaagcctcccccaggccggttcaaataaatgtatttaaataaaaa

SEQ ID NO: 374802 - DNA, 3137 bp, Homo sapiens
gggcggggctgggatccaaaagctcggcatggctgacgacgcgggtttggagaccccgctgtgttccgagcagttcggctccggggaggcacggggctgccgcgccgccgcggacgggagcctgcagtgggaggtcgggggctggcgctggtgggggctctccagggccttcacggtcaaacctgaaggacgagatgcgggcgaagtgggggcttccggggccccctcaccgcccctctccgggctccaggccgtgttcctgcctcagggcttccctgatagcgtcagcccggactacttgccctaccagctgtgggattccgtgcaggcgtttgcttccagcctctccggctccctagccacccaggcagtcttgctgggcataggggtggggaacgcaaaagccactgtttcagctgccacggccacctggctcgtgaaagattcaactggcatgctgggccgcatcgtctttgcctggtggaaagggagcaaactggactgcaatgccaagcagtggaggctttttgcggacatcctcaatgacgtagccatgttccttgagattatggctcctgtatacccaatctgtttcaccatgaccgtctccaccagcaacctagccaagtgcatcgtgagtgttgctggtggggccactcgggctgccctgaccgtgcaccaggctcggaggaacaacatggctgacgtgtcagccaaggacagcagccaggagacgctggtgaacctggcggggctcttggtcagcctcctgatgctccctctggtgtcaggttgccctggcttcagccttggatgtttcttcttcctcactgccctccacatctacgccaactaccgcgcggtccgagccctggtcatggagaccttgaacgaaggccggctccggctggtcctgaagcactaccttcagaggggagaggtactcgacccaactgcagccaatcgcatggagccgctgtggacaggtttctggccagctccgtctctatccctgggggtccccttacaccgcttggtctccagtgtctttgagctgcagcagctggttgaggggcaccaagaatcctacctcctctgctgggaccagtcacaaaaccaggtacaggtagttctgaaccagaaggcaggccccaagaccatcctaagggccgccacacatgggctgatgcttggggccctgcagggagatggaccccttccagcagagctggaggagctgaggaaccgggtgcgggcaggtcctaagaaagagagctgggtcgtcgtcaaggagacacacgaagtgttggacatgctgttcccaaagttcttgaaaggactgcaggatgccggctggaagaccgagaagcaccagctagaggtggatgagtggagggccacatggcttctgtctcccgaaaagaaggtcttgtgagcagcccagacggaggcccaagcccagggcaggaacctggagcaaggacactttggccacagcaggacaggggaaaggcagctttatttttccttagggcaactgcagcgggtgggccaggccctcatgggaagtgactgccaatcagatgcagtgggccccaggcagaggaaggccgggagaaggggagccaggaccttctcaccccactgccccttccccttttctggggagcaccgcaggctcctcacccccacttcctgtgaggctgtggcttatggtgtccaacgcagttggtcttaggcatagaagccccagaggaacacggccactgccatcatgagcagggcattgaggttgaccacacgggcccagctcgggtcctcgctgatgtcctccagccgcctggctgctgccgctgcctcctcctgggtaaggggcggaggactgcccaccccacctctgctcattccacaaaaccagagcaggcactggcggaagaggcttggtgccggggcctggggctctgagggaaattgaggccctgcagttagtttgcgggaactcagctcctccagccccacctcccagcatggtgccctaccattcatctccatggcactctctgggcacccattctgtacagggagtgaggagccttgctgctcatcagcatccaggtcctcccgttcctccttgctatgccggagactgaagaccaggcggtggagctggggagggtgggagcacgaacgaggtgggagttctgtccccccatgcctggccctaaagtctcttgcacaccagctcgtcactgcctgccctacccacctctgtccagtctacacacccagcccaggcttaactcatgccaactccaccctacatggctgccctgtgccctcgggataaaccccaagcccctgagcttgtgtttaaagccgttggccttgctcccccagctttgtcagctcaggtctgtctacacccagatggtagcgcttgtgacactggcctggcagtcctgctcacagtgttctgtgcctgtgtgctcccaccctttcctcctgctgctgcagaaacccggccatccttccacacccagatctcttgtcctgtcctcaccccaccctgccaccatcagccctgcctggagccacctgccctttggcaacaaaaccaaacctttttgtgggcgttcaagatggtattgtgcccaccagtcagatcctgtgttttgagtcccaaaggccatgccaaggattggctttgggaggctttaatcaccaacccatcaacatcaagcctcccccaggccggttcaaataaatgtatttaaataaaaataaaaattcttgctcggcaattgcaactgcagctggacccccagcccattcccaaccctcagtcgagaaattcaggtcctcccagctgggcactccaggaagcagagggtaggtgctgtgtcccacagtgcttgcctggggcacctggccactcacgtgctttctggggatgggcgcggtgcacagggagaccgtgagggtgaggaggccagagcagaagaacagcacaatggcgaagtagaggtagtgcacgccgcagaggaaagctgggcacgccgagggctgcacacagctgcccgagccgaaggagaactcgggaatcaggcgtgccaggcccatcagcaggcccccgatga

SEQ ID NO: 374803 - DNA, 2636 bp, Homo sapiens
gggcggggctgggatccaaaagctcggcatggctgacgacgcgggtttggagaccccgctgtgttccgagcagttcggctccggggaggcacggggctgccgcgccgccgcggacgggagcctgcagtgggaggtcgggggctggcgctggtgggggctctccagggccttcacggtcaaacctgaaggacgagatgcgggcgaagtgggggcttccggggccccctcaccgcccctctccgggctccaggccgtgttcctgcctcagggcttccctgatagcgtcagcccggactacttgccctaccagctgtgggattccgtgcaggcgtttgcttccagcctctccggctccctagccacccaggcagtcttgctgggcataggggtggggaacgcaaaagccactgtttcagctgccacggccacctggctcgtgaaagattcaactggcatgctgggccgcatcgtctttgcctggtggaaagggagcaaactggactgcaatgccaagcagtggaggctttttgcggacatcctcaatgacgtagccatgttccttgagattatggctcctgtatacccaatctgtttcaccatgaccgtctccaccagcaacctagccaagtgcatcgtgagtgttgctggtggggccactcgggctgccctgaccgtgcaccaggctcggaggaacaacatggctgacgtgtcagccaaggacagcagccaggagacgctggtgaacctggcggggctcttggtcagcctcctgatgctccctctggtgtcaggttgccctggcttcagccttggatgtttcttcttcctcactgccctccacatctacgccaactaccgcgcggtccgagccctggtcatggagaccttgaacgaaggccggctccggctggtcctgaagcactaccttcagaggggagaggtactcgacccaactgcagccaatcgcatggagccgctgtggacaggtttctggccagctccgtctctatccctgggggtccccttacaccgcttggtctccagtgtctttgagctgcagcagctggttgaggggcaccaagaatcctacctcctctgctgggaccagtcacaaaaccaggtacaggtagttctgaaccagaaggcaggccccaagaccatcctaagggccgccacacatgggctgatgcttggggccctgcagggagatggaccccttccagcagagctggaggagctgaggaaccgggtgcgggcaggtcctaagaaagagagctgggtcgtcgtcaaggagacacacgaagtgttggacatgctgttcccaaagttcttgaaaggactgcaggatgccggctggaagaccgagaagcaccagctagaggtggatgagtggagggccacatggcttctgtctcccgaaaagaaggtcttgtgagcagcccagacggaggcccaagcccagggcaggaacctggagcaaggacactttggccacagcaggacaggggaaaggcagctttatttttccttagggcaactgcagcgggtgggcgtgaggctgtggcttatggtgtccaacgcagttggtcttaggcatagaagccccagaggaacacggccactgccatcatgagcagggcattgaggttgaccacacgggcccagctcgggtcctcgctgatgtcctccagccgcctggctgctgccgctgcctcctcctgggtaaggggcggaggactgcccaccccacctctgctcattccacaaaaccagagcaggcactggcggaagaggcttggtgccggggcctggggctctgagggaaattgaggccctgcagttagtttgcgggaactcagctcctccagccccacctcccagcatggtgccctaccattcatctccatggcactctctgggcacccattctgtacagggagtgaggagccttgctgctcatcagcatccaggtcctcccgttcctccttgctatgccggagactgaagaccaggcggtggagctggggagggtgggagcacgaacgaggtgggagttctgtccccccatgcctggccctaaagtctcttgcacaccagctcgtcactgcctgccctacccacctctgtccagtctacacacccagcccaggcttaactcatgccaactccaccctacatggctgccctgtgccctcgggataaaccccaagcccctgagcttgtgtttaaagccgttggccttgctcccccagctttgtcagctcaggtctgtctacacccagatggtagcgcttgtgacactggcctggcagtcctgctcacagtgttctgtgcctgtgtgctcccaccctttcctcctgctgctgcagaaacccggccatccttccacacccagatctcttgtcctgtcctcaccccaccctgccaccatcagccctgcctggagccacctgccctttggcaacaaaaccaaacctttttgtgggcgttcaagatggtattgtgcccaccagtcagatcctgtgttttgagtcccaaaggccatgccaaggattggctttgggaggctttaatcaccaacccatcaacatcaagcctcccccaggccggttcaaataaatgtatttaaataaaaa

SEQ ID NO: 374804 - DNA, 2215 bp, Homo sapiens
ggggattctcggagcactgtcgggcctactgggaccatggaccgtctccaccagcaacctagtgcatcgtgagtgttgctggtggggccactcgggctgccctgaccgtgcaccaggctcggaggaacaacatggctgacgtgtcagccaaggacagcagccaggagacgctggtgaacctggcggggctcttggtcagcctcctgatgctccctctggtgtcaggttgccctggcttcagccttggatgtttcttcttcctcactgccctccacatctacgccaactaccgcgcggtccgagccctggtcatggagaccttgaacgaaggccggctccggctggtcctgaagcactaccttcagaggggagaggtactcgacccaactgcagccaatcgcatggagccgctgtggacaggtttctggccagctccgtctctatccctgggggtccccttacaccgcttggtctccagtgtctttgagctgcagcagctggttgaggggcaccaagaatcctacctcctctgctgggaccagtcacaaaaccaggtacaggtagttctgaaccagaaggcaggccccaagaccatcctaagggccgccacacatgggctgatgcttggggccctgcagggagatggaccccttccagcagagctggaggagctgaggaaccgggtgcgggcaggtcctaagaaagagagctgggtcgtcgtcaaggagacacacgaagtgttggacatgctgttcccaaagttcttgaaaggactgcaggatgccggctggaagaccgagaagcaccagctagaggtggatgagtggagggccacatggcttctgtctcccgaaaagaaggtcttgtgagcagcccagacggaggcccaagcccagggcaggaacctggagcaaggacactttggccacagcaggacaggggaaaggcagctttatttttccttagggcaactgcagcgggtgggccaggccctcatgggaagtgactgccaatcagatgcagtgggccccaggcagaggaaggccgggagaaggggagccaggaccttctcaccccactgccccttccccttttctggggagcaccgcaggctcctcacccccacttcctgtgaggctgtggcttatggtgtccaacgcagttggtcttaggcatagaagccccagaggaacacggccactgccatcatgagcagggcattgaggttgaccacacgggcccagctcgggtcctcgctgatgtcctccagccgcctggctgctgccgctgcctcctcctgggtaaggggcggaggactgcccaccccacctctgctcattccacaaaaccagagcaggcactggcggaagaggcttggtgccggggcctggggctctgagggaaattgaggccctgcagttagtttgcgggaactcagctcctccagccccacctcccagcatggtgccctaccattcatctccatggcactctctgggcacccattctgtacagggagtgaggagccttgctgctcatcagcatccaggtcctcccgttcctccttgctatgccggagactgaagaccaggcggtggagctggggagggtgggagcacgaacgaggtgggagttctgtccccccatgcctggccctaaagtctcttgcacaccagctcgtcactgcctgccctacccacctctgtccagtctacacacccagcccaggcttaactcatgccaactccaccctacatggctgccctgtgccctcgggataaaccccaagcccctgagcttgtgtttaaagccgttggccttgctcccccagctttgtcagctcaggtctgtctacacccagatggtagcgcttgtgacactggcctggcagtcctgctcacagtgttctgtgcctgtgtgctcccaccctttcctcctgctgctgcagaaacccggccatccttccacacccagatctcttgtcctgtcctcaccccaccctgccaccatcagccctgcctggagccacctgccctttggcaacaaaaccaaacctttttgtgggcgttcaagatggtattgtgcccaccagtcagatcctgtgttttgagtcccaaaggccatgccaaggattggctttgggaggctttaatcaccaacccatcaacatcaagcctcccccaggccggttcaaataaatgtatttaaataaaaa

SEQ ID NO: 374805 - DNA, 2720 bp, Homo sapiens
gggcggggctgggatccaaaagctcggcatggctgacgacgcgggtttggagaccccgctgtgttccgagcagttcggctccggggaggcacggggctgccgcgccgccgcggacgggagcctgcagtgggaggtcgggggctggcgctggtgggggctctccagggccttcacggtcaaacctgaaggacgagatgcgggcgaagtgggggcttccggggccccctcaccgcccctctccgggctccaggccgtgttcctgcctcagggcttccctgatagcgtcagcccggactacttgccctaccagctgtgggattccgtgcaggcgtttgcttccagcctctccggctccctagccacccaggcagtcttgctgggcataggggtggggaacgcaaaagccactgtttcagctgccacggccacctggctcgtgaaagattcaactggcatgctgggccgcatcgtctttgcctggtggaaaggtgcatcgtgagtgttgctggtggggccactcgggctgccctgaccgtgcaccaggctcggaggaacaacatggctgacgtgtcagccaaggacagcagccaggagacgctggtgaacctggcggggctcttggtcagcctcctgatgctccctctggtgtcaggttgccctgggtaagccggaagcagggtgggcaggagaaccccagctgggcctctgcccacttcagctacctcactctctcaccccagcttcagccttggatgtttcttcttcctcactgccctccacatctacgccaactaccgcgcggtccgagccctggtcatggagaccttgaacgaaggccggctccggctggtcctgaagcactaccttcagaggggagaggtactcgacccaactgcagccaatcgcatggagccgctgtggacaggtttctggccagctccgtctctatccctgggggtccccttacaccgcttggtctccagtgtctttgagctgcagcagctggttgaggggcaccaagaatcctacctcctctgctgggaccagtcacaaaaccaggtacaggtagttctgaaccagaaggcaggccccaagaccatcctaagggccgccacacatgggctgatgcttggggccctgcagggagatggaccccttccagcagagctggaggagctgaggaaccgggtgcgggcaggtcctaagaaagagagctgggtcgtcgtcaaggagacacacgaagtgttggacatgctgttcccaaagttcttgaaaggactgcaggatgccggctggaagaccgagaagcaccagctagaggtggatgagtggagggccacatggcttctgtctcccgaaaagaaggtcttgtgagcagcccagacggaggcccaagcccagggcaggaacctggagcaaggacactttggccacagcaggacaggggaaaggcagctttatttttccttagggcaactgcagcgggtgggccaggccctcatgggaagtgactgccaatcagatgcagtgggccccaggcagaggaaggccgggagaaggggagccaggaccttctcaccccactgccccttccccttttctggggagcaccgcaggctcctcacccccacttcctgtgaggctgtggcttatggtgtccaacgcagttggtcttaggcatagaagccccagaggaacacggccactgccatcatgagcagggcattgaggttgaccacacgggcccagctcgggtcctcgctgatgtcctccagccgcctggctgctgccgctgcctcctcctgggtaaggggcggaggactgcccaccccacctctgctcattccacaaaaccagagcaggcactggcggaagaggcttggtgccggggcctggggctctgagggaaattgaggccctgcagttagtttgcgggaactcagctcctccagccccacctcccagcatggtgccctaccattcatctccatggcactctctgggcacccattctgtacagggagtgaggagccttgctgctcatcagcatccaggtcctcccgttcctccttgctatgccggagactgaagaccaggcggtggagctggggagggtgggagcacgaacgaggtgggagttctgtccccccatgcctggccctaaagtctcttgcacaccagctcgtcactgcctgccctacccacctctgtccagtctacacacccagcccaggcttaactcatgccaactccaccctacatggctgccctgtgccctcgggataaaccccaagcccctgagcttgtgtttaaagccgttggccttgctcccccagctttgtcagctcaggtctgtctacacccagatggtagcgcttgtgacactggcctggcagtcctgctcacagtgttctgtgcctgtgtgctcccaccctttcctcctgctgctgcagaaacccggccatccttccacacccagatctcttgtcctgtcctcaccccaccctgccaccatcagccctgcctggagccacctgccctttggcaacaaaaccaaacctttttgtgggcgttcaagatggtattgtgcccaccagtcagatcctgtgttttgagtcccaaaggccatgccaaggattggctttgggaggctttaatcaccaacccatcaacatcaagcctcccccaggccggttcaaataaatgtatttaaataaaaa

SEQ ID NO: 374806 - DNA, 2605 bp, Homo sapiens
gggcggggctgggatccaaaagctcggcatggctgacgacgcgggtttggagaccccgctgtgttccgagcagttcggctccggggaggcacggggctgccgcgccgccgcggacgggagcctgcagtgggaggtcgggggctggcgctggtgggggctctccagggccttcacggtcaaacctgaaggacgagatgcgggcgaagtgggggcttccggggccccctcaccgcccctctccgggctccaggccgtgttcctgcctcagggcttccctgatagcgtcagcccggactacttgccctaccagctgtgggattccgtgcaggcgtttgcttccagcctctccggctccctagccacccaggcagtcttgctgggcataggggtggggaacgcaaaagccactgtttcagctgccacggccacctggctcgtgaaagattcaactggcatgctgggccgcatcgtctttgcctggtggaaagggagcaaactggactgcaatgccaagcagtggaggctttttgcggacatcctcaatgacgtagccatgttccttgagattatggctcctgtatacccaatctgtttcaccatgaccgtctccaccagcaacctagccaagtgcatcgtgagtgttgctggtggggccactcgggctgccctgaccgtgcaccaggctcggaggaacaacatggctgacgtgtcagccaaggacagcagccaggagacgctggtgaacctggcggggctcttggtcagcctcctgatgctccctctggtgtcaggttgccctggcttcagccttggatgtttcttcttcctcactgccctccacatctacgccaactaccgcgcggtccgagccctggtcatggagaccttgaacgaaggccggctccggctggtcctgaagcactaccttcagaggggagaggtactcgacccaactgcagccaatcgcatggagccgctgtggacaggtttctggccagctccgtctctatccctgggggtccccttacaccgcttggtctccagtgtctttgagctgcagcagctggttgaggggcaccaagaatcctacctcctctgctgggaccagtcacaaaaccaggtacaggtagttctgaaccagaaggcaggccccaagaccatcctaagggccgccacacatgggctgatgcttggggccctgcagggagatggaccccttccagcagagctggaggagctgaggaaccgggtgcgggcaggtcctaagaaagagagctgggtcgtcgtcaaggagacacacgaagtgttggacatgctgttcccaaagttcttgaaaggactgcaggatgccggctggaagaccgagaagcaccagctagaggtggatgagtggagggccacatggcttctgtctcccgaaaagaaggtcttgtgagcagcccagacggaggcccaagcccagggcaggaacctggagcaaggacactttggccacagcaggacaggggaaaggcagctttatttttccttagggcaactgcagcgggtgggccaggccctcatgggaagtgactgccaatcagatgcagtgggccccaggcagaggaaggccgggagaaggggagccaggaccttctcaccccactgccccttccccttttctggggagcaccgcaggctcctcacccccacttcctgtgaggctgtggcttatggtgtccaacgcagttggtcttaggcatagaagccccagaggaacacggccactgccatcatgagcagggcattgaggttgaccacacgggcccagctcgggtcctcgctgatgtcctccagccgcctggctgctgccgctgcctcctcctgggtaaggggcggaggactgcccaccccacctctgctcattccacaaaaccagagcaggcactggcggaagaggcttggtgccggggcctggggctctgagggaaattgaggccctgcagttagtttgcgggaactcagctcctccagccccacctcccagcatggtgccctaccattcatctccatggcactctctgggcacccattctgtacagggagtgaggagccttgctgctcatcagcatccaggtcctcccgttcctccttgctatgccggagactgaagaccaggcggtggagctggggagggtgggagcacgaacgaggtgggagttctgtccccccatgcctggccctaaagtctcttgcacaccagctcgtcactgcctgccctacccacctctgtccagtctacacacccagcccaggcttaactcatgccaactccacccctttcctcctgctgctgcagaaacccggccatccttccacacccagatctcttgtcctgtcctcaccccaccctgccaccatcagccctgcctggagccacctgccctttggcaacaaaaccaaacctttttgtgggcgttcaagatggtattgtgcccaccagtcagatcctgtgttttgagtcccaaaggccatgccaaggattggctttgggaggctttaatcaccaacccatcaacatcaagcctcccccaggccggttcaaataaatgtatttaaataaaaa

SEQ ID NO: 374807 - DNA, 1890 bp, Homo sapiens
gggcggggctgggatccaaaagctcggcatggctgacgacgcgggtttggagaccccgctgtgttccgagcagttcggctccggggaggcacggggctgccgcgccgccgcggacgggagcctgcagtgggaggtcgggggctggcgctggtgggggctctccagggccttcacggtcaaacctgaaggacgagatgcgggcgaagtgggggcttccggggccccctcaccgcccctctccgggctccaggccgtgttcctgcctcagggcttccctgatagcgtcagcccggactacttgccctaccagctgtgggattccgtgcaggcgtttgcttccagcctctccggctccctagccacccaggcagtcttgctgggcataggggtggggaacgcaaaagccactgtttcagctgccacggccacctggctcgtgaaagattcaactggcatgctgggccgcatcgtctttgcctggtggaaagggagcaaactggactgcaatgccaagcagtggaggctttttgcggacatcctcaatgacgtagccatgttccttgagattatggctcctgtatacccaatctgtttcaccatgaccgtctccaccagcaacctagccaagtgcatcgtgagtgttgctggtggggccactcgggctgccctgaccgtgcaccaggctcggaggaacaacatggctgacgtgtcagccaaggacagcagccaggagacgctggtgaacctggcggggctcttggtcagcctcctgatgctccctctggtgtcaggttgccctggcttcagccttggatgtttcttcttcctcactgccctccacatctacgccaactaccgcgcggtccgagccctggtcatggagaccttgaacgaaggccggctccggctggtcctgaagcactaccttcagaggggagaggtactcgacccaactgcagccaatcgcatggagccgctgtggacaggtttctggccagctccgtctctatccctgggggtccccttacaccgcttggtctccagtgtctttgagctgcagcagctggttgaggggcaccaagaatcctacctcctctgctgggaccagtcacaaaaccaggtacaggtagttctgaaccagaaggcaggccccaagaccatcctaagggccgccacacatgggctgatgcttggggccctgcagggagatggaccccttccagcagagctggaggagctgaggaaccgggtgcgggcaggtcctaagaaagagagctgggtcgtcgtcaaggagacacacgaagtgttggacatgctgttcccaaagttcttgaaaggactgcaggatgccggctggaagaccgagaagcaccagctagaggtggatgagtggagggccacatggcttctgtctcccgaaaagaaggtcttgtgagcagcccagacggaggcccaagcccagggcaggaacctggagcaaggacactttggccacagcaggacaggggaaaggcagctttatttttccttagggcaactgcagcgggtgggccaggccctcatgggaagtgactgccaatcagatgcagtgggccccaggcagaggaaggccgggagaaggggagccaggaccttctcaccccactgccctctcttgtcctgtcctcaccccaccctgccaccatcagccctgcctggagccacctgccctttggcaacaaaaccaaacctttttgtgggcgttcaagatggtattgtgcccaccagtcagatcctgtgttttgagtcccaaaggccatgccaaggattggctttgggaggctttaatcaccaacccatcaacatcaagcctcccccaggccggttcaaataaatgtatttaaataaaaa

SEQ ID NO: 374808 - DNA, 1940 bp, Homo sapiens
gggcggggctgggatccaaaagctcggcatggctgacgacgcgggtttggagaccccgctgtgttccgagcagttcggctccggggaggcacggggctgccgcgccgccgcggacgggagcctgcagtgggaggtcgggggctggcgctggtgggggctctccagggccttcacggtcaaacctgaaggacgagatgcgggcgaagtgggggcttccggggccccctcaccgcccctctccgggctccaggccgtgttcctgcctcagggcttccctgatagcgtcagcccggactacttgccctaccagctgtgggattccgtgcaggcgtttgcttccagcctctccggctccctagccacccaggcagtcttgctgggcataggggtggggaacgcaaaagccactgtttcagctgccacggccacctggctcgtgaaagattcaactggcatgctgggccgcatcgtctttgcctggtggaaagggagcaaactggactgcaatgccaagcagtggaggctttttgcggacatcctcaatgacgtagccatgttccttgagattatggctcctgtatacccaatctgtttcaccatgaccgtctccaccagcaacctagccaagtgcatcgtgagtgttgctggtggggccactcgggctgccctgaccgtgcaccaggctcggaggaacaacatggctgacgtgtcagccaaggacagcagccaggagacgctggtgaacctggcggggctcttggtcagcctcctgatgctccctctggtgtcaggttgccctggcttcagccttggatgtttcttcttcctcactgccctccacatctacgccaactaccgcgcggtccgagccctggtcatggagaccttgaacgaaggccggctccggctggtcctgaagcactaccttcagaggggagaggtactcgacccaactgcagccaatcgcatggagccgctgtggacaggtttctggccagctccgtctctatccctgggggtccccttacaccgcttggtctccagtgtctttgagctgcagcagctggttgaggggcaccaagaatcctacctcctctgctgggaccagtcacaaaaccaggtacaggtagttctgaaccagaaggcaggccccaagaccatcctaagggccgccacacatgggctgatgcttggggccctgcagggagatggaccccttccagcagagctggaggagctgaggaaccgggtgcgggcaggtcctaagaaagagagctgggtcgtcgtcaaggagacacacgaagtgttggacatgctgttcccaaagttcttgaaaggactgcaggatgccggctggaagaccgagaagcaccagctagaggtggatgagtggagggccacatggcttctgtctcccgaaaagaaggtcttgtgagcagcccagacggaggcccaagcccagggcaggaacctggagcaaggacactttggccacagcaggacaggggaaaggcagctttatttttccttagggcaactgcagcgggtgggccaggccctcatgggaagtgactgccaatcagatgcagtgggccccaggcagaggaaggccgggagaaggggagccaggaccttctcaccccactgccccttccccttttctggggagcaccgcaggtcagcatccaggtcctcccgttcctccttgctatgccggagactgaagaccaggcggtggaggtgctttctggggatgggcgcggtgcacagggagaccgtgagggtgaggaggccagagcagaagaacagcacaatggcgaagtagaggtagtgcacgccgcagaggaaagctgggcacgccgagggctgcacacagctgcccgagccgaaggagaactcgggaatcaggcgtgccaggcccatcagcaggcccccgatga

SEQ ID NO: 374809 - DNA, 1812 bp, Homo sapiens
gggcggggctgggatccaaaagctcggcatggctgacgacgcgggtttggagaccccgctgtgttccgagcagttcggctccggggaggcacggggctgccgcgccgccgcggacgggagcctgcagtgggaggtcgggggctggcgctggtgggggctctccagggccttcacggtcaaacctgaaggacgagatgcgggcgaagtgggggcttccggggccccctcaccgcccctctccgggctccaggccgtgttcctgcctcagggcttccctgatagcgtcagcccggactacttgccctaccagctgtgggattccgtgcaggcgtttgcttccagcctctccggctccctagccacccaggcagtcttgctgggcataggggtggggaacgcaaaagccactgtttcagctgccacggccacctggctcgtgaaagattcaactggcatgctgggccgcatcgtctttgcctggtggaaagggagcaaactggactgcaatgccaagcagtggaggctttttgcggacatcctcaatgacgtagccatgttccttgagattatggctcctgtatacccaatctgtttcaccatgaccgtctccaccagcaacctagccaagtgcatcgtgagtgttgctggtggggccactcgggctgccctgaccgtgcaccaggctcggaggaacaacatggctgacgtgtcagccaaggacagcagccaggagacgctggtgaacctggcggggctcttggtcagcctcctgatgctccctctggtgtcaggttgccctggcttcagccttggatgtttcttcttcctcactgccctccacatctacgccaactaccgcgcggtccgagccctggtcatggagaccttgaacgaaggccggctccggctggtcctgaagcactaccttcagaggggagaggtactcgacccaactgcagccaatcgcatggagccgctgtggacaggtttctggccagctccgtctctatccctgggggtccccttacaccgcttggtctccaggtgagtggcctagcgtctcccgctcgtcaccaccgccacccacactcccctcactccgattacacactggcctccctggcaaggccccacctctctgtcctgggttcttcattgctgctgaacagacatggggttggtgtgggtgtgtgaggaaggaaagggtgtataacattctcttgtcctgtcctcaccccaccctgccaccatcagccctgcctggagccacctgccctttggcaacaaaaccaaacctttttgtgggcgttcaagatggtattgtgcccaccagtcagatcctgtgttttgagtcccaaaggccatgccaaggattggctttgggaggctttaatcaccaacccatcaacatcaagcctcccccaggccggttcaaataaatgtatttaaataaaaataaaaattcttgctcggcaattgcaactgcagctggacccccagcccattcccaaccctcagtcgagaaattcaggtcctcccagctgggcactccaggaagcagagggtaggtgctgtgtcccacagtgcttgcctggggcacctggccactcacgtgctttctggggatgggcgcggtgcacagggagaccgtgagggtgaggaggccagagcagaagaacagcacaatggcgaagtagaggtagtgcacgccgcagaggaaagctgggcacgccgagggctgcacacagctgcccgagccgaaggagaactcgggaatcaggcgtgccaggcccatcagcaggcccccgatga

SEQ ID NO: 374810 - DNA, 754 bp, Homo sapiens
gggcggggctgggatccaaaagctcggcatggctgacgacgcgggtttggagaccccgctgtgttccgagcagttcggctccggggaggcacggggctgccgcgccgccgcggacgggagcctgcagtgggaggtcgggggctggcgctggtgggggctctccagggccttcacggtcaaacctgaaggacgagatgcgggcgaagtgggggcttccggggccccctcaccgcccctctccgggctccaggccgtgttcctgcctcagggcttccctgatagcgtcagcccggactacttgccctaccagctgtgggattccgtgcaggcgtttgcttccagcctctccggctccctagccacccaggcagtcttgctgggcataggggtggggaacgcaaaagccactgtttcagctgccacggccacctggctcgtgaaagattcaactggcatgctgggccgcatcgtctttgcctggtggaaagggagcaaactggactgcaatgccaagcagtggaggctttttgcggacatcctcaatgacgtagccatgttccttgagattatggctcctgtatacccaatctgtttcaccatgaccgtctccaccagcaacctagccaaggtagctgcctgtgggggcacccatctgcctaaaacacctgccttggtagtgtgtgagtttacctgggctctgtgagtttacctgccacttcaagaagaataagaaagttcagatgtttctactcga

SEQ ID NO: 374811 - DNA, 390 bp, Homo sapiens
gaaattagggcattattggatagtgtgatgcatagatacagtttgttaatttacttcagatgaattgataaaatgctgtatgatgctgaatcctgacttacacagttgctgaaatgacactcccttattcaaagaaaatacatttctaaatgtgcaaggttaacaaaaatggtttgaaaactgttggtgatgtattttttaaaagtatagagtagaaaatatactttttatcttatagttatgattgtgatatagagaattctttgagatcttttgaccctttattttagtttattagtatgttgtaaaaagtatgttaacttaagcaaaatcagttcagcttttaactgcgttgctggtaacaacttagtatttaacgtagaactctgt

SEQ ID NO: 374812 - DNA, 362 bp, Homo sapiens
aagagccaggaacgataagggaacaaacttcatattagagtaaacgtgatttttccaatacgctcatagtatgctatcattcccaattaccttcccaactgcacttctcatataatgtatttgggaggccgaggcaggcagatcacttgaatcaggagttcaagaccagcccggccaacatggtgaaactccgtctctaccaaaactataaaaattagctgggcatggtggcaggtgcctgtaatcccagctactcgggaggctgaggcaggagaatcgcttgaacccgggaggcagatgctgcagtgagccaagatcacgcaccgtactccagcctgggtgacagagtgagactctgccac

SEQ ID NO: 374813 - DNA, 640 bp, Homo sapiens
  misc_feature (1)..(1): n is a, c, g, or t
  misc_feature (62)..(62): n is a, c, g, or t
nggaatgggaggcctttattcttaaattaaaaccaacaaaggggggaaaatggaaaagtatnaccttcagatctaaatggtaatctgaacccaaatttgtataaagacttttcaggtgaaaagacttgattttttgaaaggattgtttatcaaacacaattctaatctcttctcttatgtatttttgtgcactaggcgcagttgtgtagcagttgagtaatgctggttagctgttaaggtggcgtgttgcagtgcagagtgcttggctgtttcctgttttctcccgattgctcctgtgtaaagatgccttgtcgtgcagaaacaaatggctgtccagtttattaaaatgcctgacaactgcacttccagtcacccgggccttgcatataaataacggagcatacagtgagcacatctagctgatgataaatacacctttttttccctcttccccctaaaaatggtaaatctgatcatatctacatgtatgaacttaacatggaaaatgttaaggaagcaaatggttgtaactttgtaagtacttataacatggtgtatctttttgcttatgaatattctgtattataaccattgtttctgtagtttaattaaaacattttcttggtgttagcttttctca

SEQ ID NO: 374814 - DNA, 2490 bp, Homo sapiens
aacgtagtcccgggtggcctggcacgcgcaagcgctcggcggggagtccccaccgccaggacgcagagccgacggagctctcgggctctggcgaaagggggttgggaagcggactccggcgaagagcagtcaggaacggctggacggggccgagagacgacgcagcggagtctgagggggccggggtcacagggagaggcaaatgagggcagaagcactcttcagacggagacggggctgacggctgagcaaaaaaggggcgtgaacttggagtattggcatgaaaaaaaggtgggggcccagatggggagcacctcctcttcctcctgcccaatcgcgatcgtccggcctcccaggcggaaaaagcgtttcgcgggctttccaactgcccgctaattccgctccccctccctccagccgtgactccgcgctttttggcccgcccgccgggctgtgcgcaggcgcttcgggtaggggcggggcgcgcggcagggtcgttacgaagcggggcgcggtgggccaatcagaaggtttcatttccgggtggcgcgggcgccattttgtgaggagcgatataaacgggcgcagaggccggctgcccgcccagttgttactcaggtgcgctagcctgcggagcccgtccgtgctgttctgcggcaaggcctttcccagtgtccccacgcggaaggcaactgcctgagaggcgcggcgtcgcaccgcccagagctgaggaagccggcgccagttcgcggggctccgggccgccactcagagctatgagctacggccgcccccctcccgatgtggagggtatgacctccctcaaggtggacaacctgacctaccgcacctcgcccgacacgctgaggcgcgtcttcgagaagtacgggcgcgtcggcgacgtgtacatcccgcgggatcgctacaccaaggagtcccgcggcttcgccttcgttcgctttcacgacaagcgcgacgctgaggacgctatggatgccatggacggggccgtgctggacggccgcgagctgcgggtgcaaatggcgcgctacggccgccccccggactcacaccacagccgccggggaccgccaccccgcaggtacgggggcggtggctacggacgccggagccgcagccctaggcggcgtcgccgcagccgatcccggagtcggagccgttccaggtctcgcagccgatctcgctacagccgctcgaagtctcggtcccgcactcgttctcgatctcggtcgacctccaagtccagatccgcacgaaggtccaagtccaagtcctcgtcggtctccagatctcgttcgcggtccaggtcccggtctcggtccaggagtcctcccccagtgtccaagagggaatccaaatccaggtcgcgatcgaagagtccccccaagtctcctgaagaggaaggagcggtgtcctcttaagaaaatgatgtatcggcaagcagtgtaaacggaggacttggggaaaaaggaccacatagtccatcgaagaagagtccttggaacaagcaactggctattgaaaaggttattttgtaacatttgtctaactttttacttgtttaagctttgcctcagttggcaaacttcattttatgtgccattttgttgctgttattcaaatttcttgtaatttagtgaggtgaacgacttcagatttcattattggatttggatatttgaggtaaaatttcattttgttatatagtgctgactttttttgtttgaaattaaacagattggtaacctaatttgtggcctcctgacttttaaggaaaacgtgtgcagccattacacacagcctaaagctgtcaagagattgactcggcattgccttcattccttaaaattaaaaacctacaaaagttggtgtaaatttgtatatgttatttaccttcagatctaaatggtaatctgaacccaaatttgtataaagacttttcaggtgaaaagacttgattttttgaaaggattgtttatcaaacacaattctaatctcttctcttatgtatttttgtgcactaggcgcagttgtgtagcagttgagtaatgctggttagctgttaaggtggcgtgttgcagtgcagagtgcttggctgtttcctgttttctcccgattgctcctgtgtaaagatgccttgtcgtgcagaaacaaatggctgtccagtttattaaaatgcctgacaactgcacttccagtcacccgggccttgcatataaataacggagcatacagtgagcacatctagctgatgataaatacacctttttttccctcttccccctaaaaatggtaaatctgatcatatctacatgtatgaacttaacatggaaaatgttaaggaagcaaatggttgtaactttgtaagtacttataacatggtgtatctttttgcttatgaatattctgtattataaccattgtttctgtagtttaattaaaacattttcttggtgttagcttttctca

SEQ ID NO: 374815 - DNA, 3485 bp, Homo sapiens
aacgtagtcccgggtggcctggcacgcgcaagcgctcggcggggagtccccaccgccaggacgcagagccgacggagctctcgggctctggcgaaagggggttgggaagcggactccggcgaagagcagtcaggaacggctggacggggccgagagacgacgcagcggagtctgagggggccggggtcacagggagaggcaaatgagggcagaagcactcttcagacggagacggggctgacggctgagcaaaaaaggggcgtgaacttggagtattggcatgaaaaaaaggtgggggcccagatggggagcacctcctcttcctcctgcccaatcgcgatcgtccggcctcccaggcggaaaaagcgtttcgcgggctttccaactgcccgctaattccgctccccctccctccagccgtgactccgcgctttttggcccgcccgccgggctgtgcgcaggcgcttcgggtaggggcggggcgcgcggcagggtcgttacgaagcggggcgcggtgggccaatcagaaggtttcatttccgggtggcgcgggcgccattttgtgaggagcgatataaacgggcgcagaggccggctgcccgcccagttgttactcaggtgcgctagcctgcggagcccgtccgtgctgttctgcggcaaggcctttcccagtgtccccacgcggaaggcaactgcctgagaggcgcggcgtcgcaccgcccagagctgaggaagccggcgccagttcgcggggctccgggccgccactcagagctatgagctacggccgcccccctcccgatgtggagggtatgacctccctcaaggtggacaacctgacctaccgcacctcgcccgacacgctgaggcgcgtcttcgagaagtacgggcgcgtcggcgacgtgtacatcccgcgggatcgctacaccaaggagtcccgcggcttcgccttcgttcgctttcacgacaagcgcgacgctgaggacgctatggatgccatggacggggccgtgctggacggccgcgagctgcgggtgcaaatggcgcgctacggccgccccccggactcacaccacagccgccggggaccgccaccccgcaggtacgggggcggtggctacggacgccggagccgcagccctaggcggcgtcgccgcagccgatcccggagtcggagccgttccaggtctcgcagccgatctcgctacagccgctcgaagtctcggtcccgcactcgttctcgatctcggtcgacctccaagtccagatccgcacgaaggtccaagtccaagtcctcgtcggtctccagatctcgttcgcggtccaggtcccggtctcggtccaggagtcctcccccagtgtccaagagggaatccaaatccaggtcgcgatcgaagagtccccccaagtctcctgaagaggaaggagcggtgtcctcttaagaaaatggtaatgtctgggaatccgagacacataaccctaattcataaatgggatttggggtaggtctttttgagtcgtgttaatgtaagaatgactcctatcattaggagtgctgctcggaggttactcacctttgggagtaatactgaagagaggggtctgcagaaaggatgtgtatgaagcttagataataatggctgtttcgtaaactgtttgagacctattaatgaaaatgactatttcttgctgtttttatccaacgtctgcattttccccctttaaagctgcggtctcctgtttgataaaagaatattggccagtattgcagattttaactgatttggctgatcctccagggaccagtttctgtgggcgtgtattggagcaggtttgtctttaaatgttaaagatgcactatcctcttagagaaacaatcagttcaactattgttgtactgactgggacttcatattctaatggatgtggcaaaagaattgcaataagaagcagtgaacatttggaaccccaaaagaaagttacaggtattgcactgggtggggaaaggatagtgtgtctttaactcttaaattgtttggtcctattttttaaaaaggaaagggccctaagtagctcagatattaaagtagtattctcaattaccaaatgtttcatttgaaacaatttatcttaatgaaatatagaccaattctctgatctcgagttgtttttgtttggatacagcccttttttttttctttttttttcttccccttacctttcttcaccttggttatttggccaggaatacgtaaattcaaacttgtacatgctgatggtagcctttgtgaaattttcctaattgggccttttaaaaacatggctgggtggaacatttctgtaccctactggtttgaccagagccttagtaagtacgtgcctgaaactgaaaccatgtgcactttaatggaaggtaagctgaacttctttcttttcaaacctagatgtatcggcaagcagtgtaaacggaggacttggggaaaaaggaccacatagtccatcgaagaagagtccttggaacaagcaactggctattgaaaaggttattttgtaacatttgtctaactttttacttgtttaagctttgcctcagttggcaaacttcattttatgtgccattttgttgctgttattcaaatttcttgtaatttagtgaggtgaacgacttcagatttcattattggatttggatatttgaggtaaaatttcattttgttatatagtgctgactttttttgtttgaaattaaacagattggtaacctaatttgtggcctcctgacttttaaggaaaacgtgtgcagccattacacacagcctaaagctgtcaagagattgactcggcattgccttcattccttaaaattaaaaacctacaaaagttggtgtaaatttgtatatgttatttaccttcagatctaaatggtaatctgaacccaaatttgtataaagacttttcaggtgaaaagacttgattttttgaaaggattgtttatcaaacacaattctaatctcttctcttatgtatttttgtgcactaggcgcagttgtgtagcagttgagtaatgctggttagctgttaaggtggcgtgttgcagtgcagagtgcttggctgtttcctgttttctcccgattgctcctgtgtaaagatgccttgtcgtgcagaaacaaatggctgtccagtttattaaaatgcctgacaactgcacttccagtcacccgggccttgcatataaataacggagcatacagtgagcacatctagctgatgataaatacacctttttttccctcttccccctaaaaatggtaaatctgatcatatctacatgtatgaacttaacatggaaaatgttaaggaagcaaatggttgtaactttgtaagtacttataacatggtgtatctttttgcttatgaatattctgtattataaccattgtttctgtagtttaattaaaacattttcttggtgttagcttttctca

SEQ ID NO: 374816 - DNA, 3301 bp, Homo sapiens
aacgtagtcccgggtggcctggcacgcgcaagcgctcggcggggagtccccaccgccaggacgcagagccgacggagctctcgggctctggcgaaagggggttgggaagcggactccggcgaagagcagtcaggaacggctggacggggccgagagacgacgcagcggagtctgagggggccggggtcacagggagaggcaaatgagggcagaagcactcttcagacggagacggggctgacggctgagcaaaaaaggggcgtgaacttggagtattggcatgaaaaaaaggtgggggcccagatggggagcacctcctcttcctcctgcccaatcgcgatcgtccggcctcccaggcggaaaaagcgtttcgcgggctttccaactgcccgctaattccgctccccctccctccagccgtgactccgcgctttttggcccgcccgccgggctgtgcgcaggcgcttcgggtaggggcggggcgcgcggcagggtcgttacgaagcggggcgcggtgggccaatcagaaggtttcatttccgggtggcgcgggcgccattttgtgaggagcgatataaacgggcgcagaggccggctgcccgcccagttgttactcaggtgcgctagcctgcggagcccgtccgtgctgttctgcggcaaggcctttcccagtgtccccacgcggaaggcaactgcctgagaggcgcggcgtcgcaccgcccagagctgaggaagccggcgccagttcgcggggctccgggccgccactcagagctatgagctacggccgcccccctcccgatgtggagggtatgacctccctcaaggtggacaacctgacctaccgcacctcgcccgacacgctgaggcgcgtcttcgagaagtacgggcgcgtcggcgacgtgtacatcccgcgggatcgctacaccaaggagtcccgcggcttcgccttcgttcgctttcacgacaagcgcgacgctgaggacgctatggatgccatggacggggccgtgctggacggccgcgagctgcgggtgcaaatggcgcgctacggccgccccccggactcacaccacagccgccggggaccgccaccccgcaggtacgggggcggtggctacggacgccggagccgcagccctaggcggcgtcgccgcagccgatcccggagtcggagccgttccaggtctcgcagccgatctcgctacagccgctcgaagtctcggtcccgcactcgttctcgatctcggtcgacctccaagtccagatccgcacgaaggtccaagtccaagtcctcgtcggtctccagatctcgttcgcggtccaggtcccggtctcggtccaggagtcctcccccagtgtccaagagggaatccaaatccaggtcgcgatcgaagagtccccccaagtctcctgaagaggaaggagcggtgtcctcttaagaaaatggtaatgtctgggaatccgagacacataaccctaattcataaatgggatttggggtaggtctttttgagtcgtgttaatgtaagaatgactcctatcattaggagtgctgctcggaggttactcacctttgggagtaatactgaagagaggggtctgcagaaaggatgtgtatgaagcttagataataatggctgtttcgtaaactgtttgagacctattaatgaaaatgactatttcttgctgtttttatccaacgtctgcattttccccctttaaagctgcggtctcctgtttgataaaagaatattggccagtattgcagattttaactgatttggctgatcctccagggaccagtttctgtgggcgtgtattggagcaggtctttaactcttaaattgtttggtcctattttttaaaaaggaaagggccctaagtagctcagatattaaagtagtattctcaattaccaaatgtttcatttgaaacaatttatcttaatgaaatatagaccaattctctgatctcgagttgtttttgtttggatacagcccttttttttttctttttttttcttccccttacctttcttcaccttggttatttggccaggaatacgtaaattcaaacttgtacatgctgatggtagcctttgtgaaattttcctaattgggccttttaaaaacatggctgggtggaacatttctgtaccctactggtttgaccagagccttagtaagtacgtgcctgaaactgaaaccatgtgcactttaatggaaggtaagctgaacttctttcttttcaaacctagatgtatcggcaagcagtgtaaacggaggacttggggaaaaaggaccacatagtccatcgaagaagagtccttggaacaagcaactggctattgaaaaggttattttgtaacatttgtctaactttttacttgtttaagctttgcctcagttggcaaacttcattttatgtgccattttgttgctgttattcaaatttcttgtaatttagtgaggtgaacgacttcagatttcattattggatttggatatttgaggtaaaatttcattttgttatatagtgctgactttttttgtttgaaattaaacagattggtaacctaatttgtggcctcctgacttttaaggaaaacgtgtgcagccattacacacagcctaaagctgtcaagagattgactcggcattgccttcattccttaaaattaaaaacctacaaaagttggtgtaaatttgtatatgttatttaccttcagatctaaatggtaatctgaacccaaatttgtataaagacttttcaggtgaaaagacttgattttttgaaaggattgtttatcaaacacaattctaatctcttctcttatgtatttttgtgcactaggcgcagttgtgtagcagttgagtaatgctggttagctgttaaggtggcgtgttgcagtgcagagtgcttggctgtttcctgttttctcccgattgctcctgtgtaaagatgccttgtcgtgcagaaacaaatggctgtccagtttattaaaatgcctgacaactgcacttccagtcacccgggccttgcatataaataacggagcatacagtgagcacatctagctgatgataaatacacctttttttccctcttccccctaaaaatggtaaatctgatcatatctacatgtatgaacttaacatggaaaatgttaaggaagcaaatggttgtaactttgtaagtacttataacatggtgtatctttttgcttatgaatattctgtattataaccattgtttctgtagtttaattaaaacattttcttggtgttagcttttctca

SEQ ID NO: 374817 - DNA, 2872 bp, Homo sapiens
aacgtagtcccgggtggcctggcacgcgcaagcgctcggcggggagtccccaccgccaggacgcagagccgacggagctctcgggctctggcgaaagggggttgggaagcggactccggcgaagagcagtcaggaacggctggacggggccgagagacgacgcagcggagtctgagggggccggggtcacagggagaggcaaatgagggcagaagcactcttcagacggagacggggctgacggctgagcaaaaaaggggcgtgaacttggagtattggcatgaaaaaaaggtgggggcccagatggggagcacctcctcttcctcctgcccaatcgcgatcgtccggcctcccaggcggaaaaagcgtttcgcgggctttccaactgcccgctaattccgctccccctccctccagccgtgactccgcgctttttggcccgcccgccgggctgtgcgcaggcgcttcgggtaggggcggggcgcgcggcagggtcgttacgaagcggggcgcggtgggccaatcagaaggtttcatttccgggtggcgcgggcgccattttgtgaggagcgatataaacgggcgcagaggccggctgcccgcccagttgttactcaggtgcgctagcctgcggagcccgtccgtgctgttctgcggcaaggcctttcccagtgtccccacgcggaaggcaactgcctgagaggcgcggcgtcgcaccgcccagagctgaggaagccggcgccagttcgcggggctccgggccgccactcagagctatgagctacggccgcccccctcccgatgtggagggtatgacctccctcaaggtggacaacctgacctaccgcacctcgcccgacacgctgaggcgcgtcttcgagaagtacgggcgcgtcggcgacgtgtacatcccgcgggatcgctacaccaaggagtcccgcggcttcgccttcgttcgctttcacgacaagcgcgacgctgaggacgctatggatgccatggacggggccgtgctggacggccgcgagctgcgggtgcaaatggcgcgctacggccgccccccggactcacaccacagccgccggggaccgccaccccgcaggtacgggggcggtggctacggacgccggagccgcagccctaggcggcgtcgccgcagccgatcccggagtcggagccgttccaggtctcgcagccgatctcgctacagccgctcgaagtctcggtcccgcactcgttctcgatctcggtcgacctccaagtccagatccgcacgaaggtccaagtccaagtcctcgtcggtctccagatctcgttcgcggtccaggtcccggtctcggtccaggagtcctcccccagtgtccaagagggaatccaaatccaggtcgcgatcgaagagtccccccaagtctcctgaagaggaaggagcggtgtcctcttaagaaaatggtaatgtctgggaatccgagacacataaccctaattcataaatgggatttggggtaggtctttttgagtcgtgttaatgtaagaatgactcctatcattaggagtgctgctcggaggttactcacctttgggagtaatactgaagagaggggtctgcagaaaggatgtgtatgaagcttagataataatggctgtttcgtaaactgtttgagacctattaatgaaaatgactatttcttgctgtttttatccaacgtctgcattttccccctttaaagctgcggtctcctgtttgataaaagaatattggccagtattgcagattttaactgatttggctgatcctccagggaccagtttctgtgggcgtgtattggagcagatgtatcggcaagcagtgtaaacggaggacttggggaaaaaggaccacatagtccatcgaagaagagtccttggaacaagcaactggctattgaaaaggttattttgtaacatttgtctaactttttacttgtttaagctttgcctcagttggcaaacttcattttatgtgccattttgttgctgttattcaaatttcttgtaatttagtgaggtgaacgacttcagatttcattattggatttggatatttgaggtaaaatttcattttgttatatagtgctgactttttttgtttgaaattaaacagattggtaacctaatttgtggcctcctgacttttaaggaaaacgtgtgcagccattacacacagcctaaagctgtcaagagattgactcggcattgccttcattccttaaaattaaaaacctacaaaagttggtgtaaatttgtatatgttatttaccttcagatctaaatggtaatctgaacccaaatttgtataaagacttttcaggtgaaaagacttgattttttgaaaggattgtttatcaaacacaattctaatctcttctcttatgtatttttgtgcactaggcgcagttgtgtagcagttgagtaatgctggttagctgttaaggtggcgtgttgcagtgcagagtgcttggctgtttcctgttttctcccgattgctcctgtgtaaagatgccttgtcgtgcagaaacaaatggctgtccagtttattaaaatgcctgacaactgcacttccagtcacccgggccttgcatataaataacggagcatacagtgagcacatctagctgatgataaatacacctttttttccctcttccccctaaaaatggtaaatctgatcatatctacatgtatgaacttaacatggaaaatgttaaggaagcaaatggttgtaactttgtaagtacttataacatggtgtatctttttgcttatgaatattctgtattataaccattgtttctgtagtttaattaaaacattttcttggtgttagcttttctca

SEQ ID NO: 374818 - DNA, 3026 bp, Homo sapiens
aacgtagtcccgggtggcctggcacgcgcaagcgctcggcggggagtccccaccgccaggacgcagagccgacggagctctcgggctctggcgaaagggggttgggaagcggactccggcgaagagcagtcaggaacggctggacggggccgagagacgacgcagcggagtctgagggggccggggtcacagggagaggcaaatgagggcagaagcactcttcagacggagacggggctgacggctgagcaaaaaaggggcgtgaacttggagtattggcatgaaaaaaaggtgggggcccagatggggagcacctcctcttcctcctgcccaatcgcgatcgtccggcctcccaggcggaaaaagcgtttcgcgggctttccaactgcccgctaattccgctccccctccctccagccgtgactccgcgctttttggcccgcccgccgggctgtgcgcaggcgcttcgggtaggggcggggcgcgcggcagggtcgttacgaagcggggcgcggtgggccaatcagaaggtttcatttccgggtggcgcgggcgccattttgtgaggagcgatataaacgggcgcagaggccggctgcccgcccagttgttactcaggtgcgctagcctgcggagcccgtccgtgctgttctgcggcaaggcctttcccagtgtccccacgcggaaggcaactgcctgagaggcgcggcgtcgcaccgcccagagctgaggaagccggcgccagttcgcggggctccgggccgccactcagagctatgagctacggccgcccccctcccgatgtggagggtatgacctccctcaaggtggacaacctgacctaccgcacctcgcccgacacgctgaggcgcgtcttcgagaagtacgggcgcgtcggcgacgtgtacatcccgcgggatcgctacaccaaggagtcccgcggcttcgccttcgttcgctttcacgacaagcgcgacgctgaggacgctatggatgccatggacggggccgtgctggacggccgcgagctgcgggtgcaaatggcgcgctacggccgccccccggactcacaccacagccgccggggaccgccaccccgcaggtacgggggcggtggctacggacgccggagccgcagccctaggcggcgtcgccgcagccgatcccggagtcggagccgttccaggtctcgcagccgatctcgctacagccgctcgaagtctcggtcccgcactcgttctcgatctcggtcgacctccaagtccagatccgcacgaaggtccaagtccaagtcctcgtcggtctccagatctcgttcgcggtccaggtcccggtctcggtccaggagtcctcccccagtgtccaagagggaatccaaatccaggtcgcgatcgaagagtccccccaagtctcctgaagaggaaggagcggtgtcctcttaagaaaatggtaatgtctgggaatccgagacacataaccctaattcataaatgggatttggggtaggtctttttgagtcgtgttaatgtaagaatgactcctatcattaggagtgctgctcggaggttactcacctttgggagtaatactgaagagaggggtctgcagaaaggatgtgtatgaagcttagataataatggctgtttcgtaaactgtttgagacctattaatgaaaatgactatttcttgctgtttttatccaacgtctgcattttccccctttaaagctgcggtctcctgtttgataaaagaatattggccagtattgcagattttaactgatttggctgatcctccagggaccagtttctgtgggcgtgtattggagcaggtttgtctttaaatgttaaagatgcactatcctcttagagaaacaatcagttcaactattgttgtactgactgggacttcatattctaatggatgtggcaaaagaattgcaataagaagcagtgaacatttggaaccccaaaagaaagttacagatgtatcggcaagcagtgtaaacggaggacttggggaaaaaggaccacatagtccatcgaagaagagtccttggaacaagcaactggctattgaaaaggttattttgtaacatttgtctaactttttacttgtttaagctttgcctcagttggcaaacttcattttatgtgccattttgttgctgttattcaaatttcttgtaatttagtgaggtgaacgacttcagatttcattattggatttggatatttgaggtaaaatttcattttgttatatagtgctgactttttttgtttgaaattaaacagattggtaacctaatttgtggcctcctgacttttaaggaaaacgtgtgcagccattacacacagcctaaagctgtcaagagattgactcggcattgccttcattccttaaaattaaaaacctacaaaagttggtgtaaatttgtatatgttatttaccttcagatctaaatggtaatctgaacccaaatttgtataaagacttttcaggtgaaaagacttgattttttgaaaggattgtttatcaaacacaattctaatctcttctcttatgtatttttgtgcactaggcgcagttgtgtagcagttgagtaatgctggttagctgttaaggtggcgtgttgcagtgcagagtgcttggctgtttcctgttttctcccgattgctcctgtgtaaagatgccttgtcgtgcagaaacaaatggctgtccagtttattaaaatgcctgacaactgcacttccagtcacccgggccttgcatataaataacggagcatacagtgagcacatctagctgatgataaatacacctttttttccctcttccccctaaaaatggtaaatctgatcatatctacatgtatgaacttaacatggaaaatgttaaggaagcaaatggttgtaactttgtaagtacttataacatggtgtatctttttgcttatgaatattctgtattataaccattgtttctgtagtttaattaaaacattttcttggtgttagcttttctca

SEQ ID NO: 374819 - DNA, 1898 bp, Homo sapiens
  misc_feature (1)..(1): n is a, c, g, or t
naacttaggctaggtacgaggctgggtgttggtagcctgcggagcccgtccgtgctgttctgcggcaaggcctttcccagtgtccccacgcggaaggcaactgcctgagaggcgcggcgtcgcaccgcccagagctgaggaagccggcgccagttcgcggggctccgggccgccactcagagctatgagctacggccgcccccctcccgatgtggagggtatgacctccctcaaggtggacaacctgacctaccgcacctcgcccgacacgctgaggcgcgtcttcgagaagtacgggcgcgtcggcgacgtgtacatcccgcgggatcgctacaccaaggagtcccgcggcttcgccttcgttcgctttcacgacaagcgcgacgctgaggacgctatggatgccatggacggggccgtgctggacggccgcgagctgcgggtgcaaatggcgcgctacggccgccccccggactcacaccacagccgccggggaccgccaccccgcaggtacgggggcggtggctacggacgccggagccgcagccctaggcggcgtcgccgcagccgatcccggagtcggagccgttccaggtctcgcagccgatctcgctacagccgctcgaagtctcggtcccgcactcgttctcgatctcggtcgacctccaagtccagatccgcacgaaggtccaagtccaagtcctcgtcggtctccagatctcgttcgcggtccaggtcccggtctcggtccaggagtcctcccccagtgtccaagagggaatccaaatccaggtcgcgatcgaagagtccccccaagtctcctgaagaggaaggagcggtgtcctcttaagaaaatgatgtatcggcaagcagtgtaaacggaggacttggggaaaaaggaccacatagtccatcgaagaagagtccttggaacaagcaactggctattgaaaaggttattttgtaacatttgtctaactttttacttgtttaagctttgcctcagttggcaaacttcattttatgtgccattttgttgctgttattcaaatttcttgtaatttagtgaggtgaacgacttcagatttcattattggatttggatatttgaggtaaaatttcattttgttatatagtgctgactttttttgtttgaaattaaacagattggtaacctaatttgtggcctcctgacttttaaggaaaacgtgtgcagccattacacacagcctaaagctgtcaagagattgactcggcattgccttcattccttaaaattaaaaacctacaaaagttggtgtaaatttgtatatgttatttaccttcagatctaaatggtaatctgaacccaaatttgtataaagacttttcaggtgaaaagacttgattttttgaaaggattgtttatcaaacacaattctaatctcttctcttatgtatttttgtgcactaggcgcagttgtgtagcagttgagtaatgctggttagctgttaaggtggcgtgttgcagtgcagagtgcttggctgtttcctgttttctcccgattgctcctgtgtaaagatgccttgtcgtgcagaaacaaatggctgtccagtttattaaaatgcctgacaactgcacttccagtcacccgggccttgcatataaataacggagcatacagtgagcacatctagctgatgataaatacacctttttttccctcttccccctaaaaatggtaaatctgatcatatctacatgtatgaacttaacatggaaaatgttaaggaagcaaatggttgtaactttgtaagtacttataacatggtgtatctttttgcttatgaatattctgtattataaccattgtttctgtagtttaattaaaacattttcttggtgttagcttttctca

SEQ ID NO: 374820 - DNA, 2435 bp, Homo sapiens
aacgtagtcccgggtggcctggcacgcgcaagcgctcggcggggagtccccaccgccaggacgcagagccgacggagctctcgggctctggcgaaagggggttgggaagcggactccggcgaagagcagtcaggaacggctggacggggccgagagacgacgcagcggagtctgagggggccggggtcacagggagaggcaaatgagggcagaagcactcttcagacggagacggggctgacggctgagcaaaaaaggggcgtgaacttggagtattggcatgaaaaaaaggtgggggcccagatggggagcacctcctcttcctcctgcccaatcgcgatcgtccggcctcccaggcggaaaaagcgtttcgcgggctttccaactgcccgctaattccgctccccctccctccagccgtgactccgcgctttttggcccgcccgccgggctgtgcgcaggcgcttcgggtaggggcggggcgcgcggcagggtcgttacgaagcggggcgcggtgggccaatcagaaggtttcatttccgggtggcgcgggcgccattttgtgaggagcgatataaacgggcgcagaggccggctgcccgcccagttgttactcaggtgcgctagcctgcggagcccgtccgtgctgttctgcggcaaggcctttcccagtgtccccacgcggaaggcaactgcctgagaggcgcggcgtcgcaccgcccagagctgaggaagccggcgccagttcgcggggctccgggccgccactcagagctatgagctacggccgcccccctcccgatgtggagggtatgacctccctcaaggtggacaacctgacctaccgcacctcgcccgacacgctgaggcgcgtcttcgagaagtacgggcgcgtcggcgacgtgtacatcccgcgggatcgctacaccaaggagtcccgcggcttcgccttcgttcgctttcacgacaagcgcgacgctgaggacgctatggatgccatggacggggccgtgctggacggccgcgagctgcgggtgcaaatggcgcgctacggccgccccccggactcacaccacagccgccggggaccgccaccccgcaggtacgggggcggtggctacggacgccggagccgcagccctaggcggcgtcgccgcagccgatcccggagtcggagccgttccaggtctcgcagccgatctcgctacagccgctcgaagtctcggtcccgcactcgttctcgatctcggtcgacctccaagtccagatccgcacgaaggtccaagtccaagtcctcgtcggtctccagatctcgttcgcggtccaggtcccggtctcggtccaggagtcctcccccagtgtccaagagggaatccaaatccaggtcgcgatcgaagagtccccccaagtctcctgaagaggaaggagcggtgtcctcttaagaaaatgatgtatcggcaagcagtgtaaacggaggacttggggaaaaaggaccacatagtccatcgaagaagagtccttggaacaagcaactggctattgaaaaggttattttgtaacatttgtctaactttttacttgtttaagctttgcctcagttggcaaacttcattttatgtgccattttgttgctgttattcaaatttcttgtaatttagtgaggtgaacgacttcagatttcattattggatttggatatttgaggtaaaatttcattttgttatatagtgctgactttttttgtttgaaattaaacagattggtaacctaatttgtggcctcctgacttttaaggttgccttcattccttaaaattaaaaacctacaaaagttggtgtaaatttgtatatgttatttaccttcagatctaaatggtaatctgaacccaaatttgtataaagacttttcaggtgaaaagacttgattttttgaaaggattgtttatcaaacacaattctaatctcttctcttatgtatttttgtgcactaggcgcagttgtgtagcagttgagtaatgctggttagctgttaaggtggcgtgttgcagtgcagagtgcttggctgtttcctgttttctcccgattgctcctgtgtaaagatgccttgtcgtgcagaaacaaatggctgtccagtttattaaaatgcctgacaactgcacttccagtcacccgggccttgcatataaataacggagcatacagtgagcacatctagctgatgataaatacacctttttttccctcttccccctaaaaatggtaaatctgatcatatctacatgtatgaacttaacatggaaaatgttaaggaagcaaatggttgtaactttgtaagtacttataacatggtgtatctttttgcttatgaatattctgtattataaccattgtttctgtagtttaattaaaacattttcttggtgttagcttttctca

SEQ ID NO: 374821 - DNA, 2514 bp, Homo sapiens
aacgtagtcccgggtggcctggcacgcgcaagcgctcggcggggagtccccaccgccaggacgcagagccgacggagctctcgggctctggcgaaagggggttgggaagcggactccggcgaagagcagtcaggaacggctggacggggccgagagacgacgcagcggagtctgagggggccggggtcacagggagaggcaaatgagggcagaagcactcttcagacggagacggggctgacggctgagcaaaaaaggggcgtgaacttggagtattggcatgaaaaaaaggtgggggcccagatggggagcacctcctcttcctcctgcccaatcgcgatcgtccggcctcccaggcggaaaaagcgtttcgcgggctttccaactgcccgctaattccgctccccctccctccagccgtgactccgcgctttttggcccgcccgccgggctgtgcgcaggcgcttcgggtaggggcggggcgcgcggcagggtcgttacgaagcggggcgcggtgggccaatcagaaggtttcatttccgggtggcgcgggcgccattttgtgaggagcgatataaacgggcgcagaggccggctgcccgcccagttgttactcaggtgcgctagcctgcggagcccgtccgtgctgttctgcggcaaggcctttcccagtgtccccacgcggaaggcaactgcctgagaggcgcggcgtcgcaccgcccagagctgaggaagccggcgccagttcgcggggctccgggccgccactcagagctatgagctacggccgcccccctcccgatgtggagggtatgacctccctcaaggtggacaacctgacctaccgcacctcgcccgacacgctgaggcgcgtcttcgagaagtacgggcgcgtcggcgacgtgtacatcccgcgggatcgctacaccaaggagtcccgcggcttcgccttcgttcgctttcacgacaagcgcgacgctgaggacgctatggatgccatggacggggccgtgctggacggccgcgagctgcgggtgcaaatggcgcgctacggccgccccccggactcacaccacagccgccggggaccgccaccccgcaggtacgggggcggtggctacggacgccggagccgcagccctaggcggcgtcgccgcagccgatcccggagtcggagccgttccaggtctcgcagccgatctcgctacagccgctcgaagtctcggtcccgcactcgttctcgatctcggtcgacctccaagtccagatccgcacgaaggtccaagtccaagtcctcgtcggtctccagatctcgttcgcggtccaggtcccggtctcggtccaggagtcctcccccagtgtccaagagggaatccaaatccaggtcgcgatcgaagagtccccccaagtctcctgaagaggaaggagcggtgtcctcttaagaaaatgatgtatcggcaagcagtgtaaacggaggacttggggaaaaaggaccacatagtccatcgaagaagagtccttggaacaagcaactggctattgaaaaggttattttgtaacatttgtctaactttttacttgtttaagctttgcctcagttggcaaacttcattttatgtgccattttgttgctgttattcaaatttcttgtaatttagtgaggtgaacgacttcagatttcattattggatttggatatttgaggtaaaatttcattttgttatatagtgctgactttttttgtttgaaattaaacagattggtaacctaatttgtggcctcctgacttttaaggaaaacgtgtgcagccattacacacagcctaaagctgtcaagagattgactcggcattgccttcattccttaaaattaaaaacctacaaaagttggtgtaaatttgtatatgttatttaccttcagatctaaatggtaatctgaacccaaatttgtataaagacttttcaggtgaaaagacttgattttttgaaaggattgtttatcaaacacaattctaatctcttctcttatgtatttttgtgcactaggcgcagttgtgtagcagttgagtaatgctggttagctgttaaggtggcgtgttgcagtgcagagtgcttggctgtttcctgttttctcccgattgctcctgtgtaaagatgccttgtcgtgcagaaacaaatggctgtccagtttattaaaatgcctgacaactgcacttccagtcacccgggccttgcatataaataacggagcatacagtgagcacatctagctgatgataaatacacctttttttccctcttccccctaaaaatggtaaatctgatcatatctacatgtatgaacttaacatggaaaatgttaaggaagcaaatggttgtaactttgtaagtacttacaaagttacaaccatttgcttccttaacatggtgtatctttttgcttatgaatattctgtattataaccattgtttctgtagtttaattaaaacattttcttggtgttagcttttctca

SEQ ID NO: 374822 - DNA, 1992 bp, Homo sapiens
aacgtagtcccgggtggcctggcacgcgcaagcgctcggcggggagtccccaccgccaggacgcagagccgacggagctctcgggctctggcgaaagggggttgggaagcggactccggcgaagagcagtcaggaacggctggacggggccgagagacgacgcagcggagtctgagggggccggggtcacagggagaggcaaatgagggcagaagcactcttcagacggagacggggctgacggctgagcaaaaaaggggcgtgaacttggagtattggcatgaaaaaaaggtgggggcccagatggggagcacctcctcttcctcctgcccaatcgcgatcgtccggcctcccaggcggaaaaagcgtttcgcgggctttccaactgcccgctaattccgctccccctccctccagccgtgactccgcgctttttggcccgcccgccgggctgtgcgcaggcgcttcgggtaggggcggggcgcgcggcagggtcgttacgaagcggggcgcggtgggccaatcagaaggtttcatttccgggtggcgcgggcgccattttgtgaggagcgatataaacgggcgcagaggccggctgcccgcccagttgttactcaggtgcgctagcctgcggagcccgtccgtgctgttctgcggcaaggcctttcccagtgtccccacgcggaaggcaactgcctgagaggcgcggcgtcgcaccgcccagagctgaggaagccggcgccagttcgcggggctccgggccgccactcagagctatgagctacggccgcccccctcccgatgtggagggtatgacctccctcaaggtggacaacctgacctaccgcacctcgcccgacacgctgaggcgcgtcttcgagaagtacgggcgcgtcggcgacgtgtacatcccgcgggatcgctacaccaaggagtcccgcggcttcgccttcgttcgctttcacgacaagcgcgacgctgaggacgctatggatgccatggacggggccgtgctggacggccgcgagctgcgggtgcaaatggcgcgctacggccgccccccggactcacaccacagccgccggggaccgccaccccgcaggtacgggggcggtggctacggacgccggagccgcagccctaggcggcgtcgccgcagccgatcccggagtcggagccgttccaggtctcgcagccgatctcgctacagccgctcgaagtctcggtcccgcactcgttctcgatctcggtcgacctccaagtccagatccgcacgaaggtccaagtccaagtcctcgtcggtctccagatctcgttcgcggtccaggtcccggtctcggtccaggagtcctcccccagtgtccaagagggaatccaaatccaggtcgcgatcgaagagtccccccaagtctcctgaagaggaaggagcggtgtcctcttaagaaaatgatgtatcggcaagcagtgtaaacggaggacttggggaaaaaggaccacatagtccatcgaagaagagtccttggaacaagcaactggctattgaaaaggcgcagttgtgtagcagttgagtaatgctggttagctgttaaggtggcgtgttgcagtgcagagtgcttggctgtttcctgttttctcccgattgctcctgtgtaaagatgccttgtcgtgcagaaacaaatggctgtccagtttattaaaatgcctgacaactgcacttccagtcacccgggccttgcatataaataacggagcatacagtgagcacatctagctgatgataaatacacctttttttccctcttccccctaaaaatggtaaatctgatcatatctacatgtatgaacttaacatggaaaatgttaaggaagcaaatggttgtaactttgtaagtacttataacatggtgtatctttttgcttatgaatattctgtattataaccattgtttctgtagtttaattaaaacattttcttggtgttagcttttctca

SEQ ID NO: 374823 - DNA, 2374 bp, Homo sapiens
aacgtagtcccgggtggcctggcacgcgcaagcgctcggcggggagtccccaccgccaggacgcagagccgacggagctctcgggctctggcgaaagggggttgggaagcggactccggcgaagagcagtcaggaacggctggacggggccgagagacgacgcagcggagtctgagggggccggggtcacagggagaggcaaatgagggcagaagcactcttcagacggagacggggctgacggctgagcaaaaaaggggcgtgaacttggagtattggcatgaaaaaaaggtgggggcccagatggggagcacctcctcttcctcctgcccaatcgcgatcgtccggcctcccaggcggaaaaagcgtttcgcgggctttccaactgcccgctaattccgctccccctccctccagccgtgactccgcgctttttggcccgcccgccgggctgtgcgcaggcgcttcgggtaggggcggggcgcgcggcagggtcgttacgaagcggggcgcggtgggccaatcagaaggtttcatttccgggtggcgcgggcgccattttgtgaggagcgatataaacgggcgcagaggccggctgcccgcccagttgttactcaggtgcgctagcctgcggagcccgtccgtgctgttctgcggcaaggcctttcccagtgtccccacgcggaaggcaactgcctgagaggcgcggcgtcgcaccgcccagagctgaggaagccggcgccagttcgcggggctccgggccgccactcagagctatgagctacggccgcccccctcccgatgtggagggtatgacctccctcaaggtggacaacctgacctaccgcacctcgcccgacacgctgaggcgcgtcttcgagaagtacgggcgcgtcggcgacgtgtacatcccgcgggatcgctacaccaaggagtcccgcggcttcgccttcgttcgctttcacgacaagcgcgacgctgaggacgctatggatgccatggacggggccgtgctggacggccgcgagctgcgggtgcaaatggcgcgctacggccgccccccggactcacaccacagccgccggggaccgccaccccgcaggtacgggggcggtggctacggacgccggagccgcagccctaggcggcgtcgccgcagccgatcccggagtcggagccgttccaggtctcgcagccgatctcgctacagccgctcgaagtctcggtcccgcactcgttctcgatctcggtcgacctccaagtccagatccgcacgaaggtccaagtccaagtcctcgtcggtctccagatctcgttcgcggtccaggtcccggtctcggtccaggagtcctcccccagtgtccaagagggaatccaaatccaggtcgcgatcgaagagtccccccaagtctcctgaagaggaaggagcggtgtcctcttaagaaaatggtaatgtctgggaatccgagacacataaccctaattcataaatgggatttggggtaggtctttttgagtcgtgttaatgtaagaatgactcctatcattaggagtgctgctcggaggttactcacctttgggagtaatactgaagagaggggtctgcagaaaggatgtgtatgaagcttagataataatggctgtttcgtaaactgtttgagacctattaatgaaaatgactatttcttgctgtttttatccaacgtctgcattttccccctttaaagctgcggtctcctgtttgataaaagaatattggccagtattgcagattttaactgatttggctgatcctccagggaccagtttctgtgggcgtgtattggagcagatgtatcggcaagcagtgtaaacggaggacttggggaaaaaggaccacatagtccatcgaagaagagtccttggaacaagcaactggctattgaaaaggcgcagttgtgtagcagttgagtaatgctggttagctgttaaggtggcgtgttgcagtgcagagtgcttggctgtttcctgttttctcccgattgctcctgtgtaaagatgccttgtcgtgcagaaacaaatggctgtccagtttattaaaatgcctgacaactgcacttccagtcacccgggccttgcatataaataacggagcatacagtgagcacatctagctgatgataaatacacctttttttccctcttccccctaaaaatggtaaatctgatcatatctacatgtatgaacttaacatggaaaatgttaaggaagcaaatggttgtaactttgtaagtacttataacatggtgtatctttttgcttatgaatattctgtattataaccattgtttctgtagtttaattaaaacattttcttggtgttagcttttctca

SEQ ID NO: 374824 - DNA, 2097 bp, Homo sapiens
aacgtagtcccgggtggcctggcacgcgcaagcgctcggcggggagtccccaccgccaggacgcagagccgacggagctctcgggctctggcgaaagggggttgggaagcggactccggcgaagagcagtcaggaacggctggacggggccgagagacgacgcagcggagtctgagggggccggggtcacagggagaggcaaatgagggcagaagcactcttcagacggagacggggctgacggctgagcaaaaaaggggcgtgaacttggagtattggcatgaaaaaaaggtgggggcccagatggggagcacctcctcttcctcctgcccaatcgcgatcgtccggcctcccaggcggaaaaagcgtttcgcgggctttccaactgcccgctaattccgctccccctccctccagccgtgactccgcgctttttggcccgcccgccgggctgtgcgcaggcgcttcgggtaggggcggggcgcgcggcagggtcgttacgaagcggggcgcggtgggccaatcagaaggtttcatttccgggtggcgcgggcgccattttgtgaggagcgatataaacgggcgcagaggccggctgcccgcccagttgttactcaggtgcgctagcctgcggagcccgtccgtgctgttctgcggcaaggcctttcccagtgtccccacgcggaaggcaactgcctgagaggcgcggcgtcgcaccgcccagagctgaggaagccggcgccagttcgcggggctccgggccgccactcagagctatgagctacggccgcccccctcccgatgtggagggtatgacctccctcaaggtggacaacctgacctaccgcacctcgcccgacacgctgaggcgcgtcttcgagaagtacgggcgcgtcggcgacgtgtacatcccgcgggatcgctacaccaaggagtcccgcggcttcgccttcgttcgctttcacgacaagcgcgacgctgaggacgctatggatgccatggacggggccgtgctggacggccgcgagctgcgggtgcaaatggcgcgctacggccgccccccggactcacaccacagccgccggggaccgccaccccgcaggtacgggggcggtggctacggacgccggagccgcagccctaggcggcgtcgccgcagccgatcccggagtcggagccgttccaggtctcgcagccgatctcgctacagccgctcgaagtctcggtcccgcactcgttctcgatctcggtcgacctccaagtccagatccgcacgaaggtccaagtccaagtcctcgtcggtctccagatctcgttcgcggtccaggtcccggtctcggtccaggagtcctcccccagtgtccaagagggaatccaaatccaggtcgcgatcgaagagtccccccaagtctcctgaagaggaaggagcggtgtcctcttaagaaaatggctgcggtctcctgtttgataaaagaatattggccagtattgcagattttaactgatttggctgatcctccagggaccagtttctgtgggcgtgtattggagcagatgtatcggcaagcagtgtaaacggaggacttggggaaaaaggaccacatagtccatcgaagaagagtccttggaacaagcaactggctattgaaaaggcgcagttgtgtagcagttgagtaatgctggttagctgttaaggtggcgtgttgcagtgcagagtgcttggctgtttcctgttttctcccgattgctcctgtgtaaagatgccttgtcgtgcagaaacaaatggctgtccagtttattaaaatgcctgacaactgcacttccagtcacccgggccttgcatataaataacggagcatacagtgagcacatctagctgatgataaatacacctttttttccctcttccccctaaaaatggtaaatctgatcatatctacatgtatgaacttaacatggaaaatgttaaggaagcaaatggttgtaactttgtaagtacttataacatggtgtatctttttgcttatgaatattctgtattataaccattgtttctgtagtttaattaaaacattttcttggtgttagcttttctca

SEQ ID NO: 374825 - DNA, 2450 bp, Homo sapiens
aacgtagtcccgggtggcctggcacgcgcaagcgctcggcggggagtccccaccgccaggacgcagagccgacggagctctcgggctctggcgaaagggggttgggaagcggactccggcgaagagcagtcaggaacggctggacggggccgagagacgacgcagcggagtctgagggggccggggtcacagggagaggcaaatgagggcagaagcactcttcagacggagacggggctgacggctgagcaaaaaaggggcgtgaacttggagtattggcatgaaaaaaaggtgggggcccagatggggagcacctcctcttcctcctgcccaatcgcgatcgtccggcctcccaggcggaaaaagcgtttcgcgggctttccaactgcccgctaattccgctccccctccctccagccgtgactccgcgctttttggcccgcccgccgggctgtgcgcaggcgcttcgggtaggggcggggcgcgcggcagggtcgttacgaagcggggcgcggtgggccaatcagaaggtttcatttccgggtggcgcgggcgccattttgtgaggagcgatataaacgggcgcagaggccggctgcccgcccagttgttactcaggtgcgctagcctgcggagcccgtccgtgctgttctgcggcaaggcctttcccagtgtccccacgcggaaggcaactgcctgagaggcgcggcgtcgcaccgcccagagctgaggaagccggcgccagttcgcggggctccgggccgccactcagagctatgagctacggccgcccccctcccgatgtggagggtatgacctccctcaaggtggacaacctgacctaccgcacctcgcccgacacgtgtacatcccgcgggatcgctacaccaaggagtcccgcggcttcgccttcgttcgctttcacgacaagcgcgacgctgaggacgctatggatgccatggacggggccgtgctggacggccgcgagctgcgggtgcaaatggcgcgctacggccgccccccggactcacaccacagccgccggggaccgccaccccgcaggtacgggggcggtggctacggacgccggagccgcagccctaggcggcgtcgccgcagccgatcccggagtcggagccgttccaggtctcgcagccgatctcgctacagccgctcgaagtctcggtcccgcactcgttctcgatctcggtcgacctccaagtccagatccgcacgaaggtccaagtccaagtcctcgtcggtctccagatctcgttcgcggtccaggtcccggtctcggtccaggagtcctcccccagtgtccaagagggaatccaaatccaggtcgcgatcgaagagtccccccaagtctcctgaagaggaaggagcggtgtcctcttaagaaaatgatgtatcggcaagcagtgtaaacggaggacttggggaaaaaggaccacatagtccatcgaagaagagtccttggaacaagcaactggctattgaaaaggttattttgtaacatttgtctaactttttacttgtttaagctttgcctcagttggcaaacttcattttatgtgccattttgttgctgttattcaaatttcttgtaatttagtgaggtgaacgacttcagatttcattattggatttggatatttgaggtaaaatttcattttgttatatagtgctgactttttttgtttgaaattaaacagattggtaacctaatttgtggcctcctgacttttaaggaaaacgtgtgcagccattacacacagcctaaagctgtcaagagattgactcggcattgccttcattccttaaaattaaaaacctacaaaagttggtgtaaatttgtatatgttatttaccttcagatctaaatggtaatctgaacccaaatttgtataaagacttttcaggtgaaaagacttgattttttgaaaggattgtttatcaaacacaattctaatctcttctcttatgtatttttgtgcactaggcgcagttgtgtagcagttgagtaatgctggttagctgttaaggtggcgtgttgcagtgcagagtgcttggctgtttcctgttttctcccgattgctcctgtgtaaagatgccttgtcgtgcagaaacaaatggctgtccagtttattaaaatgcctgacaactgcacttccagtcacccgggccttgcatataaataacggagcatacagtgagcacatctagctgatgataaatacacctttttttccctcttccccctaaaaatggtaaatctgatcatatctacatgtatgaacttaacatggaaaatgttaaggaagcaaatggttgtaactttgtaagtacttataacatggtgtatctttttgcttatgaatattctgtattataaccattgtttctgtagtttaattaaaacattttcttggtgttagcttttctca

SEQ ID NO: 374826 - DNA, 1537 bp, Homo sapiens
  misc_feature (25)..(25): n is a, c, g, or t
taaggtctaggtacgaggctgggtngtgaggacgctatggatgccatggacggggccgtgctggacggccgcgagctgcgggtgcaaatggcgcgctacggccgccccccggactcacaccacagccgccggggaccgccaccccgcaggtacgggggcggtggctacggacgccggagccgcagccctaggcggcgtcgccgcagccgatcccggagtcggagccgttccaggtctcgcagccgatctcgctacagccgctcgaagtctcggtcccgcactcgttctcgatctcggtcgacctccaagtccagatccgcacgaaggtccaagtccaagtcctcgtcggtctccagatctcgttcgcggtccaggtcccggtctcggtccaggagtcctcccccagtgtccaagagggaatccaaatccaggtcgcgatcgaagagtccccccaagtctcctgaagaggaaggagcggtgtcctcttaagaaaatgatgtatcggcaagcagtgtaaacggaggacttggggaaaaaggaccacatagtccatcgaagaagagtccttggaacaagcaactggctattgaaaaggttattttgtaacatttgtctaactttttacttgtttaagctttgcctcagttggcaaacttcattttatgtgccattttgttgctgttattcaaatttcttgtaatttagtgaggtgaacgacttcagatttcattattggatttggatatttgaggtaaaatttcattttgttatatagtgctgactttttttgtttgaaattaaacagattggtaacctaatttgtggcctcctgacttttaaggaaaacgtgtgcagccattacacacagcctaaagctgtcaagagattgactcggcattgccttcattccttaaaattaaaaacctacaaaagttggtgtaaatttgtatatgttatttaccttcagatctaaatggtaatctgaacccaaatttgtataaagacttttcaggtgaaaagacttgattttttgaaaggattgtttatcaaacacaattctaatctcttctcttatgtatttttgtgcactaggcgcagttgtgtagcagttgagtaatgctggttagctgttaaggtggcgtgttgcagtgcagagtgcttggctgtttcctgttttctcccgattgctcctgtgtaaagatgccttgtcgtgcagaaacaaatggctgtccagtttattaaaatgcctgacaactgcacttccagtcacccgggccttgcatataaataacggagcatacagtgagcacatctagctgatgataaatacacctttttttccctcttccccctaaaaatggtaaatctgatcatatctacatgtatgaacttaacatggaaaatgttaaggaagcaaatggttgtaactttgtaagtacttataacatggtgtatctttttgcttatgaatattctgtattataaccattgtttctgtagtttaattaaaacattttcttggtgttagcttttctca

SEQ ID NO: 374827 - DNA, 1814 bp, Homo sapiens
  misc_feature (1807)..(1807): n is a, c, g, or t
  misc_feature (1812)..(1813): n is a, c, g, or t
aacgtagtcccgggtggcctggcacgcgcaagcgctcggcggggagtccccaccgccaggacgcagagccgacggagctctcgggctctggcgaaagggggttgggaagcggactccggcgaagagcagtcaggaacggctggacggggccgagagacgacgcagcggagtctgagggggccggggtcacagggagaggcaaatgagggcagaagcactcttcagacggagacggggctgacggctgagcaaaaaaggggcgtgaacttggagtattggcatgaaaaaaaggtgggggcccagatggggagcacctcctcttcctcctgcccaatcgcgatcgtccggcctcccaggcggaaaaagcgtttcgcgggctttccaactgcccgctaattccgctccccctccctccagccgtgactccgcgctttttggcccgcccgccgggctgtgcgcaggcgcttcgggtaggggcggggcgcgcggcagggtcgttacgaagcggggcgcggtgggccaatcagaaggtttcatttccgggtggcgcgggcgccattttgtgaggagcgatataaacgggcgcagaggccggctgcccgcccagttgttactcaggtgcgctagcctgcggagcccgtccgtgctgttctgcggcaaggcctttcccagtgtccccacgcggaaggcaactgcctgagaggcgcggcgtcgcaccgcccagagctgaggaagccggcgccagttcgcggggctccgggccgccactcagagctatgagctacggccgcccccctcccgatgtggagggtatgacctccctcaaggtggacaacctgacctaccgcacctcgcccgacacgctgaggcgcgtcttcgagaagtacgggcgcgtcggcgacgtgtacatcccgcgggatcgctacaccaaggagtcccgcggcttcgccttcgttcgctttcacgacaagcgcgacgctgaggacgctatggatgccatggacggggccgtgctggacggccgcgagctgcgggtgcaaatggcgcgctacggccgccccccggactcacaccacagccgccggggaccgccaccccgcaggtacgggggcggtggctacggacgccggagccgcagccctaggcggcgtcgccgcagccgatcccggagtcggagccgttccaggtctcgcagccgatctcgctacagccgctcgaagtctcggtcccgcactcgttctcgatctcggtcgacctccaagtccagatccgcacgaaggtccaagtccaagtcctcgtcggtctccagatctcgttcgcggtccaggtcccggtctcggtccaggagtcctcccccagtgtccaagagggaatccaaatccaggtcgcgatcgaagagtccccccaagtctcctgaagaggaaggagcggtgtcctcttaagaaaatgatgtatcggcaagcagtgtaaacggaggacttggggaaaaaggaccacatagtccatcgaagaagagtccttggaacaagcaactggctattgaaaaggttattttgtaacatttgtctaactttttacttgtttaagctttgcctcagttggcaaacttcattttatgtgccattttgttgctgttattcaaatttcttgtaatttagtgaggtgaacgacttcagatttcattattggatttggatatttgaggtaaaatttcattttgttatatagtgctgactaaatgtcccccaattggaactggatgtgggtaaaaatataaaaatattaaaagaaaaaaccgtatgcgggnccgcnna

SEQ ID NO: 374828 - DNA, 2503 bp, Homo sapiens
  misc_feature (2503)..(2503): n is a, c, g, or t
aacgtagtcccgggtggcctggcacgcgcaagcgctcggcggggagtccccaccgccaggacgcagagccgacggagctctcgggctctggcgaaagggggttgggaagcggactccggcgaagagcagtcaggaacggctggacggggccgagagacgacgcagcggagtctgagggggccggggtcacagggagaggcaaatgagggcagaagcactcttcagacggagacggggctgacggctgagcaaaaaaggggcgtgaacttggagtattggcatgaaaaaaaggtgggggcccagatggggagcacctcctcttcctcctgcccaatcgcgatcgtccggcctcccaggcggaaaaagcgtttcgcgggctttccaactgcccgctaattccgctccccctccctccagccgtgactccgcgctttttggcccgcccgccgggctgtgcgcaggcgcttcgggtaggggcggggcgcgcggcagggtcgttacgaagcggggcgcggtgggccaatcagaaggtttcatttccgggtggcgcgggcgccattttgtgaggagcgatataaacgggcgcagaggccggctgcccgcccagttgttactcaggtgcgctagcctgcggagcccgtccgtgctgttctgcggcaaggcctttcccagtgtccccacgcggaaggcaactgcctgagaggcgcggcgtcgcaccgcccagagctgaggaagccggcgccagttcgcggggctccgggccgccactcagagctatgagctacggccgcccccctcccgatgtggagggtatgacctccctcaaggtggacaacctgacctaccgcacctcgcccgacacgctgaggcgcgtcttcgagaagtacgggcgcgtcggcgacgtgtacatcccgcgggatcgctacaccaaggagtcccgcggcttcgccttcgttcgctttcacgacaagcgcgacgctgaggacgctatggatgccatggacggggccgtgctggacggccgcgagctgcgggtgcaaatggcgcgctacggccgccccccggactcacaccacagccgccggggaccgccaccccgcaggtacgggggcggtggctacggacgccggagccgcagccctaggcggcgtcgccgcagccgatcccggagtcggagccgttccaggtctcgcagccgatctcgctacagccgctcgaagtctcggtcccgcactcgttctcgatctcggtcgacctccaagtccagatccgcacgaaggtccaagtccaagtcctcgtcggtctccagatctcgttcgcggtccaggtcccggtctcggtccaggagtcctcccccagtgtccaagagggaatccaaatccaggtcgcgatcgaagagtccccccaagtctcctgaagaggaaggagcggtgtcctcttaagaaaatgatgtatcggcaagcagtgtaaacggaggacttggggaaaaaggaccacatagtccatcgaagaagagtccttggaacaagcaactggctattgaaaaggcgcagttgtgtagcagttgagtaatgctggttagctgttaaggtggcgtgttgcagtgcagagtgcttggctgtttcctgttttctcccgattgctcctgtgtaaagatgccttgtcgtgcagaaacaaatggctgtccagtttattaaaatgcctgacaactgcacttccagtcacccgggccttgcatataaataacggagcatacagtgagcacatctagctgatgataaatacacctttttttccctcttccccctaaaaatggtaaatctgatcatatctacatgtatgaacttaacatggaaaatgttaaggaagcaaatggttgtaactttgtaagtacttataacatggtgtatctttttgcttatgaatattctgtattataaccattgtttctgtagtttaattaaaacattttcttggtgttagcttttctcaaaaaaaaaaaaaaaacaaaaaaaaataaaaaaacaagaaaaacacataaaaaaaaaaaacaataaaaaaaaaaaagaaaaaaaaaaaaaaagaagaaaaaaaaaaaagaaaggggggggggggggataaaatatttccaggggggggcaaataggggccccccccatttggttggaaagaggggctcccactgggggggtatttaataagagagcgggggggggtaaaaacacggtcgtaagacaaatactaagtgtgtatagtagggaacaccctcgtggcggggggcgaatagggcaccacacagcaatacggagcggcggaataaaaatgtagtggtggtgcacaccgcctttctgccgtgttctttttttttttcataaatcctcctcattgtaaacaagagagaagcacaggaggaggggcacgcacgtcagagctgcgtagagaagataaataaagtagagacaacgcggaaagaaactaccgacgaactgctctggtacactcn

SEQ ID NO: 374829 - DNA, 2765 bp, Homo sapiens
aacgtagtcccgggtggcctggcacgcgcaagcgctcggcggggagtccccaccgccaggacgcagagccgacggagctctcgggctctggcgaaagggggttgggaagcggactccggcgaagagcagtcaggaacggctggacggggccgagagacgacgcagcggagtctgagggggccggggtcacagggagaggcaaatgagggcagaagcactcttcagacggagacggggctgacggctgagcaaaaaaggggcgtgaacttggagtattggcatgaaaaaaaggtgggggcccagatggggagcacctcctcttcctcctgcccaatcgcgatcgtccggcctcccaggcggaaaaagcgtttcgcgggctttccaactgcccgctaattccgctccccctccctccagccgtgactccgcgctttttggcccgcccgccgggctgtgcgcaggcgcttcgggtaggggcggggcgcgcggcagggtcgttacgaagcggggcgcggtgggccaatcagaaggtttcatttccgggtggcgcgggcgccattttgtgaggagcgatataaacgggcgcagaggccggctgcccgcccagttgttactcaggtgcgctagcctgcggagcccgtccgtgctgttctgcggcaaggcctttcccagtgtccccacgcggaaggcaactgcctgagaggcgcggcgtcgcaccgcccagagctgaggaagccggcgccagttcgcggggctccgggccgccactcagagctatgagctacggccgcccccctcccgatgtggagggtatgacctccctcaaggtggacaacctgacctaccgcacctcgcccgacacgctgaggcgcgtcttcgagaagtacgggcgcgtcggcgacgtgtacatcccgcgggatcgctacaccaaggagtcccgcggcttcgccttcgttcgctttcacgacaagcgcgacgctgaggacgctatggatgccatggacggggccgtgctggacggccgcgagctgcgggtgcaaatggcgcgctacggccgccccccggactcacaccacagccgccggggaccgccaccccgcaggtacgggggcggtggctacggacgccggagccgcagccctaggcggcgtcgccgcagccgatcccggagtcggagccgttccaggtctcgcagccgatctcgctacagccgctcgaagtctcggtcccgcactcgttctcgatctcggtcgacctccaagtccagatccgcacgaaggtccaagtccaagtcctcgtcggtctccagatctcgttcgcggtccaggtcccggtctcggtccaggagtcctcccccagtgtccaagagggaatccaaatccaggtcgcgatcgaagagtccccccaagtctcctgaagaggaaggagcggtgtcctcttaagaaaatggtaatgtctgggaatccgagacacataaccctaattcataaatgggatttggggtaggtctttttgagtcgtgttaatgtaagaatgactcctatcattaggagtgctgctcggaggttactcacctttgggagtaatactgaagagaggggtctgcagaaaggatgtgtatgaagcttagataataatggctgtttcgtaaactgtttgagacctattaatgaaaatgactatttcttgctgtttttatccaacgtctgcattttccccctttaaagctgcggtctcctgtttgataaaagaatattggccagtattgcagattttaactgatttggctgatcctccagggaccagtttctgtgggcgtgtattggagcaggtttgtctttaaatgttaaagatgcactatcctcttagagaaacaatcagttcaactattgttgtactgactgggacttcatattctaatggatgtggcaaaagaattgcaataagaagcagtgaacatttggaaccccaaaagaaagttacaggtattgcactgggtggggaaaggatagtgtgtctttaactcttaaattgtttggtcctattttttaaaaaggaaagggccctaagtagctcagatattaaagtagtattctcaattaccaaatgtttcatttgaaacaatttatcttaatgaaatatagaccaattctctgatctcgagttgtttttgtttggatacagcccttttttttttctttttttttcttccccttacctttcttcaccttggttatttggccaggaatacgtaaattcaaacttgtacatgctgatggtagcctttgtgaaattttcctaattgggccttttaaaaacatggctgggtggaacatttctgtaccctactggtttgaccagagccttagtaagtacgtgcctgaaactgaaaccatgtgcactttaatggaaggtaagctgaacttctttcttttcaaacctagatgtatcggcaagcagtgtaaacggaggacttggggaaaaaggaccacatagtccatcgaagaagagtccttggaacaagcaactggctattgaaaaggttattttgtaacatttgtctaactttttacttgtttaagctttgcctcagttggcaaacttcattttatgtgccattttgttgctgttattcaaatttcttgtaatttagtgaggtgaacgacttcagatttcattattggatttggatatttgaggtaaaatttcattttgttatatagtgctgactttttttgtttgaaattaaacagattggtaaccta

SEQ ID NO: 374830 - DNA, 2443 bp, Homo sapiens
aacgtagtcccgggtggcctggcacgcgcaagcgctcggcggggagtccccaccgccaggacgcagagccgacggagctctcgggctctggcgaaagggggttgggaagcggactccggcgaagagcagtcaggaacggctggacggggccgagagacgacgcagcggagtctgagggggccggggtcacagggagaggcaaatgagggcagaagcactcttcagacggagacggggctgacggctgagcaaaaaaggggcgtgaacttggagtattggcatgaaaaaaaggtgggggcccagatggggagcacctcctcttcctcctgcccaatcgcgatcgtccggcctcccaggcggaaaaagcgtttcgcgggctttccaactgcccgctaattccgctccccctccctccagccgtgactccgcgctttttggcccgcccgccgggctgtgcgcaggcgcttcgggtaggggcggggcgcgcggcagggtcgttacgaagcggggcgcggtgggccaatcagaaggtttcatttccgggtggcgcgggcgccattttgtgaggagcgatataaacgggcgcagaggccggctgcccgcccagttgttactcaggtgcgctagcctgcggagcccgtccgtgctgttctgcggcaaggcctttcccagtgtccccacgcggaaggcaactgcctgagaggcgcggcgtcgcaccgcccagagctgaggaagccggcgccagttcgcggggctccgggccgccactcagagctatgagctacggccgcccccctcccgatgtggagggtatgacctccctcaaggtggacaacctgacctaccgcacctcgcccgacacgctgaggcgcgtcttcgagaagtacgggcgcgtcggcgacgtgtacatcccgcgggatcgctacaccaaggagtcccgcggcttcgccttcgttcgctttcacgacaagcgcgacgctgaggacgctatggatgccatggacgggccgatcccggagtcggagccgttccaggtctcgcagccgatctcgctacagccgctcgaagtctcggtcccgcactcgttctcgatctcggtcgacctccaagtccagatccgcacgaaggtccaagtccaagtcctcgtcggtctccagatctcgttcgcggtccaggtcccggtctcggtccaggagtcctcccccagtgtccaagagggaatccaaatccaggtcgcgatcgaagagtccccccaagtctcctgaagaggaaggagcggtgtcctcttaagaaaatggctgcggtctcctgtttgataaaagaatattggccagtattgcagattttaactgatttggctgatcctccagggaccagtttctgtgggcgtgtattggagcagatgtatcggcaagcagtgtaaacggaggacttggggaaaaaggaccacatagtccatcgaagaagagtccttggaacaagcaactggctattgaaaaggttattttgtaacatttgtctaactttttacttgtttaagctttgcctcagttggcaaacttcattttatgtgccattttgttgctgttattcaaatttcttgtaatttagtgaggtgaacgacttcagatttcattattggatttggatatttgaggtaaaatttcattttgttatatagtgctgactttttttgtttgaaattaaacagattggtaacctaatttgtggcctcctgacttttaaggaaaacgtgtgcagccattacacacagcctaaagctgtcaagagattgactcggcattgccttcattccttaaaattaaaaacctacaaaagttggtgtaaatttgtatatgttatttaccttcagatctaaatggtaatctgaacccaaatttgtataaagacttttcaggtgaaaagacttgattttttgaaaggattgtttatcaaacacaattctaatctcttctcttatgtatttttgtgcactaggcgcagttgtgtagcagttgagtaatgctggttagctgttaaggtggcgtgttgcagtgcagagtgcttggctgtttcctgttttctcccgattgctcctgtgtaaagatgccttgtcgtgcagaaacaaatggctgtccagtttattaaaatgcctgacaactgcacttccagtcacccgggccttgcatataaataacggagcatacagtgagcacatctagctgatgataaatacacctttttttccctcttccccctaaaaatggtaaatctgatcatatctacatgtatgaacttaacatggaaaatgttaaggaagcaaatggttgtaactttgtaagtacttataacatggtgtatctttttgcttatgaatattctgtattataaccattgtttctgtagtttaattaaaacattttcttggtgttagcttttctca

SEQ ID NO: 374831 - DNA, 1875 bp, Homo sapiens
aacgtagtcccgggtggcctggcacgcgcaagcgctcggcggggagtccccaccgccaggacgcagagccgacggagctctcgggctctggcgaaagggggttgggaagcggactccggcgaagagcagtcaggaacggctggacggggccgagagacgacgcagcggagtctgagggggccggggtcacagggagaggcaaatgagggcagaagcactcttcagacggagacggggctgacggctgagcaaaaaaggggcgtgaacttggagtattggcatgaaaaaaaggtgggggcccagatggggagcacctcctcttcctcctgcccaatcgcgatcgtccggcctcccaggcggaaaaagcgtttcgcgggctttccaactgcccgctaattccgctccccctccctccagccgtgactccgcgctttttggcccgcccgccgggctgtgcgcaggcgcttcgggtaggggcggggcgcgcggcagggtcgttacgaagcggggcgcggtgggccaatcagaaggtttcatttccgggtggcgcgggcgccattttgtgaggagcgatataaacgggcgcagaggccggctgcccgcccagttgttactcaggtgcgctagcctgcggagcccgtccgtgctgttctgcggcaaggcctttcccagtgtccccacgcggaaggcaactgcctgagaggcgcggcgtcgcaccgcccagagctgaggaagccggcgccagttcgcggggctccgggccgccactcagagctatgagctacggccgcccccctcccgatgtggagggtatgacctccctcaaggtggacaacctgacctaccgcacctcgcccgacacgctgaggcgcgtcttcgagaagtacgggcgcgtcggcgacgtgtacatcccgcgggatcgctacaccaaggagtcccgcggcttcgccttcgttcgctttcacgacaagcgcgacgctgaggacgctatggatgccatggacggggccgtgctggacggccgcgagctgcgggtgcaaatggcgcgctacggccgccccccggactcacaccacagccgccggggaccgccaccccgcaggtacgggggcggtggctacggacgccggagccgcagccctaggcggcgtcgccgcagccgatcccggagtcggagccgttccaggtctcgcagccgatctcgctacagccgctcgaagtctcggtcccgcactcgttctcgatctcggtcgacctccaagtccagatccgcacgaaggtccaagtccaagtcctcgtcggtctccagatctcgttcgcggtccaggtcccggtctcggtccaggagtcctcccccagtgtccaagagggaatccaaatccaggtcgcgatcgaagagtccccccaagtctcctgaagaggaaggagcggtgtcctcttaagaaaatggctgcggtctcctgtttgataaaagaatattggccagtattgcagattttaactgatttggctgatcctccagggaccagtttctgtgggcgtgtattggagcagatgtatcggcaagcagtgtaaacggaggacttggggaaaaaggaccacatagtccatcgaagaagagtccttggaacaagcaactggctattgaaaaggttattttgtaacatttgtctaactttttacttgtttaagctttgcctcagttggcaaacttcattttatgtgccattttgttgctgttattcaaatttcttgtaatttagtgaggtgaacgacttcagatttcattattggatttggatatttgaggtaaaatttcattttgttatatagtgctgactttttttgtttgaaattaaacagattggtaaccta

SEQ ID NO: 374832 - DNA, 2430 bp, Homo sapiens
aacgtagtcccgggtggcctggcacgcgcaagcgctcggcggggagtccccaccgccaggacgcagagccgacggagctctcgggctctggcgaaagggggttgggaagcggactccggcgaagagcagtcaggaacggctggacggggccgagagacgacgcagcggagtctgagggggccggggtcacagggagaggcaaatgagggcagaagcactcttcagacggagacggggctgacggctgagcaaaaaaggggcgtgaacttggagtattggcatgaaaaaaaggtgggggcccagatggggagcacctcctcttcctcctgcccaatcgcgatcgtccggcctcccaggcggaaaaagcgtttcgcgggctttccaactgcccgctaattccgctccccctccctccagccgtgactccgcgctttttggcccgcccgccgggctgtgcgcaggcgcttcgggtaggggcggggcgcgcggcagggtcgttacgaagcggggcgcggtgggccaatcagaaggtttcatttccgggtggcgcgggcgccattttgtgaggagcgatataaacgggcgcagaggccggctgcccgcccagttgttactcaggtgcgctagcctgcggagcccgtccgtgctgttctgcggcaaggcctttcccagtgtccccacgcggaaggcaactgcctgagaggcgcggcgtcgcaccgcccagagctgaggaagccggcgccagttcgcggggctccgggccgccactcagagctatgagctacggccgcccccctcccgatgtggagggtatgacctccctcaaggtggacaacctgacctaccgcacctcgcccgacacgctgaggcgcgtcttcgagaagtacgggcgcgtcggcgacgtgtacatcccgcgggatcgctacaccaaggagtcccgcggcttcgccttcgttcgctttcacgacaagcgcgacgctgaggacgctatggatgccatggacggggccgtgctggacggccgcgagctgcgggtgcaaatggcgcgctacggccgccccccggactcacaccacagccgccggggaccgccaccccgcaggtacgggggcggtggctacggacgccggagccgcagccctaggcggcgtcgccgcagccgatcccggagtcggagccgttccaggtctcgcagccgatctcgctacagccgctcgaagtctcggtcccgcactcgttctcgatctcggtcgacctccaagtccagatccgcacgaaggtccaagtccaagtcctcgtcggtctccagatctcgttcgcggtccaggtcccggtctcggtccaggagtcctcccccagtgtccaagagggaatccaaatccaggtcgcgatcgaagagtccccccaagtctcctgaagaggaaggagcggtgtcctcttaagaaaatggtaatgtctgggaatccgagacacataaccctaattcataaatgggatttggggtaggtctttttgagtcgtgttaatgtaagaatgactcctatcattaggagtgctgctcggaggttactcacctttgggagtaatactgaagagaggggtctgcagaaaggatgtgtatgaagcttagataataatggctgtttcgtaaactgtttgagacctattaatgaaaatgactatttcttgctgtttttatccaacgtctgcattttccccctttaaagctgcggtctcctgtttgataaaagaatattggccagtattgcagattttaactgatttggctgatcctccagggaccagtttctgtgggcgtgtattggagcaggtttgtctttaaatgttaaagatgcactatcctcttagagaaacaatcagttcaactattgttgtactgactgggacttcatattctaatggatgtggcaaaagaattgcaataagaagcagtgaacatttggaaccccaaaagaaagttacaggtattgcactgggtggggaaaggatagtgtgtctttaactcttaaattgtttggtcctattttttaaaaaggaaagggccctaagtagctcagatattaaagtagtattctcaattaccaaatgtttcatttgaaacaatttatcttaatgaaatatagaccaattctctgatctcgagttgtttttgtttggatacagcccttttttttttctttttttttcttccccttacctttcttcaccttggttatttggccaggaatacgtaaattcaaacttgtacatgctgatggtagcctttgtgaaattttcctaattgggccttttaaaaacatggctgggtggaacatttctgtaccctactggtttgaccagagccttagtaagtacgtgcctgaaactgaaaccatgaactgacaagtaaacgtgttcctctgctgtgca

SEQ ID NO: 374833 - DNA, 2021 bp, Homo sapiens
aacgtagtcccgggtggcctggcacgcgcaagcgctcggcggggagtccccaccgccaggacgcagagccgacggagctctcgggctctggcgaaagggggttgggaagcggactccggcgaagagcagtcaggaacggctggacggggccgagagacgacgcagcggagtctgagggggccggggtcacagggagaggcaaatgagggcagaagcactcttcagacggagacggggctgacggctgagcaaaaaaggggcgtgaacttggagtattggcatgaaaaaaaggtgggggcccagatggggagcacctcctcttcctcctgcccaatcgcgatcgtccggcctcccaggcggaaaaagcgtttcgcgggctttccaactgcccgctaattccgctccccctccctccagccgtgactccgcgctttttggcccgcccgccgggctgtgcgcaggcgcttcgggtaggggcggggcgcgcggcagggtcgttacgaagcggggcgcggtgggccaatcagaaggtttcatttccgggtggcgcgggcgccattttgtgaggagcgatataaacgggcgcagaggccggctgcccgcccagttgttactcaggtgcgctagcctgcggagcccgtccgtgctgttctgcggcaaggcctttcccagtgtccccacgcggaaggcaactgcctgagaggcgcggcgtcgcaccgcccagagctgaggaagccggcgccagttcgcggggctccgggccgccactcagagctatgagctacggccgcccccctcccgatgtggagggtatgacctccctcaaggtggacaacctgacctaccgcacctcgcccgacacgctgaggcgcgtcttcgagaagtacgggcgcgtcggcgacgtgtacatcccgcgggatcgctacaccaaggagtcccgcggcttcgccttcgttcgctttcacgacaagcgcgacgctgaggacgctatggatgccatggacggggccgtgctggacggccgcgagctgcgggtgcaaatggcgcgctacggccgccccccggactcacaccacagccgccggggaccgccaccccgcaggtacgggggcggtggctacggacgccggagccgcagccctaggcggcgtcgccgcagccgatcccggagtcggagccgttccaggtctcgcagccgatctcgctacagccgctcgaagtctcggtcccgcactcgttctcgatctcggtcgacctccaagtccagatccgcacgaaggtccaagtccaagtcctcgtcggtctccagatctcgttcgcggtccaggtcccggtctcggtccaggagtcctcccccagtgtccaagagggaatccaaatccaggtcgcgatcgaagagtccccccaagtctcctgaagaggaaggagcggtgtcctcttaagaaaatggctgcggtctcctgtttgataaaagaatattggccagtattgcagattttaactgatttggctgatcctccagggaccagtttctgtgggcgtgtattggagcagatgtatcggcaagcagtgtaaacggaggacttggggaaaaaggaccacatagtccatcgaagaagagtccttggaacaagcaactggctattgaaaaggttattttgtaacatttgtctaactttttacttgtttaagctttgcctcagttggcaaacttcattttatgtgccattttgttgctgttattcaaatttcttgtaatttagtgaggtgaacgacttcagatttcattattggatttggatatttgaggtaaaatttcattttgttatatagtgctgactattgttttgacaattcaaacctggattgtgataacctctaaattttggggggcctttcttggactttttaacagggaaaaacctttgttcaaatccaattaccactacaggtcttaaaagcttggttcaagtatttgacatttgccaattgcctcttcaattccttaatttaccccctct

SEQ ID NO: 374834 - DNA, 1540 bp, Homo sapiens
ggcggcctgggcgggagcgcgcgggcggggccggccccgctgcctggaattaaccccgctgtgcttgctcgtcccgcccgcagccctaggcggcgtcgccgcagccgatcccggagtcggagccgttccaggtctcgcagccgatctcgctacagccgctcgaagtctcggtcccgcactcgttctcgatctcggtcgacctccaagtccagatccgcacgaaggtccaagtccaagtcctcgtcggtctccagatctcgttcgcggtccaggtcccggtctcggtccaggagtcctcccccagtgtccaagagggaatccaaatccaggtcgcgatcgaagagtccccccaagtctcctgaagaggaaggagcggtgtcctcttaagaaaatggctgcggtctcctgtttgataaaagaatattggccagtattgcagattttaactgatttggctgatcctccagggaccagtttctgtgggcgtgtattggagcagatgtatcggcaagcagtgtaaacggaggacttggggaaaaaggaccacatagtccatcgaagaagagtccttggaacaagcaactggctattgaaaaggttattttgtaacatttgtctaactttttacttgtttaagctttgcctcagttggcaaacttcattttatgtgccattttgttgctgttattcaaatttcttgtaatttagtgaggtgaacgacttcagatttcattattggatttggatatttgaggtaaaatttcattttgttatatagtgctgactttttttgtttgaaattaaacagattggtaacctaatttgtggcctcctgacttttaaggaaaacgtgtgcagccattacacacagcctaaagctgtcaagagattgactcggcattgccttcattccttaaaattaaaaacctacaaaagttggtgtaaatttgtatatgttatttaccttcagatctaaatggtaatctgaacccaaatttgtataaagacttttcaggtgaaaagacttgattttttgaaaggattgtttatcaaacacaattctaatctcttctcttatgtatttttgtgcactaggcgcagttgtgtagcagttgagtaatgctggttagctgttaaggtggcgtgttgcagtgcagagtgcttggctgtttcctgttttctcccgattgctcctgtgtaaagatgccttgtcgtgcagaaacaaatggctgtccagtttattaaaatgcctgacaactgcacttccagtcacccgggccttgcatataaataacggagcatacagtgagcacatctagctgatgataaatacacctttttttccctcttccccctaaaaatggtaaatctgatcatatctacatgtatgaacttaacatggaaaatgttaaggaagcaaatggttgtaactttgtaagtacttataacatggtgtatctttttgcttatgaatattctgtattataaccattgtttctgtagtttaattaaaacattttcttggtgttagcttttctca

SEQ ID NO: 374835 - DNA, 1464 bp, Homo sapiens
aacgtagtcccgggtggcctggcacgcgcaagcgctcggcggggagtccccaccgccaggacgcagagccgacggagctctcgggctctggcgaaagggggttgggaagcggactccggcgaagagcagtcaggaacggctggacggggccgagagacgacgcagcggagtctgagggggccggggtcacagggagaggcaaatgagggcagaagcactcttcagacggagacggggctgacggctgagcaaaaaaggggcgtgaacttggagtattggcatgaaaaaaaggtgggggcccagatggggagcacctcctcttcctcctgcccaatcgcgatcgtccggcctcccaggcggaaaaagcgtttcgcgggctttccaactgcccgctaattccgctccccctccctccagccgtgactccgcgctttttggcccgcccgccgggctgtgcgcaggcgcttcgggtaggggcggggcgcgcggcagggtcgttacgaagcggggcgcggtgggccaatcagaaggtttcatttccgggtggcgcgggcgccattttgtgaggagcgatataaacgggcgcagaggccggctgcccgcccagttgttactcaggtgcgctagcctgcggagcccgtccgtgctgttctgcggcaaggcctttcccagtgtccccacgcggaaggcaactgcctgagaggcgcggcgtcgcaccgcccagagctgaggaagccggcgccagttcgcggggctccgggccgccactcagagctatgagctacggccgcccccctcccgatgtggagggtatgacctccctcaaggtggacaacctgacctaccgcacctcgcccgacacgctgaggcgcgtcttcgagaagtacgggcgcgtcggcgacgtgtacatcccgcgggatcgctacaccaaggagtcccgcggcttcgccttcgttcgctttcacgacaagcgcgacgctgaggacgctatggatgccatggacggggccgtgctggacggccgcgagctgcgggtgcaaatggcgcgctacggccgccccccggactcacaccacagccgccggggaccgccaccccgcaggtacgggggcggtggctacggacgccggagccgcagccctaggcggcgtcgccgcagccgatcccggagtcggagccgttccaggtctcgcagccgatctcgctacagccgctcgaagtctcggtcccgcactcgttctcgatctcggtcgacctccaagtccagatccgcacgaaggtccaagtccaagtcctcgtcggtctccagatctcgttcgcggtccaggtcccggtctcggtccaggagtcctcccccagtgtccaagagggaatccaaatccaggtcgcgatcgaagagtccccccaagtctcctgaagaggaaggagcgtcctcaatgctgctgttataagatattgccagtt

SEQ ID NO: 374836 - DNA, 1516 bp, Homo sapiens
  misc_feature (1458)..(1458): n is a, c, g, or t
  misc_feature (1462)..(1462): n is a, c, g, or t
  misc_feature (1472)..(1472): n is a, c, g, or t
  misc_feature (1481)..(1481): n is a, c, g, or t
  misc_feature (1483)..(1483): n is a, c, g, or t
aacgtagtcccgggtggcctggcacgcgcaagcgctcggcggggagtccccaccgccaggacgcagagccgacggagctctcgggctctggcgaaagggggttgggaagcggactccggcgaagagcagtcaggaacggctggacggggccgagagacgacgcagcggagtctgagggggccggggtcacagggagaggcaaatgagggcagaagcactcttcagacggagacggggctgacggctgagcaaaaaaggggcgtgaacttggagtattggcatgaaaaaaaggtgggggcccagatggggagcacctcctcttcctcctgcccaatcgcgatcgtccggcctcccaggcggaaaaagcgtttcgcgggctttccaactgcccgctaattccgctccccctccctccagccgtgactccgcgctttttggcccgcccgccgggctgtgcgcaggcgcttcgggtaggggcggggcgcgcggcagggtcgttacgaagcggggcgcggtgggccaatcagaaggtttcatttccgggtggcgcgggcgccattttgtgaggagcgatataaacgggcgcagaggccggctgcccgcccagttgttactcaggtgcgctagcctgcggagcccgtccgtgctgttctgcggcaaggcctttcccagtgtccccacgcggaaggcaactgcctgagaggcgcggcgtcgcaccgcccagagctgaggaagccggcgccagttcgcggggctccgggccgccactcagagctatgagctacggccgcccccctcccgatgtggagggtatgacctccctcaaggtggacaacctgacctaccgcacctcgcccgacacgctgaggcgcgtcttcgagaagtacgggcgcgtcggcgacgtgtacatcccgcgggatcgctacaccaaggagtcccgcggcttcgccttcgttcgctttcacgacaagcgcgacgctgaggacgctatggatgccatggacggggccgtgctggacggccgcgagctgcgggtgcaaatggcgcgctacggccgccccccggactcacaccacagccgccggggaccgccaccccgcaggtacgggggcggtggctacggacgccggagccgcagccctaggcggcgtcgccgcagccgatcccggagtcggagccgttccaggtctcgcagccgatctcgctacagccgctcgaagtctcggtcccgcactcgttctcgatctcggtcgacctccaagtccagatccgcacgaaggtccaagtccaagtcctcgtcggtctccagatctcgttcgcggtccaggtcccggtctcggtccaggagtcctcccccagtgtccaagagggaatccaaatccaggtcgcgatcgaagagtccccccaagtctcctgaagaggaaggagcggtgtcctcttaagaaaatggttcggcangcgngtacggggantggggaaangncccttgcagagaaagctggaagcaggtttgacg

SEQ ID NO: 374837 - DNA, 2515 bp, Homo sapiens
aacgtagtcccgggtggcctggcacgcgcaagcgctcggcggggagtccccaccgccaggacgcagagccgacggagctctcgggctctggcgaaagggggttgggaagcggactccggcgaagagcagtcaggaacggctggacggggccgagagacgacgcagcggagtctgagggggccggggtcacagggagaggcaaatgagggcagaagcactcttcagacggagacggggctgacggctgagcaaaaaaggggcgtgaacttggagtattggcatgaaaaaaaggtgggggcccagatggggagcacctcctcttcctcctgcccaatcgcgatcgtccggcctcccaggcggaaaaagcgtttcgcgggctttccaactgcccgctaattccgctccccctccctccagccgtgactccgcgctttttggcccgcccgccgggctgtgcgcaggcgcttcgggtaggggcggggcgcgcggcagggtcgttacgaagcggggcgcggtgggccaatcagaaggtttcatttccgggtggcgcgggcgccattttgtgaggagcgatataaacgggcgcagaggccggctgcccgcccagttgttactcaggtgcgctagcctgcggagcccgtccgtgctgttctgcggcaaggcctttcccagtgtccccacgcggaaggcaactgcctgagaggcgcggcgtcgcaccgcccagagctgaggaagccggcgccagttcgcggggctccgggccgccactcagagctatgagctacggccgcccccctcccgatgtggagggtatgacctccctcaaggtggacaacctgacctaccgcacctcgcccgacacgctgaggcgcgtcttcgagaagtacgggcgcgtcggcgacgtgtacatcccgcgggatcgctacaccaaggagtcccgcggcttcgccttcgttcgctttcacgacaagcgcgacgctgaggacgctatggatgccatggacggggccgtgctggacggccgcgagctgcgggtgcaaatggcgcgctacggccgccccccggactcacaccacagccgccggggaccgccaccccgcaggtacgggggcggtggctacggacgccggagccgcagccctaggcggcgtcgccgcagccgatcccggagtcggagccgttccaggtctcgcagccgatctcgctacagccgctcgaagtctcggtcccgcactcgttctcgatctcggtcgacctccaagtccagatccgcacgaaggtccaagtccaagtcctcgtcggtctccagatctcgttcgcggtccaggtcccggtctcggtccaggagtcctcccccagtgtccaagagggaatccaaatccaggtcgcgatcgaagagtccccccaagtctcctgaagaggaaggagcggtgtcctcttaagaaaatgatgtatcggcaagcagtgtaaacggaggacttggggaaaaaggaccacatagtccatcgaagaagagtccttggaacaagcaactggctattgaaaaggttattttgtaacatttgtctaactttttacttgtttaagctttgcctcagttggcaaacttcattttatgtgccattttgttgctgttattcaaatttcttgtaatttagtgaggtgaacgacttcagatttcattattggatttggatatttgaggtaaaatttcattttgttatatagtgctgactttttttgtttgaaattaaacagattggtaacctaatttgtggcctcctgacttttaaggaaaacgtgtgcagccattacacacagcctaaagctgtcaagagattgactcggcattgccttcattccttaaaattaaaaacctacaaaagttggtgtaaatttgtatatgttatttaccttcagatctaaatggtaatctgaacccaaatttgtataaagacttttcaggtgaaaagacttgattttttgaaaggattgtttatcaaacacaattctaatctcttctcttatgtatttttgtgcactaggcgcagttgtgtagcagttgagtaatgctggttagctgttaaggtggcgtgttgcagtgcagagtgcttggctgtttcctgttttctcccgattgctcctgtgtaaagatgccttgtcgtgcagaaacaaatggctgtccagtttattaaaatgcctgacaactgcacttccagtcacccgggccttgcatataaataacggagcatacagtgagcacatctagctgatgataaatacacctttttttccctcttccccctaaaaatggtaaatctgatcatatctacatgtatgaacttaacatggaaaatgttaaggaagcaaatggttgtaactttgtaagtacttataacatggtgtatctttttgcttatgaatattctgtattataaccattgtttctgtagtttaattaaaacattttcttggtgttagcttttctcatctcagaaaataacaaagctctatt

SEQ ID NO: 374838 - DNA, 3208 bp, Homo sapiens
aacgtagtcccgggtggcctggcacgcgcaagcgctcggcggggagtccccaccgccaggacgcagagccgacggagctctcgggctctggcgaaagggggttgggaagcggactccggcgaagagcagtcaggaacggctggacggggccgagagacgacgcagcggagtctgagggggccggggtcacagggagaggcaaatgagggcagaagcactcttcagacggagacggggctgacggctgagcaaaaaaggggcgtgaacttggagtattggcatgaaaaaaaggtgggggcccagatggggagcacctcctcttcctcctgcccaatcgcgatcgtccggcctcccaggcggaaaaagcgtttcgcgggctttccaactgcccgctaattccgctccccctccctccagccgtgactccgcgctttttggcccgcccgccgggctgtgcgcaggcgcttcgggtaggggcggggcgcgcggcagggtcgttacgaagcggggcgcggtgggccaatcagaaggtttcatttccgggtggcgcgggcgccattttgtgaggagcgatataaacgggcgcagaggccggctgcccgcccagttgttactcaggtgcgctagcctgcggagcccgtccgtgctgttctgcggcaaggcctttcccagtgtccccacgcggaaggcaactgcctgagaggcgcggcgtcgcaccgcccagagctgaggaagccggcgccagttcgcggggctccgggccgccactcagagctatgagctacggccgcccccctcccgatgtggagggtatgacctccctcaaggtggacaacctgacctaccgcacctcgcccgacacgctgaggcgcgtcttcgagaagtacgggcgcgtcggcgacgtgtacatcccgcgggatcgctacaccaaggagtcccgcggcttcgccttcgttcgctttcacgacaagcgcgacgctgaggacgctatggatgccatggacggggccgtgctggacggccgcgagctgcgggtgcaaatggcgcgctacggccgccccccggactcacaccacagccgccggggaccgccaccccgcaggtacgggggcggtggctacggacgccggagccgcagccctaggcggcgtcgccgcagccgatcccggagtcggagccgttccaggtctcgcagccgatctcgctacagccgctcgaagtctcggtcccgcactcgttctcgatctcggtcgacctccaagtccagatccgcacgaaggtccaagtccaagtcctcgtcggtctccagatctcgttcgcggtccaggtcccggtctcggtccaggagtcctcccccagtgtccaagagggaatccaaatccaggtcgcgatcgaagagtccccccaagtctcctgaagaggaaggagcggtgtcctcttaagaaaatggctgcggtctcctgtttgataaaagaatattggccagtattgcagattttaactgatttggctgatcctccagggaccagtttctgtgggcgtgtattggagcaggtttgtctttaaatgttaaagatgcactatcctcttagagaaacaatcagttcaactattgttgtactgactgggacttcatattctaatggatgtggcaaaagaattgcaataagaagcagtgaacatttggaaccccaaaagaaagttacaggtattgcactgggtggggaaaggatagtgtgtctttaactcttaaattgtttggtcctattttttaaaaaggaaagggccctaagtagctcagatattaaagtagtattctcaattaccaaatgtttcatttgaaacaatttatcttaatgaaatatagaccaattctctgatctcgagttgtttttgtttggatacagcccttttttttttctttttttttcttccccttacctttcttcaccttggttatttggccaggaatacgtaaattcaaacttgtacatgctgatggtagcctttgtgaaattttcctaattgggccttttaaaaacatggctgggtggaacatttctgtaccctactggtttgaccagagccttagtaagtacgtgcctgaaactgaaaccatgtgcactttaatggaaggtaagctgaacttctttcttttcaaacctagatgtatcggcaagcagtgtaaacggaggacttggggaaaaaggaccacatagtccatcgaagaagagtccttggaacaagcaactggctattgaaaaggttattttgtaacatttgtctaactttttacttgtttaagctttgcctcagttggcaaacttcattttatgtgccattttgttgctgttattcaaatttcttgtaatttagtgaggtgaacgacttcagatttcattattggatttggatatttgaggtaaaatttcattttgttatatagtgctgactttttttgtttgaaattaaacagattggtaacctaatttgtggcctcctgacttttaaggaaaacgtgtgcagccattacacacagcctaaagctgtcaagagattgactcggcattgccttcattccttaaaattaaaaacctacaaaagttggtgtaaatttgtatatgttatttaccttcagatctaaatggtaatctgaacccaaatttgtataaagacttttcaggtgaaaagacttgattttttgaaaggattgtttatcaaacacaattctaatctcttctcttatgtatttttgtgcactaggcgcagttgtgtagcagttgagtaatgctggttagctgttaaggtggcgtgttgcagtgcagagtgcttggctgtttcctgttttctcccgattgctcctgtgtaaagatgccttgtcgtgcagaaacaaatggctgtccagtttattaaaatgcctgacaactgcacttccagtcacccgggccttgcatataaataacggagcatacagtgagcacatctagctgatgataaatacacctttttttccctcttccccctaaaaatggtaaatctgatcatatctacatgtatgaacttaacatggaaaatgttaaggaagcaaatggttgtaactttgtaagtacttataacatggtgtatctttttgcttatgaatattctgtattataaccattgtttctgtagtttaattaaaacattttcttggtgttagcttttctca

SEQ ID NO: 374839 - DNA, 2595 bp, Homo sapiens
aacgtagtcccgggtggcctggcacgcgcaagcgctcggcggggagtccccaccgccaggacgcagagccgacggagctctcgggctctggcgaaagggggttgggaagcggactccggcgaagagcagtcaggaacggctggacggggccgagagacgacgcagcggagtctgagggggccggggtcacagggagaggcaaatgagggcagaagcactcttcagacggagacggggctgacggctgagcaaaaaaggggcgtgaacttggagtattggcatgaaaaaaaggtgggggcccagatggggagcacctcctcttcctcctgcccaatcgcgatcgtccggcctcccaggcggaaaaagcgtttcgcgggctttccaactgcccgctaattccgctccccctccctccagccgtgactccgcgctttttggcccgcccgccgggctgtgcgcaggcgcttcgggtaggggcggggcgcgcggcagggtcgttacgaagcggggcgcggtgggccaatcagaaggtttcatttccgggtggcgcgggcgccattttgtgaggagcgatataaacgggcgcagaggccggctgcccgcccagttgttactcaggtgcgctagcctgcggagcccgtccgtgctgttctgcggcaaggcctttcccagtgtccccacgcggaaggcaactgcctgagaggcgcggcgtcgcaccgcccagagctgaggaagccggcgccagttcgcggggctccgggccgccactcagagctatgagctacggccgcccccctcccgatgtggagggtatgacctccctcaaggtggacaacctgacctaccgcacctcgcccgacacgctgaggcgcgtcttcgagaagtacgggcgcgtcggcgacgtgtacatcccgcgggatcgctacaccaaggagtcccgcggcttcgccttcgttcgctttcacgacaagcgcgacgctgaggacgctatggatgccatggacggggccgtgctggacggccgcgagctgcgggtgcaaatggcgcgctacggccgccccccggactcacaccacagccgccggggaccgccaccccgcaggtacgggggcggtggctacggacgccggagccgcagccctaggcggcgtcgccgcagccgatcccggagtcggagccgttccaggtctcgcagccgatctcgctacagccgctcgaagtctcggtcccgcactcgttctcgatctcggtcgacctccaagtccagatccgcacgaaggtccaagtccaagtcctcgtcggtctccagatctcgttcgcggtccaggtcccggtctcggtccaggagtcctcccccagtgtccaagagggaatccaaatccaggtcgcgatcgaagagtccccccaagtctcctgaagaggaaggagcggtgtcctcttaagaaaatggctgcggtctcctgtttgataaaagaatattggccagtattgcagattttaactgatttggctgatcctccagggaccagtttctgtgggcgtgtattggagcagatgtatcggcaagcagtgtaaacggaggacttggggaaaaaggaccacatagtccatcgaagaagagtccttggaacaagcaactggctattgaaaaggttattttgtaacatttgtctaactttttacttgtttaagctttgcctcagttggcaaacttcattttatgtgccattttgttgctgttattcaaatttcttgtaatttagtgaggtgaacgacttcagatttcattattggatttggatatttgaggtaaaatttcattttgttatatagtgctgactttttttgtttgaaattaaacagattggtaacctaatttgtggcctcctgacttttaaggaaaacgtgtgcagccattacacacagcctaaagctgtcaagagattgactcggcattgccttcattccttaaaattaaaaacctacaaaagttggtgtaaatttgtatatgttatttaccttcagatctaaatggtaatctgaacccaaatttgtataaagacttttcaggtgaaaagacttgattttttgaaaggattgtttatcaaacacaattctaatctcttctcttatgtatttttgtgcactaggcgcagttgtgtagcagttgagtaatgctggttagctgttaaggtggcgtgttgcagtgcagagtgcttggctgtttcctgttttctcccgattgctcctgtgtaaagatgccttgtcgtgcagaaacaaatggctgtccagtttattaaaatgcctgacaactgcacttccagtcacccgggccttgcatataaataacggagcatacagtgagcacatctagctgatgataaatacacctttttttccctcttccccctaaaaatggtaaatctgatcatatctacatgtatgaacttaacatggaaaatgttaaggaagcaaatggttgtaactttgtaagtacttataacatggtgtatctttttgcttatgaatattctgtattataaccattgtttctgtagtttaattaaaacattttcttggtgttagcttttctca

SEQ ID NO: 374840 - DNA, 3001 bp, Homo sapiens
  misc_feature (3001)..(3001): n is a, c, g, or t
aacgtagtcccgggtggcctggcacgcgcaagcgctcggcggggagtccccaccgccaggacgcagagccgacggagctctcgggctctggcgaaagggggttgggaagcggactccggcgaagagcagtcaggaacggctggacggggccgagagacgacgcagcggagtctgagggggccggggtcacagggagaggcaaatgagggcagaagcactcttcagacggagacggggctgacggctgagcaaaaaaggggcgtgaacttggagtattggcatgaaaaaaaggtgggggcccagatggggagcacctcctcttcctcctgcccaatcgcgatcgtccggcctcccaggcggaaaaagcgtttcgcgggctttccaactgcccgctaattccgctccccctccctccagccgtgactccgcgctttttggcccgcccgccgggctgtgcgcaggcgcttcgggtaggggcggggcgcgcggcagggtcgttacgaagcggggcgcggtgggccaatcagaaggtttcatttccgggtggcgcgggcgccattttgtgaggagcgatataaacgggcgcagaggccggctgcccgcccagttgttactcaggtgcgctagcctgcggagcccgtccgtgctgttctgcggcaaggcctttcccagtgtccccacgcggaaggcaactgcctgagaggcgcggcgtcgcaccgcccagagctgaggaagccggcgccagttcgcggggctccgggccgccactcagagctatgagctacggccgcccccctcccgatgtggagggtatgacctccctcaaggtggacaacctgacctaccgcacctcgcccgacacgctgaggcgcgtcttcgagaagtacgggcgcgtcggcgacgtgtacatcccgcgggatcgctacaccaaggagtcccgcggcttcgccttcgttcgctttcacgacaagcgcgacgctgaggacgctatggatgccatggacggggccgtgctggacggccgcgagctgcgggtgcaaatggcgcgctacggccgccccccggactcacaccacagccgccggggaccgccaccccgcaggtacgggggcggtggctacggacgccggagccgcagccctaggcggcgtcgccgcagccgatcccggagtcggagccgttccaggtctcgcagccgatctcgctacagccgctcgaagtctcggtcccgcactcgttctcgatctcggtcgacctccaagtccagatccgcacgaaggtccaagtccaagtcctcgtcggtctccagatctcgttcgcggtccaggtcccggtctcggtccaggagtcctcccccagtgtccaagagggaatccaaatccaggtcgcgatcgaagagtccccccaagtctcctgaagaggaaggagcggtgtcctcttaagaaaatgatgtatcggcaagcagtgtaaacggaggacttggggaaaaaggaccacatagtccatcgaagaagagtccttggaacaagcaactggctattgaaaaggttattttgtaacatttgtctaactttttacttgtttaagctttgcctcagttggcaaacttcattttatgtgccattttgttgctgttattcaaatttcttgtaatttagtgaggtgaacgacttcagatttcattattggatttggatatttgaggtaaaatttcattttgttatatagtgctgactttttttgtttgaaattaaacagattggtaacctaatttgtggcctcctgacttttaaggaaaacgtgtgcagccattacacacagcctaaagctgtcaagagattgactcggcattgccttcattccttaaaattaaaaacctacaaaagttggtgtaaatttgtatatgttatttaccttcagatctaaatggtaatctgaacccaaatttgtataaagacttttcaggtgaaaagacttgattttttgaaaggattgtttatcaaacacaattctaatctcttctcttatgtatttttgtgcactaggcgcagttgtgtagcagttgagtaatgctggttagctgttaaggtggcgtgttgcagtgcagagtgcttggctgtttcctgttttctcccgattgctcctgtgtaaagatgccttgtcgtgcagaaacaaatggctgtccagtttattaaaatgcctgacaactgcacttccagtcacccgggccttgcatataaataacggagcatacagtgagcacatctagctgatgataaatacacctttttttccctcttccccctaaaaatggtaaatctgatcatatctacatgtatgaacttaacatggaaaatgttaaggaagcaaatggttgtaactttgtaagtacttataacatggtgtatctttttgcttatgaatattctgtattataaccattgtttctgtagtttaattaaaacattttcttggtgttagcttttctcaaaaaaaaaaaaaaaacaaaaaaaaataaaaaaacaagaaaaacacataaaaaaaaaaaacaataaaaaaaaaaaagaaaaaaaaaaaaaaagaagaaaaaaaaaaaagaaaggggggggggggggataaaatatttccaggggggggcaaataggggccccccccatttggttggaaagaggggctcccactgggggggtatttaataagagagcgggggggggtaaaaacacggtcgtaagacaaatactaagtgtgtatagtagggaacaccctcgtggcggggggcgaatagggcaccacacagcaatacggagcggcggaataaaaatgtagtggtggtgcacaccgcctttctgccgtgttctttttttttttcataaatcctcctcattgtaaacaagagagaagcacaggaggaggggcacgcacgtcagagctgcgtagagaagataaataaagtagagacaacgcggaaagaaactaccgacgaactgctctggtacactcn

SEQ ID NO: 374841 - DNA, 2436 bp, Homo sapiens
aacgtagtcccgggtggcctggcacgcgcaagcgctcggcggggagtccccaccgccaggacgcagagccgacggagctctcgggctctggcgaaagggggttgggaagcggactccggcgaagagcagtcaggaacggctggacggggccgagagacgacgcagcggagtctgagggggccggggtcacagggagaggcaaatgagggcagaagcactcttcagacggagacggggctgacggctgagcaaaaaaggggcgtgaacttggagtattggcatgaaaaaaaggtgggggcccagatggggagcacctcctcttcctcctgcccaatcgcgatcgtccggcctcccaggcggaaaaagcgtttcgcgggctttccaactgcccgctaattccgctccccctccctccagccgtgactccgcgctttttggcccgcccgccgggctgtgcgcaggcgcttcgggtaggggcggggcgcgcggcagggtcgttacgaagcggggcgcggtgggccaatcagaaggtttcatttccgggtggcgcgggcgccattttgtgaggagcgatataaacgggcgcagaggccggctgcccgcccagttgttactcaggtgcgctagcctgcggagcccgtccgtgctgttctgcggcaaggcctttcccagtgtccccacgcggaaggcaactgcctgagaggcgcggcgtcgcaccgcccagagctgaggaagccggcgccagttcgcggggctccgggccgccactcagagctatgagctacggccgcccccctcccgatgtggagggtatgacctccctcaaggtggacaacctgacctaccgcacctcgcccgacacgctgaggcgcgtcttcgagaagtacgggcgcgtcggcgacgtgtacatcccgcgggatcgctacaccaaggagtcccgcggcttcgccttcgttcgctttcacgacaagcgcgacgctgaggacgctatggatgccatggacggggccgtgctggacggccgcgagctgcgggtgcaaatggcgcgctacggccgccccccggactcacaccacagccgccggggaccgccaccccgcaggtacgggggcggtggctacggacgccggagccgcagccctaggcggcgtcgccgcagccgatcccggagtcggagccgttccaggtctcgcagccgatctcgctacagccgctcgaagtctcggtcccgcactcgttctcgatctcggtcgacctccaagtccagatccgcacgaaggtccaagtccaagtcctcgtcggtctccagatctcgttcgcggtccaggtcccggtctcggtccaggagtcctcccccagtgtccaagagggaatccaaatccaggtcgcgatcgaagagtccccccaagtctcctgaagaggaaggagcggtgtcctcttaagaaaatgatgtatcggcaagcagtgtaaacggaggacttggggaaaaaggaccacatagtccatcgaagaagagtccttggaacaagcaactggctattgaaaaggttattttgtaacatttgtctaactttttacttgtttaagctttgcctcagttggcaaacttcattttatgtgccattttgttgctgttattcaaatttcttgtaatttagtgaggtgaacgacttcagatttcattattggatttggatatttgaggtaaaatttcattttgttatatagtgctgactttttttgtttgaaattaaacagattggtaacctaatttgtggcctcctgacttttaaggaaaacgtgtgcagccattacacacagcctaaagctgtcaagagattgactcggcattgccttcattccttaaaattaaaaacctacaaaagttggtgtaaatttgtatatgttatttaccttcagatctaaatggtaatctgaacccaaatttgtataaagacttttcaggtgtcttatgtatttttgtgcactaggcgcagttgtgtagcagttgagtaatgctggttagctgttaaggtggcgtgttgcagtgcagagtgcttggctgtttcctgttttctcccgattgctcctgtgtaaagatgccttgtcgtgcagaaacaaatggctgtccagtttattaaaatgcctgacaactgcacttccagtcacccgggccttgcatataaataacggagcatacagtgagcacatctagctgatgataaatacacctttttttccctcttccccctaaaaatggtaaatctgatcatatctacatgtatgaacttaacatggaaaatgttaaggaagcaaatggttgtaactttgtaagtacttataacatggtgtatctttttgcttatgaatattctgtattataaccattgtttctgtagtttaattaaaacattttcttggtgttagcttttctca

SEQ ID NO: 374842 - DNA, 2309 bp, Homo sapiens
aacgtagtcccgggtggcctggcacgcgcaagcgctcggcggggagtccccaccgccaggacgcagagccgacggagctctcgggctctggcgaaagggggttgggaagcggactccggcgaagagcagtcaggaacggctggacggggccgagagacgacgcagcggagtctgagggggccggggtcacagggagaggcaaatgagggcagaagcactcttcagacggagacggggctgacggctgagcaaaaaaggggcgtgaacttggagtattggcatgaaaaaaaggtgggggcccagatggggagcacctcctcttcctcctgcccaatcgcgatcgtccggcctcccaggcggaaaaagcgtttcgcgggctttccaactgcccgctaattccgctccccctccctccagccgtgactccgcgctttttggcccgcccgccgggctgtgcgcaggcgcttcgggtaggggcggggcgcgcggcagggtcgttacgaagcggggcgcggtgggccaatcagaaggtttcatttccgggtggcgcgggcgccattttgtgaggagcgatataaacgggcgcagaggccggctgcccgcccagttgttactcaggtgcgctagcctgcggagcccgtccgtgctgttctgcggcaaggcctttcccagtgtccccacgcggaaggcaactgcctgagaggcgcggcgtcgcaccgcccagagctgaggaagccggcgccagttcgcggggctccgggccgccactcagagctatgagctacggccgcccccctcccgatgtggagggtatgacctccctcaaggtggacaacctgacctaccgcacctcgcccgacacgctgaggcgcgtcttcgagaagtacgggcgcgtcggcgacgtgtacatcccgcgggatcgctacaccaaggagtcccgcggcttcgccttcgttcgctttcacgacaagcgcgacgctgaggacgctatggatgccatggacggggccgtgctggacggccgcgagctgcgggtgcaaatggcgcgctacggccgccccccggactcacaccacagccgccggggaccgccaccccgcaggtacgggggcggtggctacggacgccggagccgcagccctaggcggcgtcgccgcagccgatcccggagtcggagccgttccaggtctcgcagccgatctcgctacagccgctcgaagtctcggtcccgcactcgttctcgatctcggtcgacctccaagtccagatccgcacgaaggtccaagtccaagtcctcgtcggtctccagatctcgttcgcggtccaggtcccggtctcggtccaggagtcctcccccagtgtccaagagggaatccaaatccaggtcgcgatcgaagagtccccccaagtctcctgaagaggaaggagcggtgtcctcttaagaaaatgatgtatcggcaagcagtgtaaacggaggacttggggaaaaaggaccacatagtccatcgaagaagagtccttggaacaagcaactggctattgaaaaggttattttgtaacatttgtctaactttttacttgtttaagctttgcctcagttggcaaacttcattttatgtgccattttgttgctgttattcaaatttcttgtaatttagtgaggtgaacgacttcagatttcattattggatttggatatttgaggtaaaatttcattttgttatatagtgctgactttttttgtttgaaattaaacagattggtaacctaatttgtggcctcctgacttttaaggaaaacgtgtgcagccattacacacagcctaaagctgtcaagagattgactcggcattgccttcattccttaaaattaaaaacctacaaaagttggtgtaaatttgtatatgttatttaccttcagatctaaatggtaatctgaacccaaatttgtataaagacttttcaggtgaaaagacttgattttttgaaaggattgtttatcaaacacaattctaatctcttctcttatgtatttttgtgcactaggcgcagttgtgtagcagttgagtaatgctggttagctgttaaggtggcgtgttgcagtgcagagtgcttggctgtttcctgttttctcccgattgctcctgtgtaaagatgccttgtcgtgcagaaacaaatggctgtccagtttattaaaatgcctgacaactgcacttccagtcacccgggccttgcatataaataacggagcatacagtgagcacatctagctgatgaattcgagatccttagagtcacctcagcatcagc

SEQ ID NO: 374843 - DNA, 2987 bp, Homo sapiens
aacgtagtcccgggtggcctggcacgcgcaagcgctcggcggggagtccccaccgccaggacgcagagccgacggagctctcgggctctggcgaaagggggttgggaagcggactccggcgaagagcagtcaggaacggctggacggggccgagagacgacgcagcggagtctgagggggccggggtcacagggagaggcaaatgagggcagaagcactcttcagacggagacggggctgacggctgagcaaaaaaggggcgtgaacttggagtattggcatgaaaaaaaggtgggggcccagatggggagcacctcctcttcctcctgcccaatcgcgatcgtccggcctcccaggcggaaaaagcgtttcgcgggctttccaactgcccgctaattccgctccccctccctccagccgtgactccgcgctttttggcccgcccgccgggctgtgcgcaggcgcttcgggtaggggcggggcgcgcggcagggtcgttacgaagcggggcgcggtgggccaatcagaaggtttcatttccgggtggcgcgggcgccattttgtgaggagcgatataaacgggcgcagaggccggctgcccgcccagttgttactcaggtgcgctagcctgcggagcccgtccgtgctgttctgcggcaaggcctttcccagtgtccccacgcggaaggcaactgcctgagaggcgcggcgtcgcaccgcccagagctgaggaagccggcgccagttcgcggggctccgggccgccactcagagctatgagctacggccgcccccctcccgatgtggagggtatgacctccctcaaggtggacaacctgacctaccgcacctcgcccgacacgctgaggcgcgtcttcgagaagtacgggcgcgtcggcgacgtgtacatcccgcgggatcgctacaccaaggagtcccgcggcttcgccttcgttcgctttcacgacaagcgcgacgctgaggacgctatggatgccatggacggggccgtgctggacggccgcgagctgcgggtgcaaatggcgcgctacggccgccccccggactcacaccacagccgccggggaccgccaccccgcaggtacgggggcggtggctacggacgccggagccgcagccctaggcggcgtcgccgcagccgatcccggagtcggagccgttccaggtctcgcagccgatctcgctacagccgctcgaagtctcggtcccgcactcgttctcgatctcggtcgacctccaagtccagatccgcacgaaggtccaagtccaagtcctcgtcggtctccagatctcgttcgcggtccaggtcccggtctcggtccaggagtcctcccccagtgtccaagagggaatccaaatccaggtcgcgatcgaagagtccccccaagtctcctgaagaggaaggagcggtgtcctcttaagaaaatggtaatgtctgggaatccgagacacataaccctaattcataaatgggatttggggtaggtctttttgagtcgtgttaatgtaagaatgactcctatcattaggagtgctgctcggaggttactcacctttgggagtaatactgaagagaggggtctgcagaaaggatgtgtatgaagcttagataataatggctgtttcgtaaactgtttgagacctattaatgaaaatgactatttcttgctgtttttatccaacgtctgcattttccccctttaaagctgcggtctcctgtttgataaaagaatattggccagtattgcagattttaactgatttggctgatcctccagggaccagtttctgtgggcgtgtattggagcaggtttgtctttaaatgttaaagatgcactatcctcttagagaaacaatcagttcaactattgttgtactgactgggacttcatattctaatggatgtggcaaaagaattgcaataagaagcagtgaacatttggaaccccaaaagaaagttacaggtattgcactgggtggggaaaggatagtgtgtctttaactcttaaattgtttggtcctattttttaaaaaggaaagggccctaagtagctcagatattaaagtagtattctcaattaccaaatgtttcatttgaaacaatttatcttaatgaaatatagaccaattctctgatctcgagttgtttttgtttggatacagcccttttttttttctttttttttcttccccttacctttcttcaccttggttatttggccaggaatacgtaaattcaaacttgtacatgctgatggtagcctttgtgaaattttcctaattgggccttttaaaaacatggctgggtggaacatttctgtaccctactggtttgaccagagccttagtaagtacgtgcctgaaactgaaaccatgtgcactttaatggaaggtaagctgaacttctttcttttcaaacctagatgtatcggcaagcagtgtaaacggaggacttggggaaaaaggaccacatagtccatcgaagaagagtccttggaacaagcaactggctattgaaaaggcgcagttgtgtagcagttgagtaatgctggttagctgttaaggtggcgtgttgcagtgcagagtgcttggctgtttcctgttttctcccgattgctcctgtgtaaagatgccttgtcgtgcagaaacaaatggctgtccagtttattaaaatgcctgacaactgcacttccagtcacccgggccttgcatataaataacggagcatacagtgagcacatctagctgatgataaatacacctttttttccctcttccccctaaaaatggtaaatctgatcatatctacatgtatgaacttaacatggaaaatgttaaggaagcaaatggttgtaactttgtaagtacttataacatggtgtatctttttgcttatgaatattctgtattataaccattgtttctgtagtttaattaaaacattttcttggtgttagcttttctca

SEQ ID NO: 374844 - DNA, 2054 bp, Homo sapiens
aacgtagtcccgggtggcctggcacgcgcaagcgctcggcggggagtccccaccgccaggacgcagagccgacggagctctcgggctctggcgaaagggggttgggaagcggactccggcgaagagcagtcaggaacggctggacggggccgagagacgacgcagcggagtctgagggggccggggtcacagggagaggcaaatgagggcagaagcactcttcagacggagacggggctgacggctgagcaaaaaaggggcgtgaacttggagtattggcatgaaaaaaaggtgggggcccagatggggagcacctcctcttcctcctgcccaatcgcgatcgtccggcctcccaggcggaaaaagcgtttcgcgggctttccaactgcccgctaattccgctccccctccctccagccgtgactccgcgctttttggcccgcccgccgggctgtgcgcaggcgcttcgggtaggggcggggcgcgcggcagggtcgttacgaagcggggcgcggtgggccaatcagaaggtttcatttccgggtggcgcgggcgccattttgtgaggagcgatataaacgggcgcagaggccggctgcccgcccagttgttactcaggtgcgctagcctgcggagcccgtccgtgctgttctgcggcaaggcctttcccagtgtccccacgcggaaggcaactgcctgagaggcgcggcgtcgcaccgcccagagctgaggaagccggcgccagttcgcggggctccgggccgccactcagagctatgagctacggccgcccccctcccgatgtggagggtatgacctccctcaaggtggacaacctgacctaccgcacctcgcccgacacgctgaggcgcgtcttcgagaagtacgggcgcgtcggcgacgtgtacatcccgcgggatcgctacaccaaggagtcccgcggcttcgccttcgttcgctttcacgacaagcgcgacgctgaggacgctatggatgccatggacggggccgtgctggacggccgcgagctgcgggtgcaaatggcgcgctacggccgccccccggactcacaccacagccgccggggaccgccaccccgcaggtacgggggcggtggctacggacgccggagccgcagccctaggcggcgtcgccgcagccgatcccggagtcggagccgttccaggtctcgcagccgatctcgctacagccgctcgaagtctcggtcccgcactcgttctcgatctcggtcgacctccaagtccagatccgcacgaaggtccaagtccaagtcctcgtcggtctccagatctcgttcgcggtccaggtcccggtctcggtccaggagtcctcccccagtgtccaagagggaatccaaatccaggtcgcgatcgaagagtccccccaagtctcctgaagaggaaggagcggtgtcctcttaagaaaatgatgtatcggcaagcagtgtaaacggaggacttggggaaaaaggaccacatagtccatcgaagaagagtccttggaacaagcaactggctattgaaaaggttattttgtaacatttgtctaactttttacttgtttaagctttgcctcagttggcaaacttcattttatgtgccattttgttgctgttattcaaatttcttgtaatttagtgaggtgaacgacttcagatttcattattggatttggatatttgaggtaaaatttcattttgttatatagtgctgactttttttgtttgaaattaaacagattggtaacctaatttgtggcctcctgacttttaaggaaaacgtgtgcagccattacacacagcctaaagctgtcaagagattgactcggcattgccttcattccttaaagtgctacaacgtggggtaactggttatgttatacctcagaattaagggtatttgaccaattggttaggacttcgggaagaatgactttgaagggtgtttaacaaattaactcactatgttgggcagagcaagttaaaggtagtgtatgggtgaggaagagtcgttccaccgttgtgtaagaggatg

SEQ ID NO: 374845 - DNA, 1770 bp, Homo sapiens
aacgtagtcccgggtggcctggcacgcgcaagcgctcggcggggagtccccaccgccaggacgcagagccgacggagctctcgggctctggcgaaagggggttgggaagcggactccggcgaagagcagtcaggaacggctggacggggccgagagacgacgcagcggagtctgagggggccggggtcacagggagaggcaaatgagggcagaagcactcttcagacggagacggggctgacggctgagcaaaaaaggggcgtgaacttggagtattggcatgaaaaaaaggtgggggcccagatggggagcacctcctcttcctcctgcccaatcgcgatcgtccggcctcccaggcggaaaaagcgtttcgcgggctttccaactgcccgctaattccgctccccctccctccagccgtgactccgcgctttttggcccgcccgccgggctgtgcgcaggcgcttcgggtaggggcggggcgcgcggcagggtcgttacgaagcggggcgcggtgggccaatcagaaggtttcatttccgggtggcgcgggcgccattttgtgaggagcgatataaacgggcgcagaggccggctgcccgcccagttgttactcaggtgcgctagcctgcggagcccgtccgtgctgttctgcggcaaggcctttcccagtgtccccacgcggaaggcaactgcctgagaggcgcggcgtcgcaccgcccagagctgaggaagccggcgccagttcgcggggctccgggccgccactcagagctatgagctacggccgcccccctcccgatgtggagggtatgacctccctcaaggtggacaacctgacctaccgcacctcgcccgacacgctgaggcgcgtcttcgagaagtacgggcgcgtcggcgacgtgtacatcccgcgggatcgctacaccaaggagtcccgcggcttcgccttcgttcgctttcacgacaagcgcgacgctgaggacgctatggatgccatggacggggccgtgctggacggccgcgagctgcgggtgcaaatggcgcgctacggccgccccccggactcacaccacagccgccggggaccgccaccccgcaggtacgggggcggtggctacggacgccggagccgcagccctaggcggcgtcgccgcagccgatcccggagtcggagccgttccaggtctcgcagccgatctcgctacagccgctcgaagtctcggtcccgcactcgttctcgatctcggtcgacctccaagtccagatccgcacgaaggtccaagtccaagtcctcgtcggtctccagatctcgttcgcggtccaggtcccggtctcggtccaggagtcctcccccagtgtccaagagggaatccaaatccaggtcgcgatcgaagagtccccccaagtctcctgaagaggaaggagcggtgtcctcttaagaaaatgatgtatcggcaagcagtgtaaacggaggacttggggaaaaaggaccacatagtccatcgaagaagagtccttggaacaagcaactggctattgaaaaggttattttgtaacatttgtctaactttttacttgtttaagctttgcctcagttggcaaacttcattttatgtgccattttgttgctgttattcaaatttcttgtaatttagtgaggtgaacgacttcagatttcattattggatttggatatttgaggtaaaatttcattttgttatatagtgctgactttttttgtttgaaattaaacagattggtaaccta

SEQ ID NO: 374846 - DNA, 1781 bp, Homo sapiens
aacgtagtcccgggtggcctggcacgcgcaagcgctcggcggggagtccccaccgccaggacgcagagccgacggagctctcgggctctggcgaaagggggttgggaagcggactccggcgaagagcagtcaggaacggctggacggggccgagagacgacgcagcggagtctgagggggccggggtcacagggagaggcaaatgagggcagaagcactcttcagacggagacggggctgacggctgagcaaaaaaggggcgtgaacttggagtattggcatgaaaaaaaggtgggggcccagatggggagcacctcctcttcctcctgcccaatcgcgatcgtccggcctcccaggcggaaaaagcgtttcgcgggctttccaactgcccgctaattccgctccccctccctccagccgtgactccgcgctttttggcccgcccgccgggctgtgcgcaggcgcttcgggtaggggcggggcgcgcggcagggtcgttacgaagcggggcgcggtgggccaatcagaaggtttcatttccgggtggcgcgggcgccattttgtgaggagcgatataaacgggcgcagaggccggctgcccgcccagttgttactcaggtgcgctagcctgcggagcccgtccgtgctgttctgcggcaaggcctttcccagtgtccccacgcggaaggcaactgcctgagaggcgcggcgtcgcaccgcccagagctgaggaagccggcgccagttcgcggggctccgggccgccactcagagctatgagctacggccgcccccctcccgatgtggagggtatgacctccctcaaggtggacaacctgacctaccgcacctcgcccgacacgctgaggcgcgtcttcgagaagtacgggcgcgtcggcgacgtgtacatcccgcgggatcgctacaccaaggagtcccgcggcttcgccttcgttcgctttcacgacaagcgcgacgctgaggacgctatggatgccatggacggggccgtgctggacggccgcgagctgcgggtgcaaatggcgcgctacggccgccccccggactcacaccacagccgccggggaccgccaccccgcaggtacgggggcggtggctacggacgccggagccgcagccctaggcggcgtcgccgcagccgatcccggagtcggagccgttccaggtctcgcagccgatctcgctacagccgctcgaagtctcggtcccgcactcgttctcgatctcggtcgacctccaagtccagatccgcacgaaggtccaagtccaagtcctcgtcggtctccagatctcgttcgcggtccaggtcccggtctcggtccaggagtcctcccccagtgtccaagagggaatccaaatccaggtcgcgatcgaagagtccccccaagtctcctgaagaggaaggagcggtgtcctcttaagaaaatgatgtatcggcaagcagtgtaaacggaggacttggggaaaaaggaccacatagtccatcgaagaagagtccttggaacaagcaactggctattgaaaaggttattttgtaacatttgtctaactttttacttgtttaagctttgcctcagttggcaaacttcattttatgtgccattttgttgctgttattcaaatttcttgtaatttagtgaggtgaacgacttcagatttcattattggatttggatatttgaggtaaaatttcattttgttatatagtgctgacttacccgcgtgtttgttaatacagtatgcccccccccctccctcca

SEQ ID NO: 374847 - DNA, 1936 bp, Homo sapiens
aacgtagtcccgggtggcctggcacgcgcaagcgctcggcggggagtccccaccgccaggacgcagagccgacggagctctcgggctctggcgaaagggggttgggaagcggactccggcgaagagcagtcaggaacggctggacggggccgagagacgacgcagcggagtctgagggggccggggtcacagggagaggcaaatgagggcagaagcactcttcagacggagacggggctgacggctgagcaaaaaaggggcgtgaacttggagtattggcatgaaaaaaaggtgggggcccagatggggagcacctcctcttcctcctgcccaatcgcgatcgtccggcctcccaggcggaaaaagcgtttcgcgggctttccaactgcccgctaattccgctccccctccctccagccgtgactccgcgctttttggcccgcccgccgggctgtgcgcaggcgcttcgggtaggggcggggcgcgcggcagggtcgttacgaagcggggcgcggtgggccaatcagaaggtttcatttccgggtggcgcgggcgccattttgtgaggagcgatataaacgggcgcagaggccggctgcccgcccagttgttactcaggtgcgctagcctgcggagcccgtccgtgctgttctgcggcaaggcctttcccagtgtccccacgcggaaggcaactgcctgagaggcgcggcgtcgcaccgcccagagctgaggaagccggcgccagttcgcggggctccgggccgccactcagagctatgagctacggccgcccccctcccgatgtggagggtatgacctccctcaaggtggacaacctgacctaccgcacctcgcccgacacgctgaggcgcgtcttcgagaagtacgggcgcgtcggcgacgtgtacatcccgcgggatcgctacaccaaggagtcccgcggcttcgccttcgttcgctttcacgacaagcgcgacgctgaggacgctatggatgccatggacggggccgtgctggacggccgcgagctgcgggtgcaaatggcgcgctacggccgccccccggactcacaccacagccgccggggaccgccaccccgcaggtacgggggcggtggctacggacgccggagccgcagccctaggcggcgtcgccgcagccgatcccggagtcggagccgttccaggtctcgcagccgatctcgctacagccgctcgaagtctcggtcccgcactcgttctcgatctcggtcgacctccaagtccagatccgcacgaaggtccaagtccaagtcctcgtcggtctccagatctcgttcgcggtccaggtcccggtctcggtccaggagtcctcccccagtgtccaagagggaatccaaatccaggtcgcgatcgaagagtccccccaagtctcctgaagaggaaggagcggtgtcctcttaagaaaatgatgtatcggcaagcagtgtaaacggaggacttggggaaaaaggaccacatagtccatcgaagaagagtccttggaacaagcaactggctattgaaaaggcgcagttgtgtagcagttgagtaatgctggttagctgttaaggtggcgtgttgcagtgcagagtgcttggctgtttcctgttttctcccgattgctcctgtgtaaagatgccttgtcgtgcagccactgatctttttattgtctctgtagttttgccttttccagaatgtcatatagttgggatcatacagtgtgtagccattttagactggcttctttcacctagcaatatgcatttcaagttcttttcattgctcaattctttttatcactgagtgatagtccattgtatggctgtaccacagcttgtttatccattctcctatgaaaggacacctcgattgcttccagtttttgacaattatgaataaaactgctatagacactt

SEQ ID NO: 374848 - DNA, 2818 bp, Homo sapiens
aacgtagtcccgggtggcctggcacgcgcaagcgctcggcggggagtccccaccgccaggacgcagagccgacggagctctcgggctctggcgaaagggggttgggaagcggactccggcgaagagcagtcaggaacggctggacggggccgagagacgacgcagcggagtctgagggggccggggtcacagggagaggcaaatgagggcagaagcactcttcagacggagacggggctgacggctgagcaaaaaaggggcgtgaacttggagtattggcatgaaaaaaaggtgggggcccagatggggagcacctcctcttcctcctgcccaatcgcgatcgtccggcctcccaggcggaaaaagcgtttcgcgggctttccaactgcccgctaattccgctccccctccctccagccgtgactccgcgctttttggcccgcccgccgggctgtgcgcaggcgcttcgggtaggggcggggcgcgcggcagggtcgttacgaagcggggcgcggtgggccaatcagaaggtttcatttccgggtggcgcgggcgccattttgtgaggagcgatataaacgggcgcagaggccggctgcccgcccagttgttactcaggtgcgctagcctgcggagcccgtccgtgctgttctgcggcaaggcctttcccagtgtccccacgcggaaggcaactgcctgagaggcgcggcgtcgcaccgcccagagctgaggaagccggcgccagttcgcggggctccgggccgccactcagagctatgagctacggccgcccccctcccgatgtggagggtatgacctccctcaaggtggacaacctgacctaccgcacctcgcccgacacgctgaggcgcgtcttcgagaagtacgggcgcgtcggcgacgtgtacatcccgcgggatcgctacaccaaggagtcccgcggcttcgccttcgttcgctttcacgacaagcgcgacgctgaggacgctatggatgccatggacggggccgtgctggacggccgcgagctgcgggtgcaaatggcgcgctacggccgccccccggactcacaccacagccgccggggaccgccaccccgcaggtacgggggcggtggctacggacgccggagccgcagccctaggcggcgtcgccgcagccgatcccggagtcggagccgttccaggtctcgcagccgatctcgctacagccgctcgaagtctcggtcccgcactcgttctcgatctcggtcgacctccaagtccagatccgcacgaaggtccaagtccaagtcctcgtcggtctccagatctcgttcgcggtccaggtcccggtctcggtccaggagtcctcccccagtgtccaagagggaatccaaatccaggtcgcgatcgaagagtccccccaagtctcctgaagaggaaggagcggtgtcctcttaagaaaatggtaatgtctgggaatccgagacacataaccctaattcataaatgggatttggggtaggtctttttgagtcgtgttaatgtaagaatgactcctatcattaggagtgctgctcggaggttactcacctttgggagtaatactgaagagaggggtctgcagaaaggatgtgtatgaagcttagataataatggctgtttcgtaaactgtttgagacctattaatgaaaatgactatttcttgctgtttttatccaacgtctgcattttccccctttaaagctgcggtctcctgtttgataaaagaatattggccagtattgcagattttaactgatttggctgatcctccagggaccagtttctgtgggcgtgtattggagcaggtttgtctttaaatgttaaagatgcactatcctcttagagaaacaatcagttcaactattgttgtactgactgggacttcatattctaatggatgtggcaaaagaattgcaataagaagcagtgaacatttggaaccccaaaagaaagttacaggtattgcactgggtggggaaaggatagtgtgtctttaactcttaaattgtttggtcctattttttaaaaaggaaagggccctaagtagctcagatattaaagtagtattctcaattaccaaatgtttcatttgaaacaatttatcttaatgaaatatagaccaattctctgatctcgagttgtttttgtttggatacagcccttttttttttctttttttttcttccccttacctttcttcaccttggttatttggccaggaatacgtaaattcaaacttgtacatgctgatggtagcctttgtgaaattttcctaattgggccttttaaaaacatggctgggtggaacatttctgtaccctactggtttgaccagagccttagtaagtacgtgcctgaaactgaaaccatgtgcactttaatggaaggtaagctgaacttctttcttttcaaacctagatgtatcggcaagcagtgtaaacggaggacttggggaaaaaggaccacatagtccatcgaagaagagtccttggaacaagcaactggctattgaaaaggttattttgtaacatttgtctaactttttacttgtttaagctttgcctcagttggcaaacttcattttatgtgccattttgttgctgttattcaaatttcttgtaatttagtgaggtgaacgacttcagatttcattattggatttggatatttgaggtaaaatttcattttgttatatagtgctgactttttttgtttgaaattaaacagattggtaacctataaaaaaataaaattataaaaaataattggccgcggtttacacgtcggaatgt

SEQ ID NO: 374849 - DNA, 2341 bp, Homo sapiens
gtgcgacggtggatgctcccggagtggaggccgggtgtggtcacgcaggactgatctagagatcagccgctcgaagtctcggtcccgcactcgttctcgatctcggtcgacctccaagtccagatccgcacgaaggtccaagtccaagtcctcgtcggtctccagatctcgttcgcggtccaggtcccggtctcggtccaggagtcctcccccagtgtccaagagggaatccaaatccaggtcgcgatcgaagagtccccccaagtctcctgaagaggaaggagcggtgtcctcttaagaaaatggtaatgtctgggaatccgagacacataaccctaattcataaatgggatttggggtaggtctttttgagtcgtgttaatgtaagaatgactcctatcattaggagtgctgctcggaggttactcacctttgggagtaatactgaagagaggggtctgcagaaaggatgtgtatgaagcttagataataatggctgtttcgtaaactgtttgagacctattaatgaaaatgactatttcttgctgtttttatccaacgtctgcattttccccctttaaagctgcggtctcctgtttgataaaagaatattggccagtattgcagattttaactgatttggctgatcctccagggaccagtttctgtgggcgtgtattggagcaggtttgtctttaaatgttaaagatgcactatcctcttagagaaacaatcagttcaactattgttgtactgactgggacttcatattctaatggatgtggcaaaagaattgcaataagaagcagtgaacatttggaaccccaaaagaaagttacaggtattgcactgggtggggaaaggatagtgtgtctttaactcttaaattgtttggtcctattttttaaaaaggaaagggccctaagtagctcagatattaaagtagtattctcaattaccaaatgtttcatttgaaacaatttatcttaatgaaatatagaccaattctctgatctcgagttgtttttgtttggatacagcccttttttttttctttttttttcttccccttacctttcttcaccttggttatttggccaggaatacgtaaattcaaacttgtacatgctgatggtagcctttgtgaaattttcctaattgggccttttaaaaacatggctgggtggaacatttctgtaccctactggtttgaccagagccttagtaagtacgtgcctgaaactgaaaccatgtgcactttaatggaaggtaagctgaacttctttcttttcaaacctagatgtatcggcaagcagtgtaaacggaggacttggggaaaaaggaccacatagtccatcgaagaagagtccttggaacaagcaactggctattgaaaaggttattttgtaacatttgtctaactttttacttgtttaagctttgcctcagttggcaaacttcattttatgtgccattttgttgctgttattcaaatttcttgtaatttagtgaggtgaacgacttcagatttcattattggatttggatatttgaggtaaaatttcattttgttatatagtgctgactttttttgtttgaaattaaacagattggtaacctaatttgtggcctcctgacttttaaggaaaacgtgtgcagccattacacacagcctaaagctgtcaagagattgactcggcattgccttcattccttaaaattaaaaacctacaaaagttggtgtaaatttgtatatgttatttaccttcagatctaaatggtaatctgaacccaaatttgtataaagacttttcaggtgaaaagacttgattttttgaaaggattgtttatcaaacacaattctaatctcttctcttatgtatttttgtgcactaggcgcagttgtgtagcagttgagtaatgctggttagctgttaaggtggcgtgttgcagtgcagagtgcttggctgtttcctgttttctcccgattgctcctgtgtaaagatgccttgtcgtgcagaaacaaatggctgtccagtttattaaaatgcctgacaactgcacttccagtcacccgggccttgcatataaataacggagcatacagtgagcacatctagctgatgataaatacacctttttttccctcttccccctaaaaatggtaaatctgatcatatctacatgtatgaacttaacatggaaaatgttaaggaagcaaatggttgtaactttgtaagtacttataacatggtgtatctttttgcttatgaatattctgtattataaccattgtttctgtagtttaattaaaacattttcttggtgttagcttttctca

SEQ ID NO: 374850 - DNA, 2799 bp, Homo sapiens
aacgtagtcccgggtggcctggcacgcgcaagcgctcggcggggagtccccaccgccaggacgcagagccgacggagctctcgggctctggcgaaagggggttgggaagcggactccggcgaagagcagtcaggaacggctggacggggccgagagacgacgcagcggagtctgagggggccggggtcacagggagaggcaaatgagggcagaagcactcttcagacggagacggggctgacggctgagcaaaaaaggggcgtgaacttggagtattggcatgaaaaaaaggtgggggcccagatggggagcacctcctcttcctcctgcccaatcgcgatcgtccggcctcccaggcggaaaaagcgtttcgcgggctttccaactgcccgctaattccgctccccctccctccagccgtgactccgcgctttttggcccgcccgccgggctgtgcgcaggcgcttcgggtaggggcggggcgcgcggcagggtcgttacgaagcggggcgcggtgggccaatcagaaggtttcatttccgggtggcgcgggcgccattttgtgaggagcgatataaacgggcgcagaggccggctgcccgcccagttgttactcaggtgcgctagcctgcggagcccgtccgtgctgttctgcggcaaggcctttcccagttgtccaagagggaatccaaatccaggtcgcgatcgaagagtccccccaagtctcctgaagaggaaggagcggtgtcctcttaagaaaatggtaatgtctgggaatccgagacacataaccctaattcataaatgggatttggggtaggtctttttgagtcgtgttaatgtaagaatgactcctatcattaggagtgctgctcggaggttactcacctttgggagtaatactgaagagaggggtctgcagaaaggatgtgtatgaagcttagataataatggctgtttcgtaaactgtttgagacctattaatgaaaatgactatttcttgctgtttttatccaacgtctgcattttccccctttaaagctgcggtctcctgtttgataaaagaatattggccagtattgcagattttaactgatttggctgatcctccagggaccagtttctgtgggcgtgtattggagcaggtttgtctttaaatgttaaagatgcactatcctcttagagaaacaatcagttcaactattgttgtactgactgggacttcatattctaatggatgtggcaaaagaattgcaataagaagcagtgaacatttggaaccccaaaagaaagttacaggtattgcactgggtggggaaaggatagtgtgtctttaactcttaaattgtttggtcctattttttaaaaaggaaagggccctaagtagctcagatattaaagtagtattctcaattaccaaatgtttcatttgaaacaatttatcttaatgaaatatagaccaattctctgatctcgagttgtttttgtttggatacagcccttttttttttctttttttttcttccccttacctttcttcaccttggttatttggccaggaatacgtaaattcaaacttgtacatgctgatggtagcctttgtgaaattttcctaattgggccttttaaaaacatggctgggtggaacatttctgtaccctactggtttgaccagagccttagtaagtacgtgcctgaaactgaaaccatgtgcactttaatggaaggtaagctgaacttctttcttttcaaacctagatgtatcggcaagcagtgtaaacggaggacttggggaaaaaggaccacatagtccatcgaagaagagtccttggaacaagcaactggctattgaaaaggttattttgtaacatttgtctaactttttacttgtttaagctttgcctcagttggcaaacttcattttatgtgccattttgttgctgttattcaaatttcttgtaatttagtgaggtgaacgacttcagatttcattattggatttggatatttgaggtaaaatttcattttgttatatagtgctgactttttttgtttgaaattaaacagattggtaacctaatttgtggcctcctgacttttaaggaaaacgtgtgcagccattacacacagcctaaagctgtcaagagattgactcggcattgccttcattccttaaaattaaaaacctacaaaagttggtgtaaatttgtatatgttatttaccttcagatctaaatggtaatctgaacccaaatttgtataaagacttttcaggtgaaaagacttgattttttgaaaggattgtttatcaaacacaattctaatctcttctcttatgtatttttgtgcactaggcgcagttgtgtagcagttgagtaatgctggttagctgttaaggtggcgtgttgcagtgcagagtgcttggctgtttcctgttttctcccgattgctcctgtgtaaagatgccttgtcgtgcagaaacaaatggctgtccagtttattaaaatgcctgacaactgcacttccagtcacccgggccttgcatataaataacggagcatacagtgagcacatctagctgatgataaatacacctttttttccctcttccccctaaaaatggtaaatctgatcatatctacatgtatgaacttaacatggaaaatgttaaggaagcaaatggttgtaactttgtaagtacttataacatggtgtatctttttgcttatgaatattctgtattataaccattgtttctgtagtttaattaaaacattttcttggtgttagcttttctca

SEQ ID NO: 374851 - DNA, 2023 bp, Homo sapiens
aacgtagtcccgggtggcctggcacgcgcaagcgctcggcggggagtccccaccgccaggacgcagagccgacggagctctcgggctctggcgaaagggggttgggaagcggactccggcgaagagcagtcaggaacggctggacggggccgagagacgacgcagcggagtctgagggggccggggtcacagggagaggcaaatgagggcagaagcactcttcagacggagacggggctgacggctgagcaaaaaaggggcgtgaacttggagtattggcatgaaaaaaaggtgggggcccagatggggagcacctcctcttcctcctgcccaatcgcgatcgtccggcctcccaggcggaaaaagcgtttcgcgggctttccaactgcccgctaattccgctccccctccctccagccgtgactccgcgctttttggcccgcccgccgggctgtgcgcaggcgcttcgggtaggggcggggcgcgcggcagggtcgttacgaagcggggcgcggtgggccaatcagaaggtttcatttccgggtggcgcgggcgccattttgtgaggagcgatataaacgggcgcagaggccggctgcccgcccagttgttactcaggtgcgctagcctgcggagcccgtccgtgctgttctgcggcaaggcctttcccagtgtccccacgcggaaggcaactgcctgagaggcgcggcgtcgcaccgcccagagctgaggaagccggcgccagttcgcggggctccgggccgccactcagagctatgagctacggccgcccccctcccgatgtggagggtatgacctccctcaaggtggacaacctgacctaccgcacctcgcccgacacgctgaggcgcgtcttcgagaagtacgggcgcgtcggcgacgtgtacatcccgcgggatcgctacaccaaggagtcccgcggcttcgccttcgttcgctttcacgacaagcgcgacgctgaggacgctatggatgccatggacggggccgtgctggacggccgcgagctgcgggtgcaaatggcgcgctacggccgccccccggactcacaccacagccgccggggaccgccaccccgcaggtacgggggcggtggctacggacgccggagccgcagccctaggcggcgtcgccgcagccgatcccggagtcggagccgttccaggtctcgcagccgatctcgctacagccgctcgaagtctcggtcccgcactcgttctcgatctcggtcgacctccaagtccagatccgcacgaaggtccaagtccaagtcctcgtcggtctccagatctcgttcgcggtccaggtcccggtctcggtccaggagtcctcccccagtgtccaagagggaatccaaatccaggtcgcgatcgaagagtccccccaagtctcctgaagaggaaggagcggtgtcctcttaagaaaatggtaatgtctgggaatccgagacacataaccctaattcataaatgggatttggggtaggtctttttgagtcgtgttaatgtaagaatgactcctatcattaggagtgctgctcggaggttactcacctttgggagtaatactgaagagaggggtctgcagaaaggatgtgtatgaagcttagataataatggctgtttcgtaaactgtttgagacctattaatgaaaatgactatttcttgctgtttttatccaacgtctgcattttccccctttaaagctgcggtctcctgtttgataaaagaatattggccagtattgcagattttaactgatttggctgatcctccagggaccagtttctgtgggcgtgtattggagcaggtctttaactcttaaattgtttggtcctattttttaaaaaggaaagggccctaagtagctcagatattaaagtagtattctcaattaccaaatgtttcatttgaaacaatttatcttaatgaaatatagaccaattctctgatctcgagttgtttaactttggagcagccattagtacagccattaagcgag

SEQ ID NO: 374852 - DNA, 1357 bp, Homo sapiens
agctacatacactctaagtctggggcccgcgctcgttctcgtatctcagtctagctctaagtgcagatccggacgatccgtcctacattacatagtcgctctgtcagtgtcttccacgaatcatcgataacgcgcgcgcgcaggggtcacccggatgctgctgtgctcgcaagcggagaatcctccactcgcgaggtgtcccgaagggatgcggtaatctcgaggatactcatcgatcgacggaatgctgacagagctgcaccctccaatgtttcctggaagacggcacggccccgggtgtcctcttaagaaaatgatgtatcggcaagcagtgtaaacggaggacttggggaaaaaggaccacatagtccatcgaagaagagtccttggaacaagcaactggctattgaaaaggttattttgtaacatttgtctaactttttacttgtttaagctttgcctcagttggcaaacttcattttatgtgccattttgttgctgttattcaaatttcttgtaatttagtgaggtgaacgacttcagatttcattattggatttggatatttgaggtaaaatttcattttgttatatagtgctgactttttttgtttgaaattaaacagattggtaacctaatttgtggcctcctgacttttaaggaaaacgtgtgcagccattacacacagcctaaagctgtcaagagattgactcggcattgccttcattccttaaaattaaaaacctacaaaagttggtgtaaatttgtatatgttatttaccttcagatctaaatggtaatctgaacccaaatttgtataaagacttttcaggtgaaaagacttgattttttgaaaggattgtttatcaaacacaattctaatctcttctcttatgtatttttgtgcactaggcgcagttgtgtagcagttgagtaatgctggttagctgttaaggtggcgtgttgcagtgcagagtgcttggctgtttcctgttttctcccgattgctcctgtgtaaagatgccttgtcgtgcagaaacaaatggctgtccagtttattaaaatgcctgacaactgcacttccagtcacccgggccttgcatataaataacggagcatacagtgagcacatctagctgatgataaatacacctttttttccctcttccccctaaaaatggtaaatctgatcatatctacatgtatgaacttaacatggaaaatgttaaggaagcaaatggttgtaactttgtaagtacttataacatggtgtatctttttgcttatgaatattctgtattataaccattgtttctgtagtttaattaaaacattttcttggtgttagcttttctca

SEQ ID NO: 374853 - DNA, 1221 bp, Homo sapiens
ttttttttttttgtatttttagtagagacagggtttcactacgttggccaggctggtctcaaactcctgatctcgtgatctgcctgccttggcctcccgaagtgctgggatcacaggtgtgacccactgcgcccggccttatctgtctctttaagatcctattgcatttgggatcctgtagtattatgccactgcctatttacctaataatatatattgaacatctttccatgtcagtacacagatctctgcttaattcatttgaatgttcttctgtagtattcatacataatttatgttatcattttcctgttgaagaataggtaggtgttttccagttcttcagtattgcaaacaccactacattgaacatctttgtatccatgtgcaaatattcccgcaacatactgtgctagctgttcagccacatcacctttatgaaattctcacaggaacctgtgaaggctataggtaatttgccacattccacagatgagaaaaaggctaagagagcttacatgtcttgcctgaggtctcacaactcataaatgacggagcctaattgaagtaaagatctgtctgacagcagaactcaagtattttctctgataccacgatttacaattgtggtatatgattcatatatgtgtttaaatgtaaacatataaaccacatgtttataaattactcattttttttctttttcttagatgatttcacaaaagttcatcttcattgcagatacctgcctttctttctaggttgtatctcccacttcacccttctagaccatcccagaagatctataagatttcatctgggaaatcactaggagttcttggaagggaaagaaggaagattgtgtaagtcaaaggaattgtttcctctgtcacaccataagaataatggaagactattttttgcatccttatcttactagcactccctgctgcactttacactgtagattatacctttttcttcttggaacgctcatcatctttggcatccaaaataacattcttctaattctgttatggctactcttaacatttttgtttcatttgtggtctctgtgcatcccttaaatgcctttcgtccttaggttttccagaattccatacttgaagttcttcctctcttctccctgatttcattggccctcgtagtgtccactaccagctatgtgatgttactctcagatctccatttctggctttt

SEQ ID NO: 374854 - DNA, 1100 bp, Homo sapiens
atcatttgattatggaacattctaaaacttagacaagacgattgtgattggctgaagggcatacgccctcctccagggtgacgtgtctgcctatggatatcagttgccagagaaacctggctttactatggcggttggaggaacggcagtgatcacacgtcggctgctgggaagatctggattctcgtttcaggtcaccatcagaaaagctaagtttgctgtatagtgaggatcaggagatctgatcctgattgcagaaccttccctgattacagaatcttggatgatttcacaaaagttcatcttcattgcagatacctgcctttctttctaggttgtatctcccacttcacccttctagaccatcccagaagggtgaagtggcagatacctgcctttctttctaggttgtatctcccacttcacccttctagatcttctgggttgagctgcgctggccagagatgcctgcccacagcctggtgatgagcagcccggccctcccggccttcctgctctgcagcacgctgctggtcatcaagatgtacgtggtggccatcatcacgggccaagtgaggctgcggaagaaggcctttgccaaccccgaggatgccctgagacacggaggcccccagtattgcaggagcgacccgacgtggaacgctgcctcagggcccaccggaacgacatggagaccatctaccccttccttttcctgggcttcgtctactcctttctgggtcctaacccttttgtcgcctggatgcacttcctggtcttcctcgtgggccgtgtggcacacaccgtggcctactggggaagctgcgggcacccatccgctccgtgacctacacctggccagctccctgcgcctccatggctctgcagatcctctgggaagcggccgccacctgtgaccagcagctgatgcctccttggcaccagaccatgcgccaagagccggcgtggctatacctggggacttgatgttcccttcagaattggggtgggccctgaagtcctcggttccctggcggcttgtttgccgtgtgggtctctgggcgcagtggcctgtgtgtgtgccccgtgttgttcttgcg

SEQ ID NO: 374855 - DNA, 2038 bp, Homo sapiens
atcatttgattatggaacattctaaaacttagacaagacgattgtgattggctgaagggcatacgccctcctccagggtgacgtgtctgcctatggatatcagttgccagagaaacctggctttactatggcggttggaggaacggcagtgatcacacgtcggctgctgggaagatctggattctcgtttcaggtcaccatcagaaaagctaagtttgctgtatagtgaggatcaggagatctgatcctgattgcagaaccttccctgattacagaatcttgggattgttgagaggattacatgtaaagtaccaggacagtgcatggcacatatgatttcacaaaagttcatcttcattgcagatacctgcctttctttctaggttgtatctcccacttcacccttctagaccatcccagaagatctataagatttcatctgggaaatcactaggagttcttggaagggaaagaaggaagattgttggttggaataaaaacagggttgaatgagttccagaaagcagggttctcaacctcgtggacagcaatctgcagaagaagagaacttcaaaaaaccaactagaagcaacatgcagagaagtaaaatgagaggggcctcctcaggaaagaagacagctggtccacagcagaaaaatcttgaaccagctctcccaggaagatggggtggtcgctctgcagagaaccccccttcaggatccgtgaggaagaccagaaagaacaagcagaagactcctggaaacggagatggtggcagtaccagcgaagcacctcagccccctcggaagaaaagggcccgggcagaccccactgttgaaagtgaggaggcgtttaagaatagaatggaggttaaagtgaagattcctgaagaattaaaaccatggcttgttgaggactgggacttagttaccaggcagaagcagctgtttcaactccctgccaagaaaaatgtagatgcaattctggaggagtatgcaaattgcaagaaatcgcagggaaatgttgataataaggaatatgcggttaatgaagttgtggcaggaataaaagaatatttcaatgtgatgttgggcactcagctgctctacaaatttgagaggccccagtatgctgaaatcctcttggctcaccctgatgctccaatgtcccaggtttatggagcaccacacctactgagattatttgtaagaattggagcaatgttggcctatacgccccttgatgagaaaagccttgcattattgttgggctatttgcatgatttcctaaaatatctggcaaagaattctgcatctctctttactgccagtgattacaaagtggcttctgctgagtaccaccgcaaagccctgtgagcgtctacagacagctcaccatttttgtcctgtatctgtaaacactttttgttcttagtctttttcttgtaaaattgatgttctttaaaatcgttaatgtataacagggcttatgtttcagtttgttttccgttctgttttaaacagaaaataaaaggagtgtaagctccttttctcatttcaaagttgctaccagtgtatgcagtaattagaacaaagaagaaacattcagtagaacattttattgcctagttgacaacattgcttgaatgctggtggttcctatccctttgacactacacaattttctaatatgtgttaatgctatgtgacaaaacgccctgattcctagtgccaaaggttcaacttaatgtatatacctgaaaacccatgcatttgtgctcttttttttttttatggtgcttgaagtaaaacagcccatcctctgcaagtccatctatgttgttcttaggcattctatctttgctcaaattgttgaaggatggtgatttgtttcatggtttttgtatttgagtctaatgcacgttctaacatgatagaggcaatgcattattgtgtagccacggttttctggaaaagttgatattttaggaattgtatttcagatcttaaataaaatttgtttctaaatttcaaagcaa

SEQ ID NO: 374856 - DNA, 1860 bp, Homo sapiens
atctagtggcagactcgagaggtataaaccttactcacagaactttcgggaaaattaacagtgcgtatttgcctgaagaaggtcagtgtgcttgcttggagatcaggacgcaaaggtcaccatcagaaaagctaagtttgctgtatagtgaggatcaggagatctgatcctgattgcagaaccttccctgattacagaatcttgggttgtatctcccacttcacccttctagaccatcccagaagatctataagatttcatctgggaaatcactaggagttcttggaagggaaagaaggaagattgttggttggaataaaaacagggttgaatgagttccagaaagcagggttctcaacctcgtggacagcaatctgcagaagaagagaacttcaaaaaaccaactagaagcaacatgcagagaagtaaaatgagaggggcctcctcaggaaagaagacagctggtccacagcagaaaaatcttgaaccagctctcccaggaagatggggtggtcgctctgcagagaaccccccttcaggatccgtgaggaagaccagaaagaacaagcagaagactcctggaaacggagatggtggcagtaccagcgaagcacctcagccccctcggaagaaaagggcccgggcagaccccactgttgaaagtgaggaggcgtttaagaatagaatggaggttaaagtgaagattcctgaagaattaaaaccatggcttgttgaggactgggacttagttaccaggcagaagcagctgtttcaactccctgccaagaaaaatgtagatgcaattctggaggagtatgcaaattgcaagaaatcgcagggaaatgttgataataaggaatatgcggttaatgaagttgtggcaggaataaaagaatatttcaatgtgatgttgggcactcagctgctctacaaatttgagaggccccagtatgctgaaatcctcttggctcaccctgatgctccaatgtcccaggtttatggagcaccacacctactgagattatttgtaagaattggagcaatgttggcctatacgccccttgatgagaaaagccttgcattattgttgggctatttgcatgatttcctaaaatatctggcaaagaattctgcatctctctttactgccagtgattacaaagtggcttctgctgagtaccaccgcaaagccctgtgagcgtctacagacagctcaccatttttgtcctgtatctgtaaacactttttgttcttagtctttttcttgtaaaattgatgttctttaaaatcgttaatgtataacagggcttatgtttcagtttgttttccgttctgttttaaacagaaaataaaaggagtgtaagctccttttctcatttcaaagttgctaccagtgtatgcagtaattagaacaaagaagaaacattcagtagaacattttattgcctagttgacaacattgcttgaatgctggtggttcctatccctttgacactacacaattttctaatatgtgttaatgctatgtgacaaaacgccctgattcctagtgccaaaggttcaacttaatgtatatacctgaaaacccatgcatttgtgctcttttttttttttatggtgcttgaagtaaaacagcccatcctctgcaagtccatctatgttgttcttaggcattctatctttgctcaaattgttgaaggatggtgatttgtttcatggtttttgtatttgagtctaatgcacgttctaacatgatagaggcaatgcattattgtgtagccacggttttctggaaaagttgatattttaggaattgtatttcagatcttaaataaaatttgtttctaaatttcaaagcaa

SEQ ID NO: 374857 - DNA, 1916 bp, Homo sapiens
aaaaaaaaaaaaaaaataatcatagacaagaccgggtgtgtaatcagagcgaggctggattctcgtttcaggtcaccatcagaaaagctaagtttgctgtatagtgaggatcaggagatctgatcctgattgcagaaccttccctgattacagaatcttgggattgttgagaggattacatgtaaagtaccaggacagtgcatggcacatatgatttcacaaaagttcatcttcattgcagatacctgcctttctttctaggttgtatctcccacttcacccttctagaccatcccagaagatctataagatttcatctgggaaatcactaggagttcttggaagggaaagaaggaagattgttggttggaataaaaacagggttgaatgagttccagaaagcagggttctcaacctcgtggacagcaatctgcagaagaagagaacttcaaaaaaccaactagaagcaacatgcagagaagtaaaatgagaggggcctcctcaggaaagaagacagctggtccacagcagaaaaatcttgaaccagctctcccaggaagatggggtggtcgctctgcagagaaccccccttcaggatccgtgaggaagaccagaaagaacaagcagaagactcctggaaacggagatggtggcagtaccagcgaagcacctcagccccctcggaagaaaagggcccgggcagaccccactgttgaaagtgaggaggcgtttaagaatagaatggaggttaaagtgaagattcctgaagaattaaaaccatggcttgttgaggactgggacttagttaccaggcagaagcagctgtttcaactccctgccaagaaaaatgtagatgcaattctggaggagtatgcaaattgcaagaaatcgcagggaaatgttgataataaggaatatgcggttaatgaagttgtggcaggaataaaagaatatttcaatgtgatgttgggcactcagctgctctacaaatttgagaggccccagtatgctgaaatcctcttggctcaccctgatgctccaatgtcccaggtttatggagcaccacacctactgagattatttgtaagaattggagcaatgttggcctatacgccccttgatgagaaaagccttgcattattgttgggctatttgcatgatttcctaaaatatctggcaaagaattctgcatctctctttactgccagtgattacaaagtggcttctgctgagtaccaccgcaaagccctgtgagcgtctacagacagctcaccatttttgtcctgtatctgtaaacactttttgttcttagtctttttcttgtaaaattgatgttctttaaaatcgttaatgtataacagggcttatgtttcagtttgttttccgttctgttttaaacagaaaataaaaggagtgtaagctccttttctcatttcaaagttgctaccagtgtatgcagtaattagaacaaagaagaaacattcagtagaacattttattgcctagttgacaacattgcttgaatgctggtggttcctatccctttgacactacacaattttctaatatgtgttaatgctatgtgacaaaacgccctgattcctagtgccaaaggttcaacttaatgtatatacctgaaaacccatgcatttgtgctcttttttttttttatggtgcttgaagtaaaacagcccatcctctgcaagtccatctatgttgttcttaggcattctatctttgctcaaattgttgaaggatggtgatttgtttcatggtttttgtatttgagtctaatgcacgttctaacatgatagaggcaatgcattattgtgtagccacggttttctggaaaagttgatattttaggaattgtatttcagatcttaaataaaatttgtttctaaatttcaaagcaa

SEQ ID NO: 374858 - DNA, 1880 bp, Homo sapiens
atctagtggcagactcgagaggtataaaccttactcacagaactttcgggaaaattaacagtgcgtatttgcctgaagaaggtcagtgtgcttgcttggagatcaggacgcaaaggtcaccatcagaaaagctaagtttgctgtatagtgaggatcaggagatctgatcctgattgcagaaccttccctgattacagaatcttggatacctgcctttctttctaggttgtatctcccacttcacccttctagaccatcccagaagatctataagatttcatctgggaaatcactaggagttcttggaagggaaagaaggaagattgttggttggaataaaaacagggttgaatgagttccagaaagcagggttctcaacctcgtggacagcaatctgcagaagaagagaacttcaaaaaaccaactagaagcaacatgcagagaagtaaaatgagaggggcctcctcaggaaagaagacagctggtccacagcagaaaaatcttgaaccagctctcccaggaagatggggtggtcgctctgcagagaaccccccttcaggatccgtgaggaagaccagaaagaacaagcagaagactcctggaaacggagatggtggcagtaccagcgaagcacctcagccccctcggaagaaaagggcccgggcagaccccactgttgaaagtgaggaggcgtttaagaatagaatggaggttaaagtgaagattcctgaagaattaaaaccatggcttgttgaggactgggacttagttaccaggcagaagcagctgtttcaactccctgccaagaaaaatgtagatgcaattctggaggagtatgcaaattgcaagaaatcgcagggaaatgttgataataaggaatatgcggttaatgaagttgtggcaggaataaaagaatatttcaatgtgatgttgggcactcagctgctctacaaatttgagaggccccagtatgctgaaatcctcttggctcaccctgatgctccaatgtcccaggtttatggagcaccacacctactgagattatttgtaagaattggagcaatgttggcctatacgccccttgatgagaaaagccttgcattattgttgggctatttgcatgatttcctaaaatatctggcaaagaattctgcatctctctttactgccagtgattacaaagtggcttctgctgagtaccaccgcaaagccctgtgagcgtctacagacagctcaccatttttgtcctgtatctgtaaacactttttgttcttagtctttttcttgtaaaattgatgttctttaaaatcgttaatgtataacagggcttatgtttcagtttgttttccgttctgttttaaacagaaaataaaaggagtgtaagctccttttctcatttcaaagttgctaccagtgtatgcagtaattagaacaaagaagaaacattcagtagaacattttattgcctagttgacaacattgcttgaatgctggtggttcctatccctttgacactacacaattttctaatatgtgttaatgctatgtgacaaaacgccctgattcctagtgccaaaggttcaacttaatgtatatacctgaaaacccatgcatttgtgctcttttttttttttatggtgcttgaagtaaaacagcccatcctctgcaagtccatctatgttgttcttaggcattctatctttgctcaaattgttgaaggatggtgatttgtttcatggtttttgtatttgagtctaatgcacgttctaacatgatagaggcaatgcattattgtgtagccacggttttctggaaaagttgatattttaggaattgtatttcagatcttaaataaaatttgtttctaaatttcaaagcaa

SEQ ID NO: 374859 - DNA, 2416 bp, Homo sapiens
ttttttttttttgtatttttagtagagacagggtttcactacgttggccaggctggtctcaaactcctgatctcgtgatctgcctgccttggcctcccgaagtgctgggatcacaggtgtgacccactgcgcccggccttatctgtctctttaagatcctattgcatttgggatcctgtagtattatgccactgcctatttacctaataatatatattgaacatctttccatgtcagtacacagatctctgcttaattcatttgaatgttcttctgtagtattcatacataatttatgttatcattttcctgttgaagaataggtaggtgttttccagttcttcagtattgcaaacaccactacattgaacatctttgtatccatgtgcaaatattcccgcaacatactgtgctagctgttcagccacatcacctttatgaaattctcacaggaacctgtgaaggctataggtaatttgccacattccacagatgagaaaaaggctaagagagcttacatgtcttgcctgaggtctcacaactcataaatgacggagcctaattgaagtaaagatctgtctgacagcagaactcaagtattttctctgataccacgatttacaattgtggtatatgattcatatatgtgtttaaatgtaaacatataaaccacatgtttataaattactcattttttttctttttcttagatgatttcacaaaagttcatcttcattgcagatacctgcctttctttctaggttgtatctcccacttcacccttctagaccatcccagaagatctataagatttcatctgggaaatcactaggagttcttggaagggaaagaaggaagattgttggttggaataaaaacagggttgaatgagttccagaaagcagggttctcaacctcgtggacagcaatctgcagaagaagagaacttcaaaaaaccaactagaagcaacatgcagagaagtaaaatgagaggggcctcctcaggaaagaagacagctggtccacagcagaaaaatcttgaaccagctctcccaggaagatggggtggtcgctctgcagagaaccccccttcaggatccgtgaggaagaccagaaagaacaagcagaagactcctggaaacggagatggtggcagtaccagcgaagcacctcagccccctcggaagaaaagggcccgggcagaccccactgttgaaagtgaggaggcgtttaagaatagaatggaggttaaagtgaagattcctgaagaattaaaaccatggcttgttgaggactgggacttagttaccaggcagaagcagctgtttcaactccctgccaagaaaaatgtagatgcaattctggaggagtatgcaaattgcaagaaatcgcagggaaatgttgataataaggaatatgcggttaatgaagttgtggcaggaataaaagaatatttcaatgtgatgttgggcactcagctgctctacaaatttgagaggccccagtatgctgaaatcctcttggctcaccctgatgctccaatgtcccaggtttatggagcaccacacctactgagattatttgtaagaattggagcaatgttggcctatacgccccttgatgagaaaagccttgcattattgttgggctatttgcatgatttcctaaaatatctggcaaagaattctgcatctctctttactgccagtgattacaaagtggcttctgctgagtaccaccgcaaagccctgtgagcgtctacagacagctcaccatttttgtcctgtatctgtaaacactttttgttcttagtctttttcttgtaaaattgatgttctttaaaatcgttaatgtataacagggcttatgtttcagtttgttttccgttctgttttaaacagaaaataaaaggagtgtaagctccttttctcatttcaaagttgctaccagtgtatgcagtaattagaacaaagaagaaacattcagtagaacattttattgcctagttgacaacattgcttgaatgctggtggttcctatccctttgacactacacaattttctaatatgtgttaatgctatgtgacaaaacgccctgattcctagtgccaaaggttcaacttaatgtatatacctgaaaacccatgcatttgtgctcttttttttttttatggtgcttgaagtaaaacagcccatcctctgcaagtccatctatgttgttcttaggcattctatctttgctcaaattgttgaaggatggtgatttgtttcatggtttttgtatttgagtctaatgcacgttctaacatgatagaggcaatgcattattgtgtagccacggttttctggaaaagttgatattttaggaattgtatttcagatcttaaataaaatttgtttctaaatttcaaagcaa

SEQ ID NO: 374860 - DNA, 3156 bp, Homo sapiens
ggggggagtgcaagaaagaaagagatggagaacgagagcgagctggagatgaaccacatgcgatgagtaggccttgtttggatcctgaatcgaacacaccaactgtaaaaatatgtttaagacgcatcgggaaaattgggacacggattcgatatttgatgttttttagggaattgatgtcagtttttttaggcgtcacagtagtattgtgattatgttttcaaattgtccttttttgtagagacatacgaaaatatttacggattaaataatgtctgggattggcttctaaatacattaatgactaggatttgcttcaaaataatctcagcggtagggggaaatggggaggggtatagatgaaacaaaattggccctaaattaataatatttttttgctgagtgataggcagtgggttgcgtatattaatctgctttccttggtatacgtttaaatttttctataataaaatacagaagtcagatattccggtgagcttgaaaaagtcgggggtgggggggagcagtgggtggggttatagatgaaacaagatggccttcagttggtaattgttgaaagctggatgatggattcgtgtaggtttataatactatttcttttttatttcatccatttgaaattatatttaaggaaagttaaaaaacaaatttgtcagaaattatacaaatgtacaataaattaaatttgaaaatgtggccacaagaaaggaaaaagaaacacttgtacattatttatcagctttggtgtcctttgtgtgtgatgaaattgcattggctgatgtagaagaaagccatatctcatatctttttattttatgttctttcttgtccttttgtttgaccttctaggtcaccatcagaaaagctaagtttgctgtatagtgaggatcaggagatctgatcctgattgcagaaccttccctgattacagaatcttgggtaagtgcctcccttctgtcctcagttctcaaacaggataataccacataaccttcctaactgtccaggaatattttgaaaattaataagctcctatctgggaaagtagtctaaattctgagaagggaagggtggagctaagtccattgatagttccagtatagaaagtgcataagcaacagagggctttgtaatcttacatcccttgataaaagatactacagtcaatctcctgtagtagttccacagttccatagattacatttttccttggagcatcctatatgcagcatagtttagtggttaagagcaaatacttcctgaatttaaatcctggctctgccacttaactatgtgatcttgggcaagatatttactcactttatacctaagttcctcgtatatgaaacagaggtgataataatagttcctacttcataggattgttgagaggattacatgtaaagtaccaggacagtgcatggcacatatgatttcacaaaagttcatcttcattgcagatacctgcctttctttctaggttgtatctcccacttcacccttctagaccatcccagaagatctataagatttcatctgggaaatcactaggagttcttggaagggaaagaaggaagattgttggttggaataaaaacagggttgaatgagttccagaaagcagggttctcaacctcgtggacagcaatctgcagaagaagagaacttcaaaaaaccaactagaagcaacatgcagagaagtaaaatgagaggggcctcctcaggaaagaagacagctggtccacagcagaaaaatcttgaaccagctctcccaggaagatggggtggtcgctctgcagagaaccccccttcaggatccgtgaggaagaccagaaagaacaagcagaagactcctggaaacggagatggtggcagtaccagcgaagcacctcagccccctcggaagaaaagggcccgggcagaccccactgttgaaagtgaggaggcgtttaagaatagaatggaggttaaagtgaagattcctgaagaattaaaaccatggcttgttgaggactgggacttagttaccaggcagaagcagctgtttcaactccctgccaagaaaaatgtagatgcaattctggaggagtatgcaaattgcaagaaatcgcagggaaatgttgataataaggaatatgcggttaatgaagttgtggcaggaataaaagaatatttcaatgtgatgttgggcactcagctgctctacaaatttgagaggccccagtatgctgaaatcctcttggctcaccctgatgctccaatgtcccaggtttatggagcaccacacctactgagattatttgtaagaattggagcaatgttggcctatacgccccttgatgagaaaagccttgcattattgttgggctatttgcatgatttcctaaaatatctggcaaagaattctgcatctctctttactgccagtgattacaaagtggcttctgctgagtaccaccgcaaagccctgtgagcgtctacagacagctcaccatttttgtcctgtatctgtaaacactttttgttcttagtctttttcttgtaaaattgatgttctttaaaatcgttaatgtataacagggcttatgtttcagtttgttttccgttctgttttaaacagaaaataaaaggagtgtaagctccttttctcatttcaaagttgctaccagtgtatgcagtaattagaacaaagaagaaacattcagtagaacattttattgcctagttgacaacattgcttgaatgctggtggttcctatccctttgacactacacaattttctaatatgtgttaatgctatgtgacaaaacgccctgattcctagtgccaaaggttcaacttaatgtatatacctgaaaacccatgcatttgtgctcttttttttttttatggtgcttgaagtaaaacagcccatcctctgcaagtccatctatgttgttcttaggcattctatctttgctcaaattgttgaaggatggtgatttgtttcatggtttttgtatttgagtctaatgcacgttctaacatgatagaggcaatgcattattgtgtagccacggttttctggaaaagttgatattttaggaattgtatttcagatcttaaataaaatttgtttctaaatttcaaagcaa

SEQ ID NO: 374861 - DNA, 2401 bp, Homo sapiens
atctagtggcagactcgagaggtataaaccttactcacagaactttcgggaaaattaacagtgcgtatttgcctgaagaaggtcagtgtgcttgcttggagatcaggacgcaaaggtcaccatcagaaaagctaagtttgctgtatagtgaggatcaggagatctgatcctgattgcagaaccttccctgattacagaatcttgggtaagtgcctcccttctgtcctcagttctcaaacaggataataccacataaccttcctaactgtccaggaatattttgaaaattaataagctcctatctgggaaagtagtctaaattctgagaagggaagggtggagctaagtccattgatagttccagtatagaaagtgcataagcaacagagggctttgtaatcttacatcccttgataaaagatactacagtcaatctcctgtagtagttccacagttccatagattacatttttccttggagcatcctatatgcagcatagtttagtggttaagagcaaatacttcctgaatttaaatcctggctctgccacttaactatgtgatcttgggcaagatatttactcactttatacctaagttcctcgtatatgaaacagaggtgataataatagttcctacttcataggattgttgagaggattacatgtaaagtaccaggacagtgcatggcacatatgatttcacaaaagttcatcttcattgcagatacctgcctttctttctaggttgtatctcccacttcacccttctagaccatcccagaagatctataagatttcatctgggaaatcactaggagttcttggaagggaaagaaggaagattgttggttggaataaaaacagggttgaatgagttccagaaagcagggttctcaacctcgtggacagcaatctgcagaagaagagaacttcaaaaaaccaactagaagcaacatgcagagaagtaaaatgagaggggcctcctcaggaaagaagacagctggtccacagcagaaaaatcttgaaccagctctcccaggaagatggggtggtcgctctgcagagaaccccccttcaggatccgtgaggaagaccagaaagaacaagcagaagactcctggaaacggagatggtggcagtaccagcgaagcacctcagccccctcggaagaaaagggcccgggcagaccccactgttgaaagtgaggaggcgtttaagaatagaatggaggttaaagtgaagattcctgaagaattaaaaccatggcttgttgaggactgggacttagttaccaggcagaagcagctgtttcaactccctgccaagaaaaatgtagatgcaattctggaggagtatgcaaattgcaagaaatcgcagggaaatgttgataataaggaatatgcggttaatgaagttgtggcaggaataaaagaatatttcaatgtgatgttgggcactcagctgctctacaaatttgagaggccccagtatgctgaaatcctcttggctcaccctgatgctccaatgtcccaggtttatggagcaccacacctactgagattatttgtaagaattggagcaatgttggcctatacgccccttgatgagaaaagccttgcattattgttgggctatttgcatgatttcctaaaatatctggcaaagaattctgcatctctctttactgccagtgattacaaagtggcttctgctgagtaccaccgcaaagccctgtgagcgtctacagacagctcaccatttttgtcctgtatctgtaaacactttttgttcttagtctttttcttgtaaaattgatgttctttaaaatcgttaatgtataacagggcttatgtttcagtttgttttccgttctgttttaaacagaaaataaaaggagtgtaagctccttttctcatttcaaagttgctaccagtgtatgcagtaattagaacaaagaagaaacattcagtagaacattttattgcctagttgacaacattgcttgaatgctggtggttcctatccctttgacactacacaattttctaatatgtgttaatgctatgtgacaaaacgccctgattcctagtgccaaaggttcaacttaatgtatatacctgaaaacccatgcatttgtgctcttttttttttttatggtgcttgaagtaaaacagcccatcctctgcaagtccatctatgttgttcttaggcattctatctttgctcaaattgttgaaggatggtgatttgtttcatggtttttgtatttgagtctaatgcacgttctaacatgatagaggcaatgcattattgtgtagccacggttttctggaaaagttgatattttaggaattgtatttcagatcttaaataaaatttgtttctaaatttcaaagcaa

SEQ ID NO: 374862 - DNA, 1836 bp, Homo sapiens
atcatttgattatggaacattctaaaacttagacaagacgattgtgattggctgaagggcatacgccctcctccagggtgacgtgtctgcctatggatatcagttgccagagaaacctggctttactatggcggttggaggaacggcagtgatcacacgtcggctgctgggaagatctggattctcgtttcaggtcaccatcagaaaagctaagtttgctgtatagtgaggatcaggagatctgatcctgattgcagaaccttccctgattacagaatcttggtggttggaataaaaacagggttgaatgagttccagaaagcagggttctcaacctcgtggacagcaatctgcagaagaagagaacttcaaaaaaccaactagaagcaacatgcagagaagtaaaatgagaggggcctcctcaggaaagaagacagctggtccacagcagaaaaatcttgaaccagctctcccaggaagatggggtggtcgctctgcagagaaccccccttcaggatccgtgaggaagaccagaaagaacaagcagaagactcctggaaacggagatggtggcagtaccagcgaagcacctcagccccctcggaagaaaagggcccgggcagaccccactgttgaaagtgaggaggcgtttaagaatagaatggaggttaaagtgaagattcctgaagaattaaaaccatggcttgttgaggactgggacttagttaccaggcagaagcagctgtttcaactccctgccaagaaaaatgtagatgcaattctggaggagtatgcaaattgcaagaaatcgcagggaaatgttgataataaggaatatgcggttaatgaagttgtggcaggaataaaagaatatttcaatgtgatgttgggcactcagctgctctacaaatttgagaggccccagtatgctgaaatcctcttggctcaccctgatgctccaatgtcccaggtttatggagcaccacacctactgagattatttgtaagaattggagcaatgttggcctatacgccccttgatgagaaaagccttgcattattgttgggctatttgcatgatttcctaaaatatctggcaaagaattctgcatctctctttactgccagtgattacaaagtggcttctgctgagtaccaccgcaaagccctgtgagcgtctacagacagctcaccatttttgtcctgtatctgtaaacactttttgttcttagtctttttcttgtaaaattgatgttctttaaaatcgttaatgtataacagggcttatgtttcagtttgttttccgttctgttttaaacagaaaataaaaggagtgtaagctccttttctcatttcaaagttgctaccagtgtatgcagtaattagaacaaagaagaaacattcagtagaacattttattgcctagttgacaacattgcttgaatgctggtggttcctatccctttgacactacacaattttctaatatgtgttaatgctatgtgacaaaacgccctgattcctagtgccaaaggttcaacttaatgtatatacctgaaaacccatgcatttgtgctcttttttttttttatggtgcttgaagtaaaacagcccatcctctgcaagtccatctatgttgttcttaggcattctatctttgctcaaattgttgaaggatggtgatttgtttcatggtttttgtatttgagtctaatgcacgttctaacatgatagaggcaatgcattattgtgtagccacggttttctggaaaagttgatattttaggaattgtatttcagatcttaaataaaatttgtttctaaatttcaaagcaa

SEQ ID NO: 374863 - DNA, 1758 bp, Homo sapiens
atctagtggcagactcgagaggtataaaccttactcacagaactttcgggaaaattaacagtgcgtatttgcctgaagaaggtcagtgtgcttgcttggagatcaggacgcaaaggtcaccatcagaaaagctaagtttgctgtatagtgaggatcaggagatctgatcctgattgcagaaccttccctgattacagaatcttggtggttggaataaaaacagggttgaatgagttccagaaagcagggttctcaacctcgtggacagcaatctgcagaagaagagaacttcaaaaaaccaactagaagcaacatgcagagaagtaaaatgagaggggcctcctcaggaaagaagacagctggtccacagcagaaaaatcttgaaccagctctcccaggaagatggggtggtcgctctgcagagaaccccccttcaggatccgtgaggaagaccagaaagaacaagcagaagactcctggaaacggagatggtggcagtaccagcgaagcacctcagccccctcggaagaaaagggcccgggcagaccccactgttgaaagtgaggaggcgtttaagaatagaatggaggttaaagtgaagattcctgaagaattaaaaccatggcttgttgaggactgggacttagttaccaggcagaagcagctgtttcaactccctgccaagaaaaatgtagatgcaattctggaggagtatgcaaattgcaagaaatcgcagggaaatgttgataataaggaatatgcggttaatgaagttgtggcaggaataaaagaatatttcaatgtgatgttgggcactcagctgctctacaaatttgagaggccccagtatgctgaaatcctcttggctcaccctgatgctccaatgtcccaggtttatggagcaccacacctactgagattatttgtaagaattggagcaatgttggcctatacgccccttgatgagaaaagccttgcattattgttgggctatttgcatgatttcctaaaatatctggcaaagaattctgcatctctctttactgccagtgattacaaagtggcttctgctgagtaccaccgcaaagccctgtgagcgtctacagacagctcaccatttttgtcctgtatctgtaaacactttttgttcttagtctttttcttgtaaaattgatgttctttaaaatcgttaatgtataacagggcttatgtttcagtttgttttccgttctgttttaaacagaaaataaaaggagtgtaagctccttttctcatttcaaagttgctaccagtgtatgcagtaattagaacaaagaagaaacattcagtagaacattttattgcctagttgacaacattgcttgaatgctggtggttcctatccctttgacactacacaattttctaatatgtgttaatgctatgtgacaaaacgccctgattcctagtgccaaaggttcaacttaatgtatatacctgaaaacccatgcatttgtgctcttttttttttttatggtgcttgaagtaaaacagcccatcctctgcaagtccatctatgttgttcttaggcattctatctttgctcaaattgttgaaggatggtgatttgtttcatggtttttgtatttgagtctaatgcacgttctaacatgatagaggcaatgcattattgtgtagccacggttttctggaaaagttgatattttaggaattgtatttcagatcttaaataaaatttgtttctaaatttcaaagcaa

SEQ ID NO: 374864 - DNA, 2044 bp, Homo sapiens
catgatttctgtattcttcagtttctcttgactctgtcatcatcctaattcaggcctttctggactaatacaagaacctttactgttactcattttgcccttagtcaattaaatataaccttccctattccatattgtcatttctcctgttcaaaagtcttaaatttcaactccactgtcttttatagtttttcatttaattccttctttcttgaaaattgctttcctatcttgtgagtggcatcaacagagtaatttatgggtagttgtgatgagtatttgggtgagatgagagtagtggctggtagtgaggatcagagagagggaaaggaggtaaaaaaataaaaaatcacttataaagggtcctgaaataggatttgaaatccagattttaagggagttagaatgtgttattctctgatgggcctttatgaaacatagttaaaggttgccatagaaaacaaccaagtaaaatattttatatattacagtggttggaataaaaacagggttgaatgagttccagaaagcagggttctcaacctcgtggacagcaatctgcagaagaagagaacttcaaaaaaccaactagaagcaacatgcagagaagtaaaatgagaggggcctcctcaggaaagaagacagctggtccacagcagaaaaatcttgaaccagctctcccaggaagatggggtggtcgctctgcagagaaccccccttcaggatccgtgaggaagaccagaaagaacaagcagaagactcctggaaacggagatggtggcagtaccagcgaagcacctcagccccctcggaagaaaagggcccgggcagaccccactgttgaaagtgaggaggcgtttaagaatagaatggaggttaaagtgaagattcctgaagaattaaaaccatggcttgttgaggactgggacttagttaccaggcagaagcagctgtttcaactccctgccaagaaaaatgtagatgcaattctggaggagtatgcaaattgcaagaaatcgcagggaaatgttgataataaggaatatgcggttaatgaagttgtggcaggaataaaagaatatttcaatgtgatgttgggcactcagctgctctacaaatttgagaggccccagtatgctgaaatcctcttggctcaccctgatgctccaatgtcccaggtttatggagcaccacacctactgagattatttgtaagaattggagcaatgttggcctatacgccccttgatgagaaaagccttgcattattgttgggctatttgcatgatttcctaaaatatctggcaaagaattctgcatctctctttactgccagtgattacaaagtggcttctgctgagtaccaccgcaaagccctgtgagcgtctacagacagctcaccatttttgtcctgtatctgtaaacactttttgttcttagtctttttcttgtaaaattgatgttctttaaaatcgttaatgtataacagggcttatgtttcagtttgttttccgttctgttttaaacagaaaataaaaggagtgtaagctccttttctcatttcaaagttgctaccagtgtatgcagtaattagaacaaagaagaaacattcagtagaacattttattgcctagttgacaacattgcttgaatgctggtggttcctatccctttgacactacacaattttctaatatgtgttaatgctatgtgacaaaacgccctgattcctagtgccaaaggttcaacttaatgtatatacctgaaaacccatgcatttgtgctcttttttttttttatggtgcttgaagtaaaacagcccatcctctgcaagtccatctatgttgttcttaggcattctatctttgctcaaattgttgaaggatggtgatttgtttcatggtttttgtatttgagtctaatgcacgttctaacatgatagaggcaatgcattattgtgtagccacggttttctggaaaagttgatattttaggaattgtatttcagatcttaaataaaatttgtttctaaatttcaaagcaa

SEQ ID NO: 374865 - DNA, 1642 bp, Homo sapiens
actacatacttccgggcacacttccggactacatactccgtatctgggaaatcactaggagttcttggaagggggggaaggaagattgttggttggaataaaaacagggttgaatgagttccagaaagcagggttctcaacctcgtggacagcaatctgcagaagaagagaacttcaaaaaaccaactagaagcaacatgcagagaagtaaaatgagaggggcctcctcaggaaagaagacagctggtccacagcagaaaaatcttgaaccagctctcccaggaagatggggtggtcgctctgcagagaaccccccttcaggatccgtgaggaagaccagaaagaacaagcagaagactcctggaaacggagatggtggcagtaccagcgaagcacctcagccccctcggaagaaaagggcccgggcagaccccactgttgaaagtgaggaggcgtttaagaatagaatggaggttaaagtgaagattcctgaagaattaaaaccatggcttgttgaggactgggacttagttaccaggcagaagcagctgtttcaactccctgccaagaaaaatgtagatgcaattctggaggagtatgcaaattgcaagaaatcgcagggaaatgttgataataaggaatatgcggttaatgaagttgtggcaggaataaaagaatatttcaatgtgatgttgggcactcagctgctctacaaatttgagaggccccagtatgctgaaatcctcttggctcaccctgatgctccaatgtcccaggtttatggagcaccacacctactgagattatttgtaagaattggagcaatgttggcctatacgccccttgatgagaaaagccttgcattattgttgggctatttgcatgatttcctaaaatatctggcaaagaattctgcatctctctttactgccagtgattacaaagtggcttctgctgagtaccaccgcaaagccctgtgagcgtctacagacagctcaccatttttgtcctgtatctgtaaacactttttgttcttagtctttttcttgtaaaattgatgttctttaaaatcgttaatgtataacagggcttatgtttcagtttgttttccgttctgttttaaacagaaaataaaaggagtgtaagctccttttctcatttcaaagttgctaccagtgtatgcagtaattagaacaaagaagaaacattcagtagaacattttattgcctagttgacaacattgcttgaatgctggtggttcctatccctttgacactacacaattttctaatatgtgttaatgctatgtgacaaaacgccctgattcctagtgccaaaggttcaacttaatgtatatacctgaaaacccatgcatttgtgctcttttttttttttatggtgcttgaagtaaaacagcccatcctctgcaagtccatctatgttgttcttaggcattctatctttgctcaaattgttgaaggatggtgatttgtttcatggtttttgtatttgagtctaatgcacgttctaacatgatagaggcaatgcattattgtgtagccacggttttctggaaaagttgatattttaggaattgtatttcagatcttaaataaaatttgtttctaaatttcaaagcaa

SEQ ID NO: 374866 - DNA, 2676 bp, Homo sapiens
atcatttgattatggaacattctaaaacttagacaagacgattgtgattggctgaagggcatacgccctcctccagggtgacgtgtctgcctatggatatcagttgccagagaaacctggctttactatggcggttggaggaacggcagtgatcacacgtcggctgctgggaagatctggattctcgtttcaggtcaccatcagaaaagctaagtttgctgtatagtgaggatcaggagatctgatcctgattgcagaaccttccctgattacagaatcttggatgatttcacaaaagttcatcttcattgcagatacctgcctttctttctaggttgtatctcccacttcacccttctagaccatcccagaagatctataagatttcatctgggaaatcactaggagttcttggaagggaaagaaggaagattgttggttggaataaaaacagggttgaatgagttccagaaagcagggttctcaacctcgtggacagcaatctgcagaagaagagaacttcaaaaaaccaactagaagcaacatgcagagaagtaaaatgagaggggcctcctcaggaaagaagacagctggtccacagcagaaaaatcttgaaccagctctcccaggaagatggggtggtcgctctgcagagaaccccccttcaggatccgtgaggaagaccagaaagaacaagcagaagactcctggaaacggagatggtggcagtaccagcgaagcacctcagccccctcggaagaaaagggcccgggcagaccccactgttgaaagtgaggaggcgtttaagaatagaatggaggttaaagtgaagattcctgaagaattaaaaccatggcttgttgaggactgggacttagttaccaggcagaagcagctgtttcaactccctgccaagaaaaatgtagatgcaattctggaggagtatgcaaattgcaagaaatcgcagggaaatgttgataataaggaatatgcggttaatgaagttgtggcaggaataaaagaatatttcaatgtgatgttgggcactcagctgctctacaaatttgagaggccccagtatgctgaaatcctcttggctcaccctgatgctccaatgtcccaggtttatggagcaccacacctactgagattatttgtaagaattggagcaatgttggcctatacgccccttgatgagaaaagccttgcattattgttgggctatttgcatgatttcctaaaatatctggcaaagaattctgcatctctctttactgccagtgattacaaagtggcttctgctgagtaccaccgcaaagccctgtgagcgtctacagacagctcaccatttttgtcctgtatctgtaaacactttttgttcttagtctttttcttgtaaaattgatgttctttaaaatcgttaatgtataacagggcttatgtttcagtttgttttccgttctgttttaaacagaaaataaaaggagtgtaagctccttttctcatttcaaagttgctaccagtgtatgcagtaattagaacaaagaagaaacattcagtagaacattttattgcctagttgacaacattgcttgaatgctggtggttcctatccctttgacactacacaattttctaatatgtgttaatgctatgtgacaaaacgccctgattcctagtgccaaaggttcaacttaatgtatatacctgaaaacccatgcatttgtgctcttttttttttttatggtgcttgaagtaaaacagcccatcctctgcaagtccatctatgttgttcttaggcattctatctttgctcaaattgttgaaggatggtgatttgtttcatggtttttgtatttgagtctaatgcacgttctaacatgatagaggcaatgcattattgtgtagccacggttttctggaaaagttgatattttaggaattgtatttcagatcttaaataaaatttgtttctaaatttcaaagcaaaaaaaaaaaaaaaaaaaaaaaaaaaaaaaaaaaaaaaaaaaaaaaaaaaaaaaaaaaaaaagggggggggggataaaaaatagggggggggcataaagacgcgacccgcgccgcttgttcgtaagaacaacaaggcacccccaacaatgaggacggatagtagtaaacgaaacaaggacgggaggcgtataaaaacaagagggcccgagagaagagcaaaacaacgcatacgtgccacccttaagcagagacgcacccaacaataccttgggtggaggaaataacacaagtgagggacccaacacccagagaaataaagaccccccggcggagaaaacacaaaaagaagtggtacagagtggtaacacacagactgtatactgactcaaacaaaaaatctgctccggagaagataacaagaacaaatctctcagggggcctcgtcaaaccagggaggggccgacgaaacggacccggcgacagaccagaatgaagacaacacatcgcagaggagcatcgaagcccagacgagacgtagcgacggaggaggaaccacgacgcgcactgaacgacacataacgatcaaaacgaagtaaagacgagacgaaacagaagaccagacgtagacgagaacaaaagcgacgtgcgagagcagcaacgaagtagaaacgaagcagaggagcatac

SEQ ID NO: 374867 - DNA, 2588 bp, Homo sapiens
atcatttgattatggaacattctaaaacttagacaagacgattgtgattggctgaagggcatacgccctcctccagggtgacgtgtctgcctatggatatcagttgccagagaaacctggctttactatggcggttggaggaacggcagtgatcacacgtcggctgctgggaagatctggattctcgtttcaggtcaccatcagaaaagctaagtttgctgtatagtgaggatcaggagatctgatcctgattgcagaaccttccctgattacagaatcttggatgatttcacaaaagttcatcttcattgcagatacctgcctttctttctaggttgtatctcccacttcacccttctagaccatcccagaagatctataagatttcatctgggaaatcactaggagttcttggaagggaaagaaggaagattgttggttggaataaaaacagggttgaatgagttccagaaagcagggttctcaacctcgtggacagcaatctgcagaagaagagaacttcaaaaaaccaactagaagcaacatgcagagaagtaaaatgagaggggcctcctcaggaaagaagacagctggtccacagcagaaaaatcttgaaccagctctcccaggaagatggggtggtcgctctgcagagaaccccccttcaggatccgtgaggaagaccagaaagaacaagcagaagactcctggaaacggagatggtggcagtaccagcgaagcacctcagccccctcggaagaaaagggcccgggcagaccccactgttgaaagtgaggaggcgtttaagaatagaatggaggttaaagtgaagattcctgaagaattaaaaccatggcttgttgaggactgggacttagttaccaggcagaagcagctgtttcaactccctgccaagaaaaatgtagatgcaattctggaggagtatgcaaattgcaagaaatcgcagggaaatgttgataataaggaatatgcggttaatgaagttgtggcaggaataaaagaatatttcaatgtgatgttgggcactcagctgctctacaaatttgagaggccccagtatgctgaaatcctcttggctcaccctgatgctccaatgtcccaggtttatggagcaccacacctactgagattatttgtaagaattggagcaatgttggcctatacgccccttgatgagaaaagccttgcattattgttgggctatttgcatgatttcctaaaatatctggcaaagaattctgcatctctctttactgccagtgattacaaagtggcttctgctgagtaccaccgcaaagccctgtgagcgtctacagacagctcaccatttttgtcctgtatctgtaaacactttttgttcttagtctttttcttgtaaaattgatgttctttaaaatcgttaatgtataacagggcttatgtttcagtttgttttccgttctgttttaaacagaaaataaaaggagtgtaagctccttttctcatttcaaagttgctaccagtgtatgcagtaattagaacaaagaagaaacattcagtagaacattttattgcctagttgacaacattgcttgaatgctggtggttcctatccctttgacactacacaattttctaatatgtgttaatgctatgtgacaaaacgccctgattcctagtgccaaaggttcaacttaatgtatatacctgaaaacccatgcatttgtgctcttttttttttttatggtgcttgaagtaaaacagcccatcctctgcaagtccatctatgttgttcttaggcattctatctttgctcaaattgttgaaggatggtgatttgtttcatggtttttgtatttgagtctaatgcacgttctaacatgatagaggcaatgcattattgtgtagccacggttttctggaaaagttgatattttaggaattgtatttcagatcttaaataaaatttgtttctaaatttcaaagcaaaaaaaaaaaaaaaaggggcgccgtctcgaatttaaaataggtcctcgccttggacagacaacactttcttgtgtacattaaccacatcctgctcggaaactcggcgcgttacacagtctcctgtgtaaagggccgggcgcatggctatcaaggagctgttggccgggaaacgcctgtgctgcggcatcccctggctgggattctggtgtgaggcctcatgggcttgtgtgagcacccaggattaatttactaaaaaaggggccggaatattttccacattccattggtgactcccatttttttggtcttctttcccaactccgttgaccctttggtccgcatattctttacgaggggcaaaatttgctgttggacacttcttggcctggagggggtcttacacacacgcggggatatctgtggacgctaagacgtacgttactagaaagtgcctgttttcaaaccgaaagcgagggacctaatgtttaggttaaaatagaacgttcgggcgaacctggtacgtccaaagtagtcgttggtagacgtggcgtcagagaaacgggcactacgtgcgcgcatctaccttatgcccgcattag

SEQ ID NO: 374868 - DNA, 1679 bp, Homo sapiens
atcatttgattatggaacattctaaaacttagacaagacgattgtgattggctgaagggcatacgccctcctccagggtgacgtgtctgcctatggatatcagttgccagagaaacctggctttactatggcggttggaggaacggcagtgatcacacgtcggctgctgggaagatctggattctcgtttcaggtcaccatcagaaaagctaagtttgctgtatagtgaggatcaggagatctgatcctgattgcagaaccttccctgattacagaatcttggatgatttcacaaaagttcatcttcattgcagatacctgcctttctttctaggttgtatctcccacttcacccttctagaccatcccagaagatctataagatttcatctgggaaatcactaggagttcttggaagggaaagaaggaagattgttggttggaataaaaacagggttgaatgagttccagaaagcagggttctcaacctcgtggacagcaatctgcagaagaagagaacttcaaaaaaccaactagaagcaacatgcagagaagtaaaatgagaggggcctcctcaggaaagaagacagctggtccacagcagaaaaatcttgaaccagctctcccaggaagatggggtggtcgctctgcagagaaccccccttcaggatccgtgaggaagaccagaaagaacaagcagaagactcctggaaacggagatggtggcagtaccagcgaagcacctcagccccctcggaagaaaagggcccgggcagaccccactgttgaaagtgaggaggcgtttaagaatagaatggaggttaaagtgaagattcctgaagaattaaaaccatggcttgttgaggactgggacttagttaccaggcagaagcagctgtttcaactccctgccaagaaaaatgtagatgcaattctggaggagtatgcaaattgcaagaaatcgcagggaaatgttgataataaggaatatgcggttaatgaagttgtggcaggaataaaagaatatttcaatgtgatgttgggcactcagctgctctacaaatttgagaggccccagtatgctgaaatcctcttggctcaccctgatgctccaatgtcccaggtttatggagcaccacacctactgagattatttgtaagaattggagcaatgttggcctatacgccccttgatgagaaaagccttgcattattgttgggctatttgcatgatttcctaaaatatctggcaaagaattctgcatctctctttactgccagtgattacaaagtggcttctgctgagtaccaccgcaaagccctgtgagcgtctacagacagctcaccatttttgtcctgtatctgtaaacactttttgttcttagtctttttcttgtaaaattgatgttctttaaaatcgttaatgtataacagggcttatgtttcagtttgttttccgttctgttttaaacagaaaataaaaggagtgtaagctccttttctcatttcaaagttgctaccagtgtatgcagtaattagaacaaagaagaaacattcagtacgttctaacatgatagaggcaatgcattattgtgtagccacggttttctggaaaagttgatattttaggaattgtatttcagatcttaaataaaatttgtttctaaatttcaaagcaa

SEQ ID NO: 374869 - DNA, 1288 bp, Homo sapiens
atcatttgattatggaacattctaaaacttagacaagacgattgtgattggctgaagggcatacgccctcctccagggtgacgtgtctgcctatggatatcagttgccagagaaacctggctttactatggcggttggaggaacggcagtgatcacacgtcggctgctgggaagatctggattctcgtttcaggtcaccatcagaaaagctaagtttgctgtatagtgaggatcaggagatctgatcctgattgcagaaccttccctgattacagaatcttgggttgtatctcccacttcacccttctagaccatcccagaagatctataagatttcatctgggaaatcactaggagttcttggaagggaaagaaggaagattgttggttggaataaaaacagggttgaatgagttccagaaagcagggttctcaacctcgtggacagcaatctgcagaagaagagaacttcaaaaaaccaactagaagcaacatgcagagaagtaaaatgagaggggcctcctcaggaaagaagacagctggtccacagcagaaaaatcttgaaccagctctcccaggaagatggggtggtcgctctgcagagaaccccccttcaggatccgtgagcgtctacagacagctcaccatttttgtcctgtatctgtaaacactttttgttcttagtctttttcttgtaaaattgatgttctttaaaatcgttaatgtataacagggcttatgtttcagtttgttttccgttctgttttaaacagaaaataaaaggagtgtaagctccttttctcatttcaaagttgctaccagtgtatgcagtaattagaacaaagaagaaacattcagtagaacattttattgcctagttgacaacattgcttgaatgctggtggttcctatccctttgacactacacaattttctaatatgtgttaatgctatgtgacaaaacgccctgattcctagtgccaaaggttcaacttaatgtatatacctgaaaacccatgcatttgtgctcttttttttttttatggtgcttgaagtaaaacagcccatcctctgcaagtccatctatgttgttcttaggcattctatctttgctcaaattgttgaaggatggtgatttgtttcatggtttttgtatttgagtctaatgcacgttctaacatgatagaggcaatgcattattgtgtagccacggttttctggaaaagttgatattttaggaattgtatttcagatcttaaataaaatttgtttctaaatttcaaagcaa

SEQ ID NO: 374870 - DNA, 510 bp, Homo sapiens
cctagttttagaagtttcaatagcaatttcaaagttgctaccagtgtatgcagtaattagaacaaagaagaaacattcagtagaacattttattgcctagttgacaacattgcttgaatgctggtggttcctatccctttgacactacacaattttctaatatgtgttaatgctatgtgacaaaacgccctgattcctagtgccaaaggttcaacttaatgtatatacctgaaaacccatgcatttgtgctcttttttttttttatggtgcttgaagtaaaacagcccatcctctgcaagtccatctatgttgttcttaggcattctatctttgctcaaattgttgaaggatggtgatttgtttcatggtttttgtatttgagtctaatgcacgttctaacatgatagaggcaatgcattattgtgtagccacggttttctggaaaagttgatattttaggaattgtatttcagatcttaaataaaatttgtttctaaatttcaaagcaa

SEQ ID NO: 374871 - DNA, 794 bp, Homo sapiens
  misc_feature (1)..(1): n is a, c, g, or t
  misc_feature (111)..(111): n is a, c, g, or t
nctagttttagaagtcatagcagctttattcataacagtaaaaaacaagcagaaagagcccaggtccatcagcagaaagataaaaaaacaaactgtgatgtattcatacgnaaagaatactcagcaataaaaagaaatgaatcactgacacatgcaacaacatgaataaatctcaaaaacattatgctattgaaacttcttagaactatctacttatcaagccatgaatcctcaagatcaaaatacactgctcaaccggagaagtggtttgacctaaatgttttagtttctggagagaaattcaggagcacctagctacttcattttcagtaagaacaatttttattgctttatttattggacgaataaagtactgtttcaggctattgaaacttctaaaaatgctggtggttcctatccctttgacactacacaattttctaatatgtgttaatgctatgtgacaaaacgccctgattcctagtgccaaaggttcaacttaatgtatatacctgaaaacccatgcatttgtgctcttttttttttttatggtgcttgaagtaaaacagcccatcctctgcaagtccatctatgttgttcttaggcattctatctttgctcaaattgttgaaggatggtgatttgtttcatggtttttgtatttgagtctaatgcacgttctaacatgatagaggcaatgcattattgtgtagccacggttttctggaaaagttgatattttaggaattgtatttcagatcttaaataaaatttgtttctaaatttcaaagcaa

SEQ ID NO: 374872 - DNA, 2030 bp, Homo sapiens
ggggggagtgcaagaaagaaagagatggagaacgagagcgagctggagatgaaccacatgcgatgagtaggccttgtttggatcctgaatcgaacacaccaactgtaaaaatatgtttaagacgcatcgggaaaattgggacacggattcgatatttgatgttttttagggaattgatgtcagtttttttaggcgtcacagtagtattgtgattatgttttcaaattgtccttttttgtagagacatacgaaaatatttacggattaaataatgtctgggattggcttctaaatacattaatgactaggatttgcttcaaaataatctcagcggtagggggaaatggggaggggtatagatgaaacaaaattggccctaaattaataatatttttttgctgagtgataggcagtgggttgcgtatattaatctgctttccttggtatacgtttaaatttttctataataaaatacagaagtcagatattccggtgagcttgaaaaagtcgggggtgggggggagcagtgggtggggttatagatgaaacaagatggccttcagttggtaattgttgaaagctggatgatggattcgtgtaggtttataatactatttcttttttatttcatccatttgaaattatatttaaggaaagttaaaaaacaaatttgtcagaaattatacaaatgtacaataaattaaatttgaaaatgtggccacaagaaaggaaaaagaaacacttgtacattatttatcagctttggtgtcctttgtgtgtgatgaaattgcattggctgatgtagaagaaagccatatctcatatctttttattttatgttctttcttgtccttttgtttgaccttctaggtcaccatcagaaaagctaagtttgctgtatagtgaggatcaggagatctgatcctgattgcagaaccttccctgattacagaatcttgggtaagtgcctcccttctgtcctcagttctcaaacaggataataccacataaccttcctaactgtccaggaatattttgaaaattaataagctcctatctgggaaagtagtctaaattctgagaagggaagggtggagctaagtccattgatagttccagtatagaaagtgcataagcaacagagggctttgtaatcttacatcccttgataaaagatactacagtcaatctcctgtagtagttccacagttccatagattacatttttccttggagcatcctatatgcagcatagtttagtggttaagagcaaatacttcctgaatttaaatcctggctctgccacttaactatgtgatcttgggcaagatatttactcactttatacctaagttcctcgtatatgaaacagaggtgataataatagttcctacttcataggattgttgagaggattacatgtaaagtaccaggacagtgcatggcacatgtaagtatttgctttaataataattatggttctgttagtcctgataatctcatgttttatctacacatttacacctacttctaaaagcagtggatatatttctttttggaattgtgtaaaaaaaaaaataataattaataccgttggtttctctcctcattttccagaagcagcagttaccactagaactgaattccgaaattatgacttctggcttgtcttaacaatctagaaaggtttcaaatatattgatcatatttatttatgagggaatttccaggagctataattttagctagcagttcaaaccaaatttataaataagcaaatcttttcactgaatattcagtctgctaacagcttttgtatcattcctcctttgtctcagacttaaaaaaaaaaaatctattacatgtaatggaaatgtttcaagatccagaagagaaaattgatatgaatgtaactgatatggtatatgtgcatttaaaggtttattccaacaaaatgttactcacactcttttctgacacatgcatacacaaaagatgttagcatttgcagtctgattcccaaatggccc

SEQ ID NO: 374873 - DNA, 1989 bp, Homo sapiens
atcatttgattatggaacattctaaaacttagacaagacgattgtgattggctgaagggcatacgccctcctccagggtgacgtgtctgcctatggatatcagttgccagagaaacctggctttactatggcggttggaggaacggcagtgatcacacgtcggctgctgggaagatctggattctcgtttcaggtcaccatcagaaaagctaagtttgctgtatagtgaggatcaggagatctgatcctgattgcagaaccttccctgattacagaatcttggatgatttcacaaaagttcatcttcattgcagatacctgcctttctttctaggttgtatctcccacttcacccttctagaccatcccagaagatctataagatttcatctgggaaatcactaggagttcttggaagggaaagaaggaagattgttggttggaataaaaacagggttgaatgagttccagaaagcagggttctcaacctcgtggacagcaatctgcagaagaagagaacttcaaaaaaccaactagaagcaacatgcagagaagtaaaatgagaggggcctcctcaggaaagaagacagctggtccacagcagaaaaatcttgaaccagctctcccaggaagatggggtggtcgctctgcagagaaccccccttcaggatccgtgaggaagaccagaaagaacaagcagaagactcctggaaacggagatggtggcagtaccagcgaagcacctcagccccctcggaagaaaagggcccgggcagaccccactgttgaaagtgaggaggcgtttaagaatagaatggaggttaaagtgaagattcctgaagaattaaaaccatggcttgttgaggactgggacttagttaccaggcagaagcagctgtttcaactccctgccaagaaaaatgtagatgcaattctggaggagtatgcaaattgcaagaaatcgcagggaaatgttgataataaggaatatgcggttaatgaagttgtggcaggaataaaagaatatttcaatgtgatgttgggcactcagctgctctacaaatttgagaggccccagtatgctgaaatcctcttggctcaccctgatgctccaatgtcccaggtttatggagcaccacacctactgagattatttgtaagaattggagcaatgttggcctatacgccccttgatgagaaaagccttgcattattgttgggctatttgcatgatttcctaaaatatctggcaaagaattctgcatctctctttactgccagtgattacaaagtggcttctgctgagtaccaccgcaaagccctgtgagcgtctacagacagctcaccatttttgtcctgtatctgtaaacactttttgttcttagtctttttcttgtaaaattgatgttctttaaaatcgttaatgtataacagggcttatgtttcagtttgttttccgttctgttttaaacagaaaataaaaggagtgtaagctccttttctcatttcaaagttgctaccagtgtatgcagtaattagaacaaagaagaaacattcagtagaacattttattgcctagttgacaacattgcttgaatgctggtggttcctatccctttgacactacacaattttctaatatgtgttaatgctatgtgacaaaacgccctgattcctagtgccaaaggttcaacttaatgtatatacctgaaaacccatgcatttgtgctcttttttttttttatggtgcttgaagtaaaacagcccatcctctgcaagtccatctatgttgttcttaggcattctatctttgctcaaattgttgaaggatggtgatttgtttcatggtttttgtatttgagtctaatgcacgttctaacatgatagaggcaatgcattattgtgtagccacggttttctggaaaagttgatattttaggaattgtatttcagatcttaaataaaatttgtttctaaatttcaaagcaa

SEQ ID NO: 374874 - DNA, 1938 bp, Homo sapiens
atcatttgattatggaacattctaaaacttagacaagacgattgtgattggctgaagggcatacgccctcctccagggtgacgtgtctgcctatggatatcagttgccagagaaacctggctttactatggcggttggaggaacggcagtgatcacacgtcggctgctgggaagatctggattctcgtttcaggtcaccatcagaaaagctaagtttgctgtatagtgaggatcaggagatctgatcctgattgcagaaccttccctgattacagaatcttgggttgtatctcccacttcacccttctagaccatcccagaagatctataagatttcatctgggaaatcactaggagttcttggaagggaaagaaggaagattgttggttggaataaaaacagggttgaatgagttccagaaagcagggttctcaacctcgtggacagcaatctgcagaagaagagaacttcaaaaaaccaactagaagcaacatgcagagaagtaaaatgagaggggcctcctcaggaaagaagacagctggtccacagcagaaaaatcttgaaccagctctcccaggaagatggggtggtcgctctgcagagaaccccccttcaggatccgtgaggaagaccagaaagaacaagcagaagactcctggaaacggagatggtggcagtaccagcgaagcacctcagccccctcggaagaaaagggcccgggcagaccccactgttgaaagtgaggaggcgtttaagaatagaatggaggttaaagtgaagattcctgaagaattaaaaccatggcttgttgaggactgggacttagttaccaggcagaagcagctgtttcaactccctgccaagaaaaatgtagatgcaattctggaggagtatgcaaattgcaagaaatcgcagggaaatgttgataataaggaatatgcggttaatgaagttgtggcaggaataaaagaatatttcaatgtgatgttgggcactcagctgctctacaaatttgagaggccccagtatgctgaaatcctcttggctcaccctgatgctccaatgtcccaggtttatggagcaccacacctactgagattatttgtaagaattggagcaatgttggcctatacgccccttgatgagaaaagccttgcattattgttgggctatttgcatgatttcctaaaatatctggcaaagaattctgcatctctctttactgccagtgattacaaagtggcttctgctgagtaccaccgcaaagccctgtgagcgtctacagacagctcaccatttttgtcctgtatctgtaaacactttttgttcttagtctttttcttgtaaaattgatgttctttaaaatcgttaatgtataacagggcttatgtttcagtttgttttccgttctgttttaaacagaaaataaaaggagtgtaagctccttttctcatttcaaagttgctaccagtgtatgcagtaattagaacaaagaagaaacattcagtagaacattttattgcctagttgacaacattgcttgaatgctggtggttcctatccctttgacactacacaattttctaatatgtgttaatgctatgtgacaaaacgccctgattcctagtgccaaaggttcaacttaatgtatatacctgaaaacccatgcatttgtgctcttttttttttttatggtgcttgaagtaaaacagcccatcctctgcaagtccatctatgttgttcttaggcattctatctttgctcaaattgttgaaggatggtgatttgtttcatggtttttgtatttgagtctaatgcacgttctaacatgatagaggcaatgcattattgtgtagccacggttttctggaaaagttgatattttaggaattgtatttcagatcttaaataaaatttgtttctaaatttcaaagcaa

SEQ ID NO: 374875 - DNA, 1911 bp, Homo sapiens
atctagtggcagactcgagaggtataaaccttactcacagaactttcgggaaaattaacagtgcgtatttgcctgaagaaggtcagtgtgcttgcttggagatcaggacgcaaaggtcaccatcagaaaagctaagtttgctgtatagtgaggatcaggagatctgatcctgattgcagaaccttccctgattacagaatcttggatgatttcacaaaagttcatcttcattgcagatacctgcctttctttctaggttgtatctcccacttcacccttctagaccatcccagaagatctataagatttcatctgggaaatcactaggagttcttggaagggaaagaaggaagattgttggttggaataaaaacagggttgaatgagttccagaaagcagggttctcaacctcgtggacagcaatctgcagaagaagagaacttcaaaaaaccaactagaagcaacatgcagagaagtaaaatgagaggggcctcctcaggaaagaagacagctggtccacagcagaaaaatcttgaaccagctctcccaggaagatggggtggtcgctctgcagagaaccccccttcaggatccgtgaggaagaccagaaagaacaagcagaagactcctggaaacggagatggtggcagtaccagcgaagcacctcagccccctcggaagaaaagggcccgggcagaccccactgttgaaagtgaggaggcgtttaagaatagaatggaggttaaagtgaagattcctgaagaattaaaaccatggcttgttgaggactgggacttagttaccaggcagaagcagctgtttcaactccctgccaagaaaaatgtagatgcaattctggaggagtatgcaaattgcaagaaatcgcagggaaatgttgataataaggaatatgcggttaatgaagttgtggcaggaataaaagaatatttcaatgtgatgttgggcactcagctgctctacaaatttgagaggccccagtatgctgaaatcctcttggctcaccctgatgctccaatgtcccaggtttatggagcaccacacctactgagattatttgtaagaattggagcaatgttggcctatacgccccttgatgagaaaagccttgcattattgttgggctatttgcatgatttcctaaaatatctggcaaagaattctgcatctctctttactgccagtgattacaaagtggcttctgctgagtaccaccgcaaagccctgtgagcgtctacagacagctcaccatttttgtcctgtatctgtaaacactttttgttcttagtctttttcttgtaaaattgatgttctttaaaatcgttaatgtataacagggcttatgtttcagtttgttttccgttctgttttaaacagaaaataaaaggagtgtaagctccttttctcatttcaaagttgctaccagtgtatgcagtaattagaacaaagaagaaacattcagtagaacattttattgcctagttgacaacattgcttgaatgctggtggttcctatccctttgacactacacaattttctaatatgtgttaatgctatgtgacaaaacgccctgattcctagtgccaaaggttcaacttaatgtatatacctgaaaacccatgcatttgtgctcttttttttttttatggtgcttgaagtaaaacagcccatcctctgcaagtccatctatgttgttcttaggcattctatctttgctcaaattgttgaaggatggtgatttgtttcatggtttttgtatttgagtctaatgcacgttctaacatgatagaggcaatgcattattgtgtagccacggttttctggaaaagttgatattttaggaattgtatttcagatcttaaataaaatttgtttctaaatttcaaagcaa

SEQ ID NO: 374876 - DNA, 1958 bp, Homo sapiens
atcatttgattatggaacattctaaaacttagacaagacgattgtgattggctgaagggcatacgccctcctccagggtgacgtgtctgcctatggatatcagttgccagagaaacctggctttactatggcggttggaggaacggcagtgatcacacgtcggctgctgggaagatctggattctcgtttcaggtcaccatcagaaaagctaagtttgctgtatagtgaggatcaggagatctgatcctgattgcagaaccttccctgattacagaatcttggatacctgcctttctttctaggttgtatctcccacttcacccttctagaccatcccagaagatctataagatttcatctgggaaatcactaggagttcttggaagggaaagaaggaagattgttggttggaataaaaacagggttgaatgagttccagaaagcagggttctcaacctcgtggacagcaatctgcagaagaagagaacttcaaaaaaccaactagaagcaacatgcagagaagtaaaatgagaggggcctcctcaggaaagaagacagctggtccacagcagaaaaatcttgaaccagctctcccaggaagatggggtggtcgctctgcagagaaccccccttcaggatccgtgaggaagaccagaaagaacaagcagaagactcctggaaacggagatggtggcagtaccagcgaagcacctcagccccctcggaagaaaagggcccgggcagaccccactgttgaaagtgaggaggcgtttaagaatagaatggaggttaaagtgaagattcctgaagaattaaaaccatggcttgttgaggactgggacttagttaccaggcagaagcagctgtttcaactccctgccaagaaaaatgtagatgcaattctggaggagtatgcaaattgcaagaaatcgcagggaaatgttgataataaggaatatgcggttaatgaagttgtggcaggaataaaagaatatttcaatgtgatgttgggcactcagctgctctacaaatttgagaggccccagtatgctgaaatcctcttggctcaccctgatgctccaatgtcccaggtttatggagcaccacacctactgagattatttgtaagaattggagcaatgttggcctatacgccccttgatgagaaaagccttgcattattgttgggctatttgcatgatttcctaaaatatctggcaaagaattctgcatctctctttactgccagtgattacaaagtggcttctgctgagtaccaccgcaaagccctgtgagcgtctacagacagctcaccatttttgtcctgtatctgtaaacactttttgttcttagtctttttcttgtaaaattgatgttctttaaaatcgttaatgtataacagggcttatgtttcagtttgttttccgttctgttttaaacagaaaataaaaggagtgtaagctccttttctcatttcaaagttgctaccagtgtatgcagtaattagaacaaagaagaaacattcagtagaacattttattgcctagttgacaacattgcttgaatgctggtggttcctatccctttgacactacacaattttctaatatgtgttaatgctatgtgacaaaacgccctgattcctagtgccaaaggttcaacttaatgtatatacctgaaaacccatgcatttgtgctcttttttttttttatggtgcttgaagtaaaacagcccatcctctgcaagtccatctatgttgttcttaggcattctatctttgctcaaattgttgaaggatggtgatttgtttcatggtttttgtatttgagtctaatgcacgttctaacatgatagaggcaatgcattattgtgtagccacggttttctggaaaagttgatattttaggaattgtatttcagatcttaaataaaatttgtttctaaatttcaaagcaa

SEQ ID NO: 374877 - DNA, 1960 bp, Homo sapiens
atctagtggcagactcgagaggtataaaccttactcacagaactttcgggaaaattaacagtgcgtatttgcctgaagaaggtcagtgtgcttgcttggagatcaggacgcaaaggtcaccatcagaaaagctaagtttgctgtatagtgaggatcaggagatctgatcctgattgcagaaccttccctgattacagaatcttgggattgttgagaggattacatgtaaagtaccaggacagtgcatggcacatatgatttcacaaaagttcatcttcattgcagatacctgcctttctttctaggttgtatctcccacttcacccttctagaccatcccagaagatctataagatttcatctgggaaatcactaggagttcttggaagggaaagaaggaagattgttggttggaataaaaacagggttgaatgagttccagaaagcagggttctcaacctcgtggacagcaatctgcagaagaagagaacttcaaaaaaccaactagaagcaacatgcagagaagtaaaatgagaggggcctcctcaggaaagaagacagctggtccacagcagaaaaatcttgaaccagctctcccaggaagatggggtggtcgctctgcagagaaccccccttcaggatccgtgaggaagaccagaaagaacaagcagaagactcctggaaacggagatggtggcagtaccagcgaagcacctcagccccctcggaagaaaagggcccgggcagaccccactgttgaaagtgaggaggcgtttaagaatagaatggaggttaaagtgaagattcctgaagaattaaaaccatggcttgttgaggactgggacttagttaccaggcagaagcagctgtttcaactccctgccaagaaaaatgtagatgcaattctggaggagtatgcaaattgcaagaaatcgcagggaaatgttgataataaggaatatgcggttaatgaagttgtggcaggaataaaagaatatttcaatgtgatgttgggcactcagctgctctacaaatttgagaggccccagtatgctgaaatcctcttggctcaccctgatgctccaatgtcccaggtttatggagcaccacacctactgagattatttgtaagaattggagcaatgttggcctatacgccccttgatgagaaaagccttgcattattgttgggctatttgcatgatttcctaaaatatctggcaaagaattctgcatctctctttactgccagtgattacaaagtggcttctgctgagtaccaccgcaaagccctgtgagcgtctacagacagctcaccatttttgtcctgtatctgtaaacactttttgttcttagtctttttcttgtaaaattgatgttctttaaaatcgttaatgtataacagggcttatgtttcagtttgttttccgttctgttttaaacagaaaataaaaggagtgtaagctccttttctcatttcaaagttgctaccagtgtatgcagtaattagaacaaagaagaaacattcagtagaacattttattgcctagttgacaacattgcttgaatgctggtggttcctatccctttgacactacacaattttctaatatgtgttaatgctatgtgacaaaacgccctgattcctagtgccaaaggttcaacttaatgtatatacctgaaaacccatgcatttgtgctcttttttttttttatggtgcttgaagtaaaacagcccatcctctgcaagtccatctatgttgttcttaggcattctatctttgctcaaattgttgaaggatggtgatttgtttcatggtttttgtatttgagtctaatgcacgttctaacatgatagaggcaatgcattattgtgtagccacggttttctggaaaagttgatattttaggaattgtatttcagatcttaaataaaatttgtttctaaatttcaaagcaa

SEQ ID NO: 374878 - DNA, 2615 bp, Homo sapiens
ggggggagtgcaagaaagaaagagatggagaacgagagcgagctggagatgaaccacatgcgatgagtaggccttgtttggatcctgaatcgaacacaccaactgtaaaaatatgtttaagacgcatcgggaaaattgggacacggattcgatatttgatgttttttagggaattgatgtcagtttttttaggcgtcacagtagtattgtgattatgttttcaaattgtccttttttgtagagacatacgaaaatatttacggattaaataatgtctgggattggcttctaaatacattaatgactaggatttgcttcaaaataatctcagcggtagggggaaatggggaggggtatagatgaaacaaaattggccctaaattaataatatttttttgctgagtgataggcagtgggttgcgtatattaatctgctttccttggtatacgtttaaatttttctataataaaatacagaagtcagatattccggtgagcttgaaaaagtcgggggtgggggggagcagtgggtggggttatagatgaaacaagatggccttcagttggtaattgttgaaagctggatgatggattcgtgtaggtttataatactatttcttttttatttcatccatttgaaattatatttaaggaaagttaaaaaacaaatttgtcagaaattatacaaatgtacaataaattaaatttgaaaatgtggccacaagaaaggaaaaagaaacacttgtacattatttatcagctttggtgtcctttgtgtgtgatgaaattgcattggctgatgtagaagaaagccatatctcatatctttttattttatgttctttcttgtccttttgtttgaccttctaggtcaccatcagaaaagctaagtttgctgtatagtgaggatcaggagatctgatcctgattgcagaaccttccctgattacagaatcttgggttgtatctcccacttcacccttctagaccatcccagaagatctataagatttcatctgggaaatcactaggagttcttggaagggaaagaaggaagattgttggttggaataaaaacagggttgaatgagttccagaaagcagggttctcaacctcgtggacagcaatctgcagaagaagagaacttcaaaaaaccaactagaagcaacatgcagagaagtaaaatgagaggggcctcctcaggaaagaagacagctggtccacagcagaaaaatcttgaaccagctctcccaggaagatggggtggtcgctctgcagagaaccccccttcaggatccgtgaggaagaccagaaagaacaagcagaagactcctggaaacggagatggtggcagtaccagcgaagcacctcagccccctcggaagaaaagggcccgggcagaccccactgttgaaagtgaggaggcgtttaagaatagaatggaggttaaagtgaagattcctgaagaattaaaaccatggcttgttgaggactgggacttagttaccaggcagaagcagctgtttcaactccctgccaagaaaaatgtagatgcaattctggaggagtatgcaaattgcaagaaatcgcagggaaatgttgataataaggaatatgcggttaatgaagttgtggcaggaataaaagaatatttcaatgtgatgttgggcactcagctgctctacaaatttgagaggccccagtatgctgaaatcctcttggctcaccctgatgctccaatgtcccaggtttatggagcaccacacctactgagattatttgtaagaattggagcaatgttggcctatacgccccttgatgagaaaagccttgcattattgttgggctatttgcatgatttcctaaaatatctggcaaagaattctgcatctctctttactgccagtgattacaaagtggcttctgctgagtaccaccgcaaagccctgtgagcgtctacagacagctcaccatttttgtcctgtatctgtaaacactttttgttcttagtctttttcttgtaaaattgatgttctttaaaatcgttaatgtataacagggcttatgtttcagtttgttttccgttctgttttaaacagaaaataaaaggagtgtaagctccttttctcatttcaaagttgctaccagtgtatgcagtaattagaacaaagaagaaacattcagtagaacattttattgcctagttgacaacattgcttgaatgctggtggttcctatccctttgacactacacaattttctaatatgtgttaatgctatgtgacaaaacgccctgattcctagtgccaaaggttcaacttaatgtatatacctgaaaacccatgcatttgtgctcttttttttttttatggtgcttgaagtaaaacagcccatcctctgcaagtccatctatgttgttcttaggcattctatctttgctcaaattgttgaaggatggtgatttgtttcatggtttttgtatttgagtctaatgcacgttctaacatgatagaggcaatgcattattgtgtagccacggttttctggaaaagttgatattttaggaattgtatttcagatcttaaataaaatttgtttctaaatttcaaagcaa

SEQ ID NO: 374879 - DNA, 1965 bp, Homo sapiens
atcatttgattatggaacattctaaaacttagacaagacgattgtgattggctgaagggcatacgccctcctccagggtgacgtgtctgcctatggatatcagttgccagagaaacctggctttactatggcggttggaggaacggcagtgatcacacgtcggctgctggtcaccatcagaaaagctaagtttgctgtatagtgaggatcaggagatctgatcctgattgcagaaccttccctgattacagaatcttggatgatttcacaaaagttcatcttcattgcagatacctgcctttctttctaggttgtatctcccacttcacccttctagaccatcccagaagatctataagatttcatctgggaaatcactaggagttcttggaagggaaagaaggaagattgttggttggaataaaaacagggttgaatgagttccagaaagcagggttctcaacctcgtggacagcaatctgcagaagaagagaacttcaaaaaaccaactagaagcaacatgcagagaagtaaaatgagaggggcctcctcaggaaagaagacagctggtccacagcagaaaaatcttgaaccagctctcccaggaagatggggtggtcgctctgcagagaaccccccttcaggatccgtgaggaagaccagaaagaacaagcagaagactcctggaaacggagatggtggcagtaccagcgaagcacctcagccccctcggaagaaaagggcccgggcagaccccactgttgaaagtgaggaggcgtttaagaatagaatggaggttaaagtgaagattcctgaagaattaaaaccatggcttgttgaggactgggacttagttaccaggcagaagcagctgtttcaactccctgccaagaaaaatgtagatgcaattctggaggagtatgcaaattgcaagaaatcgcagggaaatgttgataataaggaatatgcggttaatgaagttgtggcaggaataaaagaatatttcaatgtgatgttgggcactcagctgctctacaaatttgagaggccccagtatgctgaaatcctcttggctcaccctgatgctccaatgtcccaggtttatggagcaccacacctactgagattatttgtaagaattggagcaatgttggcctatacgccccttgatgagaaaagccttgcattattgttgggctatttgcatgatttcctaaaatatctggcaaagaattctgcatctctctttactgccagtgattacaaagtggcttctgctgagtaccaccgcaaagccctgtgagcgtctacagacagctcaccatttttgtcctgtatctgtaaacactttttgttcttagtctttttcttgtaaaattgatgttctttaaaatcgttaatgtataacagggcttatgtttcagtttgttttccgttctgttttaaacagaaaataaaaggagtgtaagctccttttctcatttcaaagttgctaccagtgtatgcagtaattagaacaaagaagaaacattcagtagaacattttattgcctagttgacaacattgcttgaatgctggtggttcctatccctttgacactacacaattttctaatatgtgttaatgctatgtgacaaaacgccctgattcctagtgccaaaggttcaacttaatgtatatacctgaaaacccatgcatttgtgctcttttttttttttatggtgcttgaagtaaaacagcccatcctctgcaagtccatctatgttgttcttaggcattctatctttgctcaaattgttgaaggatggtgatttgtttcatggtttttgtatttgagtctaatgcacgttctaacatgatagaggcaatgcattattgtgtagccacggttttctggaaaagttgatattttaggaattgtatttcagatcttaaataaaatttgtttctaaatttcaaagcaa

SEQ ID NO: 374880 - DNA, 1848 bp, Homo sapiens
cagctaacggagagataccttgacggatcgcgtggaaaaaatcgctccttccgatacagacatatcgagcaatctcgttcagagtcaccatcagaaaagctaagtttgctgtatagtgaggatcaggagatctgatcctgattgcagaaccttccctgattacagaatcttggatacctgcctttctttctaggttgtatctcccacttcacccttctagaccatcccagaagatctataagatttcatctgggaaatcactaggagttcttggaagggaaagaaggaagattgttggttggaataaaaacagggttgaatgagttccagaaagcagggttctcaacctcgtggacagcaatctgcagaagaagagaacttcaaaaaaccaactagaagcaacatgcagagaagtaaaatgagaggggcctcctcaggaaagaagacagctggtccacagcagaaaaatcttgaaccagctctcccaggaagatggggtggtcgctctgcagagaaccccccttcaggatccgtgaggaagaccagaaagaacaagcagaagactcctggaaacggagatggtggcagtaccagcgaagcacctcagccccctcggaagaaaagggcccgggcagaccccactgttgaaagtgaggaggcgtttaagaatagaatggaggttaaagtgaagattcctgaagaattaaaaccatggcttgttgaggactgggacttagttaccaggcagaagcagctgtttcaactccctgccaagaaaaatgtagatgcaattctggaggagtatgcaaattgcaagaaatcgcagggaaatgttgataataaggaatatgcggttaatgaagttgtggcaggaataaaagaatatttcaatgtgatgttgggcactcagctgctctacaaatttgagaggccccagtatgctgaaatcctcttggctcaccctgatgctccaatgtcccaggtttatggagcaccacacctactgagattatttgtaagaattggagcaatgttggcctatacgccccttgatgagaaaagccttgcattattgttgggctatttgcatgatttcctaaaatatctggcaaagaattctgcatctctctttactgccagtgattacaaagtggcttctgctgagtaccaccgcaaagccctgtgagcgtctacagacagctcaccatttttgtcctgtatctgtaaacactttttgttcttagtctttttcttgtaaaattgatgttctttaaaatcgttaatgtataacagggcttatgtttcagtttgttttccgttctgttttaaacagaaaataaaaggagtgtaagctccttttctcatttcaaagttgctaccagtgtatgcagtaattagaacaaagaagaaacattcagtagaacattttattgcctagttgacaacattgcttgaatgctggtggttcctatccctttgacactacacaattttctaatatgtgttaatgctatgtgacaaaacgccctgattcctagtgccaaaggttcaacttaatgtatatacctgaaaacccatgcatttgtgctcttttttttttttatggtgcttgaagtaaaacagcccatcctctgcaagtccatctatgttgttcttaggcattctatctttgctcaaattgttgaaggatggtgatttgtttcatggtttttgtatttgagtctaatgcacgttctaacatgatagaggcaatgcattattgtgtagccacggttttctggaaaagttgatattttaggaattgtatttcagatcttaaataaaatttgtttctaaatttcaaagcaa

SEQ ID NO: 374881 - DNA, 1938 bp, Homo sapiens
atcatttgattatggaacattctaaaacttagacaagacgattgtgattggctgaagggcatacgccctcctccagggtgacgtgtctgcctatggatatcagttgccagagaaacctggctttactatggcggttggaggaacggcagtgatcacacgtcggctgctgggaagatctggattctcgtttcaggtcaccatcagaaaagctaagtttgctgtatagtgaggatcaggagatctgatcctgattgcagaaccttccctgattacagaatcttggatgatttcacaaaagttcatcttcattgcagatacctgcctttctttctaggttgtatctcccacttcacccttctagaccatcccagaagatctataagatttcatctgggaaatcactaggagttcttggaagggaaagaaggaagattgttggttggaataaaaacagggttgaatgagttccagaaagcagggttctcaacctcgtggacagcaatctgcagaagaagagaacttcaaaaaaccaactagaagcaacatacagcagaaaaatcttgaaccagctctcccaggaagatggggtggtcgctctgcagagaaccccccttcaggatccgtgaggaagaccagaaagaacaagcagaagactcctggaaacggagatggtggcagtaccagcgaagcacctcagccccctcggaagaaaagggcccgggcagaccccactgttgaaagtgaggaggcgtttaagaatagaatggaggttaaagtgaagattcctgaagaattaaaaccatggcttgttgaggactgggacttagttaccaggcagaagcagctgtttcaactccctgccaagaaaaatgtagatgcaattctggaggagtatgcaaattgcaagaaatcgcagggaaatgttgataataaggaatatgcggttaatgaagttgtggcaggaataaaagaatatttcaatgtgatgttgggcactcagctgctctacaaatttgagaggccccagtatgctgaaatcctcttggctcaccctgatgctccaatgtcccaggtttatggagcaccacacctactgagattatttgtaagaattggagcaatgttggcctatacgccccttgatgagaaaagccttgcattattgttgggctatttgcatgatttcctaaaatatctggcaaagaattctgcatctctctttactgccagtgattacaaagtggcttctgctgagtaccaccgcaaagccctgtgagcgtctacagacagctcaccatttttgtcctgtatctgtaaacactttttgttcttagtctttttcttgtaaaattgatgttctttaaaatcgttaatgtataacagggcttatgtttcagtttgttttccgttctgttttaaacagaaaataaaaggagtgtaagctccttttctcatttcaaagttgctaccagtgtatgcagtaattagaacaaagaagaaacattcagtagaacattttattgcctagttgacaacattgcttgaatgctggtggttcctatccctttgacactacacaattttctaatatgtgttaatgctatgtgacaaaacgccctgattcctagtgccaaaggttcaacttaatgtatatacctgaaaacccatgcatttgtgctcttttttttttttatggtgcttgaagtaaaacagcccatcctctgcaagtccatctatgttgttcttaggcattctatctttgctcaaattgttgaaggatggtgatttgtttcatggtttttgtatttgagtctaatgcacgttctaacatgatagaggcaatgcattattgtgtagccacggttttctggaaaagttgatattttaggaattgtatttcagatcttaaataaaatttgtttctaaatttcaaagcaa

SEQ ID NO: 374882 - DNA, 2017 bp, Homo sapiens
atcatttgattatggaacattctaaaacttagacaagacgattgtgattggctgaagggcatacgccctcctccagggtgacgtgtctgcctatggatatcagttgccagagaaacctggctttactatggcggttggaggaacggcagtgatcacacgtcggctgctgggaagatctggattctcgtttcaggtcaccatcagaaaagctaagtttgctgtatagtgaggatcaggagatctgatcctgattgcagaaccttccctgattacagaatcttggatgatttcacaaaagttcatcttcattgcagatacctgcctttctttctaggttgtatctcccacttcacccttctagaccatcccagaagatctataagatttcatctgggaaatcactaggagttcttggaagggaaagaaggaagattgttggttggaataaaaacagggttgaatgagttccagaaagcagggttctcaacctcgtggacagcaatctgcagaagaagagaacttcaaaaaaccaactagaagcaacatgcagagaagtaaaatgagaggggcctcctcaggaaagaagacagctggtccacagcagaaaaatcttgaaccagctctcccaggaagatggggtggtcgctctgcagagaaccccccttcaggatccgtgaggaagaccagaaagaacaagcagaagactcctggaaacggagatggtggcagtaccagcgaagcacctcagccccctcggaagaaaagggcccgggcagaccccactgttgaaagtgaggaggcgtttaagaatagaatggaggttaaagtgaagattcctgaagaattaaaaccatggcttgttgaggactgggacttagttaccaggcagaagcagctgtttcaactccctgccaagaaaaatgtagatgcaattctggaggagtatgcaaattgcaagaaatcgcagggaaatgttgataataaggaatatgcggttaatgaagttgtggcaggaataaaagaatatttcaatgtgatgttgggcactcagctgctctacaaatttgagaggccccagtatgctgaaatcctcttggctcaccctgatgctccaatgtcccaggtttatggagcaccacacctactgagattatttgtaagaattggagcaatgttggcctatacgccccttgatgagaaaagccttgcattattgttgggctatttgcatgatttcctaaaatatctggcaaagaattctgcatctctctttactgccagtgattacaaagtggcttctgctgagtaccaccgcaaagccctgtgagcgtctacagacagctcaccatttttgtcctgtatctgtaaacactttttgttcttagtctttttcttgtaaaattgatgttctttaaaatcgttaatgtataacagggcttatgtttcagtttgttttccgttctgttttaaacagaaaataaaaggagtgtaagctccttttctcatttcaaagttgctaccagtgtatgcagtaattagaacaaagaagaaacattcagtagaacattttattgcctagttgacaacattgcttgaatgctggtggttcctatccctttgacactacacaattttctaatatgtgttaatgctatgtgacaaaacgccctgattcctagtgccaaaggttcaacttaatgtatatacctgaaaacccatgcatttgtgctcttttttttttttatggtgcttgaagtaaaacagcccatcctctgcaagtccatctatgttgttcttaggcattctatctttgctcaaattgttgaaggatggtgatttgtttcatggtttttgtatttgagtctaatgcacgttctaacatgatagaggcaatgcattattgtgtagccacggttttctggaaaagttgatattttaggaattgtatttcagatcttaaataaaatttgtttctaaatttcaaagcaaaaataatttaaacaatgcatttcatgtt

SEQ ID NO: 374883 - DNA, 1747 bp, Homo sapiens
atctagtggcagactcgagaggtataaaccttactcacagaactttcgggaaaattaacagtgcgtatttgcctgaagaaggtcagtgtgcttgcttggagatcaggacgcaaaggtcaccatcagaaaagctaagtttgctgtatagtgaggatcaggagatctgatcctgattgcagaaccttccctgattacagaatcttgggttgtatctcccacttcacccttctagaccatcccagaagatctataagatttcatctgggaaatcactaggagttcttggaagggaaagaaggaagattgttggttggaataaaaacagggttgaatgagttccagaaagcagggttctcaacctcgtggacagcaatctgcagaagaagagaacttcaaaaaaccaactagaagcaacatgcagagaagtaaaatgagaggggcctcctcaggaaagaagacagctggtccgaaacggagatggtggcagtaccagcgaagcacctcagccccctcggaagaaaagggcccgggcagaccccactgttgaaagtgaggaggcgtttaagaatagaatggaggttaaagtgaagattcctgaagaattaaaaccatggcttgttgaggactgggacttagttaccaggcagaagcagctgtttcaactccctgccaagaaaaatgtagatgcaattctggaggagtatgcaaattgcaagaaatcgcagggaaatgttgataataaggaatatgcggttaatgaagttgtggcaggaataaaagaatatttcaatgtgatgttgggcactcagctgctctacaaatttgagaggccccagtatgctgaaatcctcttggctcaccctgatgctccaatgtcccaggtttatggagcaccacacctactgagattatttgtaagaattggagcaatgttggcctatacgccccttgatgagaaaagccttgcattattgttgggctatttgcatgatttcctaaaatatctggcaaagaattctgcatctctctttactgccagtgattacaaagtggcttctgctgagtaccaccgcaaagccctgtgagcgtctacagacagctcaccatttttgtcctgtatctgtaaacactttttgttcttagtctttttcttgtaaaattgatgttctttaaaatcgttaatgtataacagggcttatgtttcagtttgttttccgttctgttttaaacagaaaataaaaggagtgtaagctccttttctcatttcaaagttgctaccagtgtatgcagtaattagaacaaagaagaaacattcagtagaacattttattgcctagttgacaacattgcttgaatgctggtggttcctatccctttgacactacacaattttctaatatgtgttaatgctatgtgacaaaacgccctgattcctagtgccaaaggttcaacttaatgtatatacctgaaaacccatgcatttgtgctcttttttttttttatggtgcttgaagtaaaacagcccatcctctgcaagtccatctatgttgttcttaggcattctatctttgctcaaattgttgaaggatggtgatttgtttcatggtttttgtatttgagtctaatgcacgttctaacatgatagaggcaatgcattattgtgtagccacggttttctggaaaagttgatattttaggaattgtatttcagatcttaaataaaatttgtttctaaatttcaaagcaa

SEQ ID NO: 374884 - DNA, 1935 bp, Homo sapiens
atcatttgattatggaacattctaaaacttagacaagacgattgtgattggctgaagggcatacgccctcctccagggtgacgtgtctgcctatggatatcagttgccagagaaacctggctttactatggcggttggaggaacggcagtgatcacacgtcggctgctgggaagatctggattctcgtttcaggtcaccatcagaaaagctaagtttgctgtatagtgaggatcaggagatctgatcctgattgcagaaccttccctgattacagaatcttggatgatttcacaaaagttcatcttcattgcagatacctgcctttctttctaggttgtatctcccacttcacccttctagaccatcccagaagatctataagatttcatctgggaaatcactaggagttcttggaagggaaagaaggaagattgttggttggaataaaaacagggttgaatgagttccagaaagcagggttctcaacctcgtggacagcaatctgcagaagaagagaacttcaaaaaaccaactagaagcaacatgcagagaagtaaaatgagaggggcctcctcaggaaagaagacagctggtccacagcagaaaaatcttgaaccagctctcccaggaagatggggtggtcgctctgcagagaaccccccttcaggatccgtgaggaagaccagaaagaacaagcagaagactcctggaaacggagatggtggcagtaccagcgaagcacctcagccccctcggaagaaaagggcccgggcagaccccactgttgaaagtgaggaggcgtttaagaatagaatggaggttaaagtgaagattcctgaagaattaaaaccatggcttgttgaggactgggacttagttaccaggcagaagcagctgtttcaactccctgccaagaaaaatgtagatgcaattctggaggagtatgcaaattgcaagaaatcgcagggaaatgttgataataaggaatatgcggttaatgaagttgtggcaggaataaaagaatatttcaatgtgatgttgggcactcagctgctctacaaatttgagaggccccagtatgctgaaatcctcttggctcaccctgatgctccaatgtcccaggtttatggagcaccacacctactgagattatttgtaagaattggagcaatgttggcctatacgccccttgatgagaaaagccttgcattattgttgggctatttgcatgatttcctaaaatatctggcaaagaattctgcatctctctttactgccagtgattacaaagtggcttctgctgagtaccaccgcaaagccctgtgagcgtctacagacagctcaccatttttgtcctgtatctgtaaacactttttgttcttagtctttttcttgtaaaattgatgttctttaaaatcgttaatgtataacagggcttatgtttcagtttgttttccgttctgttttaaacagaaaataattagaacaaagaagaaacattcagtagaacattttattgcctagttgacaacattgcttgaatgctggtggttcctatccctttgacactacacaattttctaatatgtgttaatgctatgtgacaaaacgccctgattcctagtgccaaaggttcaacttaatgtatatacctgaaaacccatgcatttgtgctcttttttttttttatggtgcttgaagtaaaacagcccatcctctgcaagtccatctatgttgttcttaggcattctatctttgctcaaattgttgaaggatggtgatttgtttcatggtttttgtatttgagtctaatgcacgttctaacatgatagaggcaatgcattattgtgtagccacggttttctggaaaagttgatattttaggaattgtatttcagatcttaaataaaatttgtttctaaatttcaaagcaa

SEQ ID NO: 374885 - DNA, 1931 bp, Homo sapiens
atcatttgattatggaacattctaaaacttagacaagacgattgtgattggctgaagggcatacgccctcctccagggtgacgtgtctgcctatggatatcagttgccagagaaacctggctttactatggcggttggaggaacggcagtgatcacacgtcggctgctgggaagatctggattctcgtttcaggtcaccatcagaaaagctaagtttgctgtatagtgaggatcaggagatctgatcctgattgcagaaccttccctgattacagaatcttggatgatttcacaaaagttcatcttcattgcagatacctgcctttctttctaggttgtatctcccacttcacccttctagaccatcccagaagatctataagatttcatctgggaaatcactaggagttcttggaagggaaagaaggaagattgttggttggaataaaaacagggttgaatgagttccagaaagcagggttctcaacctcgtggacagcaatctgcagaagaagagaacttcaaaaaaccaactagaagcaacatgcagagaagtaaaatgagaggggcctcctcaggaaagaagacagctggtccacagcagaaaaatcttgaaccagctctcccaggaagatggggtggtcgctctgcagagaaccccccttcaggatccgtgaggaagaccagaaagaacaagcagaagactcctggaaacggagatggtggcagtaccagcgaagcacctcagccccctcggaagaaaagggcccgggcagaccccactgttgaaagtgaggaggcgtttaagaatagaatggaggttaaagtgaagattcctgaagaattaaaaccatggcttgttgaggactgggacttagttaccaggcagaagcagctgtttcaactccctgccaagaaaaatgtagatgcaattctggaggagtatgcaaattgcaagaaatcgcagggaaatgttgataataaggaatatgcggttaatgaagttgtggcaggaataaaagaatatttcaatgtgatgttgggcactcagctgctctacaaatttgagaggccccagtatgctgaaatcctcttggctcaccctgatgctccaatgtcccaggtttatggagcaccacacctactgagattatttgtaagaattggagcaatgttggcctatacgccccttgatgagaaaagccttgcattattgttgggctatttgcatgatttcctaaaatatctggcaaagaattctgcatctctctttactgccagtgattacaaagtggcttctgctgagtaccaccgcaaagccctgtgagcgtctacagacagctcaccatttttgtcctgtatctgtaaacactttttgttcttagtctttttcttgtaaaattgatgttctttaaaatcgttaatgtataacagggcttatgtttcagtttgttttccgttctgttttaaacagaaaataaaaggagtgtaagctccttttctcatttcaaagttgctaccagtgtatgcagtaattagaacaaagaagaaacattcagtagaacattttattgcctagttgacaacattgcttgaatgctggtggttcctatccctttgacactacacaattttctaatatgtgttaatgctatgtgacaaaacgccctgattcctagtgttttatggtgcttgaagtaaaacagcccatcctctgcaagtccatctatgttgttcttaggcattctatctttgctcaaattgttgaaggatggtgatttgtttcatggtttttgtatttgagtctaatgcacgttctaacatgatagaggcaatgcattattgtgtagccacggttttctggaaaagttgatattttaggaattgtatttcagatcttaaataaaatttgtttctaaatttcaaagcaa

SEQ ID NO: 374886 - DNA, 716 bp, Homo sapiens
atcatttgattatggaacattctaaaacttagacaagacgattgtgattggctgaagggcatacgccctcctccagggtgacgtgtctgcctatggatatcagttgccagagaaacctggctttactatggcggttggaggaacggcagtgatcacacgtcggctgctgggaagatctggattctcgtttcaggtcaccatcagaaaagctaagtttgctgtatagtgaggatcaggagatctgatcctgattgcagaaccttccctgattacagaatcttgggattgttgagaggattacatgtaaagtaccaggacagtgcatggcacattggttggaataaaaacagggttgaatgagttccagaaagcagggttctcaacctcgtggacagcaatctgcagaagaagagaacttcaaaaaaccaactagaagcaacatgcagagaagtaaaatgagaggggcctcctcaggaaagaagacagctggtccacagcagaaaaatcttgaaccagctctcccaggaagatggggtggtcgctctgcagagaaccccccttcaggatccgtgaggaagaccagaaagaacaagcagaagactcctggaaacggagatggtggcagtaccagcgaagcacctcagcccccttcggggacaggaaaacaatgggtccccgggggccaaggaacccccaacttggtttgacacacgtga

SEQ ID NO: 374887 - DNA, 5339 bp, Homo sapiens
agttgttatacggcttttgtcttaacgaagccacccattacggtatgatgatgtcaaacgtgatgctgatgctacagttacagcccctgctggcgcagcctctctgattctctctccctctccgcgtccagtgctgggctttttcagacaagtgcatctcctaaccaggtcacatttcagccgcgacccactctccgccagtcaccggaggcagaccgcgggaggagagctgaggacagccgcgtgcgcttcgccagcagcggggtgggaggaaggacattaaaatactgcagaagtcaagaccccccaggtcgaacccagaccacgatgcgcgccccgggctgcgggcggctggtgctgccgctgctgctcctggccgcggcagccctggccgaaggcgacgccaaggggctcaaggagggcgagacccccggcaatttcatggaggacgagcaatggctgtcgtccatctcgcagtacagcggcaagatcaagcactggaaccgcttccgagacgaagtggaggatgactatatcaagagctgggaggacaatcagcaaggagatgaagccctggataccaccaaggacccctgccagaaggtgaagtgcagccgccacaaggtgtgcattgcccagggctaccagcgggccatgtgcatcagtcgcaagaagctggagcacaggatcaagcagccgaccgtgaaactccatggaaacaaagactccatctgcaagccctgccacatggcccagcttgcctctgtctgcggctcagatggccacacttacagctctgtgtgtaagctggagcaacaggcgtgcctgagcagcaagcagctggcggtgcgatgcgagggcccctgcccctgccccacggagcaggctgccacctccaccgccgatggcaaaccagagacttgcaccggtcaggacctggctgacctgggagatcggctgcgggactggttccagctccttcatgagaactccaagcagaatggctcagccagcagtgtagccggcccggccagcgggctggacaagagcctgggggccagctgcaaggactccattggctggatgttctccaagctggacaccagtgctgacctcttcctggaccagacggagctggccgccatcaacctggacaagtacgaggtctgcatccgtcccttcttcaactcctgtgacacctacaaggatggccgggtctctactgctgagtggtgcttctgcttctggagggagaagcccccctgcctggcagagctggagcgcatccagatccaggaggccgccaagaagaagccaggcatcttcatcccgagctgcgacgaggatggctactaccggaagatgcagtgtgaccagagcagcggtgactgctggtgtgtggaccagctgggcctggagctgactggcacgcgcacgcatgggagccccgactgcgatgacatcgtgggcttctcgggggactttggaagcggtgtcggctgggaggatgaggaggagaaggagacggaggaagcaggcgaggaggccgaggaggaggagggcgaggcaggcgaggctgacgacgggggctacatctggtagacgccctcagaagccggctgccgggggggactcaacagcagagctctgagcagcagcaggcaacttcgagaacggatccagaaatgcagtcagaaggaccctgctccacctggggggactgggagtgtgagtgtgcatggcatgtgtgtggcacagatggctgggacgggtgacagtgtgagtgcatgtgtgcatgcatgtgtgtatgtgtgtgtgtgtgtggcatgcgctgacaaatgtgtccttgatccacactgctcctggcagagtgagtaacccaaaggccccttcggcctccttgtagctgttttctttccttttgttgttggttttaaaatacattcacacacaaatacaaattgacaggtcaaaatccatgaaatgagatcccccagccgtgtcctccagcccagccctgaccccttggtttctaccctggctccccttggtttctaccctggctcaaccgacccctgtctgcccttctccctcctgcttctgaggtcaagctctggcctgcgagcctgtccccattgcaaaggggagggaggggcagggagctgtctaccagctgaggtcctcccaaaactgggccgatgtggtgtgacatccccaccagcctcagatgagacgggccaggacgcccagccacagcaagccctgtccctttgccggatccccaaacactagagaagctctcctaacccaaggcggagaatgaaggtggtggcggcagaggaggagggcagcagctgagaggccagggacagggtgcctcgccaagctgtctgaggtctgtcccaggtggcccaggtggtgcaggtagaacagggtgaggagagggggtcggctcaacaggaggaggctgtggctgcagagcctggaggagcttttaggtgttgagatggggcagctctgaatcctagaccctggaatagcctgtcccttttctctgggtctcgtggtggagccatgatctgggctgctctcttggggacactgggtggtggttacacagttgacctctgcctggctcccccttggtgcaactcctgcctccatcccccttgctggggtcccctcatccacttgagggcgcctgagggccaggagcagcaggcaaggagcctgggtctaggctaagggggtgtgtgcccacctcctccctgacccttaacactcctgtcctgcccagaccaacagagagagctgtccctgagaccccggagagaagcagctgccgaaagctgcagcctttccgcactctgagaccatgatcttcctcctgccaggggagagccacccacaggccatgtccagccccacttccctcagcccccagggcttccttctggcccctctgaggattccctagggctgccccgcagaggggcttccccaagctctgttttgaagcctgcaatgtggaaaagtgagaagtcagagggaacaggacaggtgcagccgggctctgaggccacacctcacacctcgctgttccccaacatcccctgagcagtgtgagctcatctcaccagatgagaagaggccctgtgcatttcttttgtttgtttgttgctgttttcccccacccatccagttctcctcagcaaagcaaattccttaacacctttggtggagaatttcttacccagacttggggctgtgatgcccttcagtgcgtggtgagtgcagcgtgtgtgcgtgtgcctgtgtgtgaacctgggggccatcctggtggcctgggagcgtgaggagaggccccctgtgtgctgggtgagtggtgggtgtggggtcaatgcagtgaggctctctgggtgaggctcccaacctggcagtccccagcctcccagcatctgtgagcgtctgttggactttacagaagagcctcatcccgtctgcccctcactctgccctggaatcaacatcttccgagtccttcttgggggaaatagcagagccccacttaactccataaactgcttcccattccgcagcccagttctgattgttgaggtgtcgcgtcgttccaggtcccccagtcccctctttctcctgtcctctctctgtccttcacctccccactccagccccggctcagttcagggaaatgctgttccacatcagccctctgctctctgaggcagccgcgcctctgactcggagctacttgaaacttctgctcttgctaggattggagtctacctatctcttccatttgtcccagctggagttctggaactttcctcctcggggtgggggtgggggttgttaaggatgctggggggcctggggaaggaaggagttcagaggaagggtgtcccctgtcctcttgatgtcaccctccgctcctgggacacgtgctctctctgtctctgggtcttctggctgtgcacgtttgtgtgtccttgtaaatatgttttaggaagaaagcaaaagggactgaactagcctctggtaggattgcaggggtccagccttgcctgtttccgaagcccccacactgcctttcgccccactgagactggtcccctcaaaaggtagacaaaacagcagctccctgtggagctgaagggcggcctcaaagtggctttttgttagacaaggttaaggtttcctcatgagcaaggttgcagatcggtccttcctcagctccttgatttgtgaccttgaccaaggggcctgccacccagcccctccagtgccctctcctcgatgcctcgctccttcctgcccccactcccctggcttaggcaggtaggggaattagggccatgctggaagaagcttaaccatgtgttcaaagaacggtttcttgcttgcttggtcctggaactccccttggctgccccaggcctccttggcccatgggtgctgggggaggtggatgtcagatctggtaggttgcagcagagaaaataaatgtgccttgagagaccactcagagagggtccaagggtgatggagaaggaagcatggcctgggagcttggaagggaggggtggtgggtggcggcatcttgactgccccctgttgtcccacacgtggggggtggtcaccccccttcactccagcccgcctgccttcagccttccatgagcttcacctgcttccaacttcactttggagggggtggggtccgttggcatcaacacggggaccctctgcttcaccaaagcccgagccctcagcccctggggagaacaaatggctgagctttgatacctggggtcgtcgagaggctgcgggctggcggcagtcccaggggagagacaccacagaaggagacccagacatcccgaggaagttcccagcagagcaaactgctttccagcctgaagcctgcttaaactgtgtgatgtgcaataactgagcttagagttaggaattgtgttcaagtgcttggatttccgtctgtagatttaactgctgaaattgtatctctcagtaattttagatgtcttttaaaaaattgaaaaacaaagtgttagactgtgtgcgtgtgcgttgatgggcactcaagagtcccgtgagtcatccagccctgcctttcccctgcgcccccatcctctcacgtcccgccccgcctccacttggggaccctgcctcgtgtcgtctttatctgcctattactcagcctaaggaaacaagtacactccacacatgcataaaggaaatcaaatgttatttttaagaaaatggaaaataaaaactttataaacaccaaaaaaaaaaaa

SEQ ID NO: 374888 - DNA, 5482 bp, Homo sapiens
ttcttgctctccatcctttgagggagctcagggacatttcgggattctggatttcttggtctgcaactccctgtgtgccaggcggggctgggccccgctgcggctggctggcgttggcgctctcatcgagggagcgcttcgctttgaaatctacccactcctttttttttttttttttaaaccaggtatgatgatgtcaaacgtgatgctgatgctacagttacagcccctgctggcgcagcctctctgattctctctccctctccgcgtccagtgctgggctttttcagacaagtgcatctcctaaccaggtcacatttcagccgcgacccactctccgccagtcaccggaggcagaccgcgggaggagagctgaggacagccgcgtgcgcttcgccagcagcggggtgggaggaaggacattaaaatactgcagaagtcaagaccccccaggtcgaacccagaccacgatgcgcgccccgggctgcgggcggctggtgctgccgctgctgctcctggccgcggcagccctggccgaaggcgacgccaaggggctcaaggagggcgagacccccggcaatttcatggaggacgagcaatggctgtcgtccatctcgcagtacagcggcaagatcaagcactggaaccgcttccgagacgaagtggaggatgactatatcaagagctgggaggacaatcagcaaggagatgaagccctggataccaccaaggacccctgccagaaggtgaagtgcagccgccacaaggtgtgcattgcccagggctaccagcgggccatgtgcatcagtcgcaagaagctggagcacaggatcaagcagccgaccgtgaaactccatggaaacaaagactccatctgcaagccctgccacatggcccagcttgcctctgtctgcggctcagatggccacacttacagctctgtgtgtaagctggagcaacaggcgtgcctgagcagcaagcagctggcggtgcgatgcgagggcccctgcccctgccccacggagcaggctgccacctccaccgccgatggcaaaccagagacttgcaccggtcaggacctggctgacctgggagatcggctgcgggactggttccagctccttcatgagaactccaagcagaatggctcagccagcagtgtagccggcccggccagcgggctggacaagagcctgggggccagctgcaaggactccattggctggatgttctccaagctggacaccagtgctgacctcttcctggaccagacggagctggccgccatcaacctggacaagtacgaggtctgcatccgtcccttcttcaactcctgtgacacctacaaggatggccgggtctctactgctgagtggtgcttctgcttctggagggagaagcccccctgcctggcagagctggagcgcatccagatccaggaggccgccaagaagaagccaggcatcttcatcccgagctgcgacgaggatggctactaccggaagatgcagtgtgaccagagcagcggtgactgctggtgtgtggaccagctgggcctggagctgactggcacgcgcacgcatgggagccccgactgcgatgacatcgtgggcttctcgggggactttggaagcggtgtcggctgggaggatgaggaggagaaggagacggaggaagcaggcgaggaggccgaggaggaggagggcgaggcaggcgaggctgacgacgggggctacatctggtagacgccctcagaagccggctgccgggggggactcaacagcagagctctgagcagcagcaggcaacttcgagaacggatccagaaatgcagtcagaaggaccctgctccacctggggggactgggagtgtgagtgtgcatggcatgtgtgtggcacagatggctgggacgggtgacagtgtgagtgcatgtgtgcatgcatgtgtgtatgtgtgtgtgtgtgtggcatgcgctgacaaatgtgtccttgatccacactgctcctggcagagtgagtaacccaaaggccccttcggcctccttgtagctgttttctttccttttgttgttggttttaaaatacattcacacacaaatacaaattgacaggtcaaaatccatgaaatgagatcccccagccgtgtcctccagcccagccctgaccccttggtttctaccctggctccccttggtttctaccctggctcaaccgacccctgtctgcccttctccctcctgcttctgaggtcaagctctggcctgcgagcctgtccccattgcaaaggggagggaggggcagggagctgtctaccagctgaggtcctcccaaaactgggccgatgtggtgtgacatccccaccagcctcagatgagacgggccaggacgcccagccacagcaagccctgtccctttgccggatccccaaacactagagaagctctcctaacccaaggcggagaatgaaggtggtggcggcagaggaggagggcagcagctgagaggccagggacagggtgcctcgccaagctgtctgaggtctgtcccaggtggcccaggtggtgcaggtagaacagggtgaggagagggggtcggctcaacaggaggaggctgtggctgcagagcctggaggagcttttaggtgttgagatggggcagctctgaatcctagaccctggaatagcctgtcccttttctctgggtctcgtggtggagccatgatctgggctgctctcttggggacactgggtggtggttacacagttgacctctgcctggctcccccttggtgcaactcctgcctccatcccccttgctggggtcccctcatccacttgagggcgcctgagggccaggagcagcaggcaaggagcctgggtctaggctaagggggtgtgtgcccacctcctccctgacccttaacactcctgtcctgcccagaccaacagagagagctgtccctgagaccccggagagaagcagctgccgaaagctgcagcctttccgcactctgagaccatgatcttcctcctgccaggggagagccacccacaggccatgtccagccccacttccctcagcccccagggcttccttctggcccctctgaggattccctagggctgccccgcagaggggcttccccaagctctgttttgaagcctgcaatgtggaaaagtgagaagtcagagggaacaggacaggtgcagccgggctctgaggccacacctcacacctcgctgttccccaacatcccctgagcagtgtgagctcatctcaccagatgagaagaggccctgtgcatttcttttgtttgtttgttgctgttttcccccacccatccagttctcctcagcaaagcaaattccttaacacctttggtggagaatttcttacccagacttggggctgtgatgcccttcagtgcgtggtgagtgcagcgtgtgtgcgtgtgcctgtgtgtgaacctgggggccatcctggtggcctgggagcgtgaggagaggccccctgtgtgctgggtgagtggtgggtgtggggtcaatgcagtgaggctctctgggtgaggctcccaacctggcagtccccagcctcccagcatctgtgagcgtctgttggactttacagaagagcctcatcccgtctgcccctcactctgccctggaatcaacatcttccgagtccttcttgggggaaatagcagagccccacttaactccataaactgcttcccattccgcagcccagttctgattgttgaggtgtcgcgtcgttccaggtcccccagtcccctctttctcctgtcctctctctgtccttcacctccccactccagccccggctcagttcagggaaatgctgttccacatcagccctctgctctctgaggcagccgcgcctctgactcggagctacttgaaacttctgctcttgctaggattggagtctacctatctcttccatttgtcccagctggagttctggaactttcctcctcggggtgggggtgggggttgttaaggatgctggggggcctggggaaggaaggagttcagaggaagggtgtcccctgtcctcttgatgtcaccctccgctcctgggacacgtgctctctctgtctctgggtcttctggctgtgcacgtttgtgtgtccttgtaaatatgttttaggaagaaagcaaaagggactgaactagcctctggtaggattgcaggggtccagccttgcctgtttccgaagcccccacactgcctttcgccccactgagactggtcccctcaaaaggtagacaaaacagcagctccctgtggagctgaagggcggcctcaaagtggctttttgttagacaaggttaaggtttcctcatgagcaaggttgcagatcggtccttcctcagctccttgatttgtgaccttgaccaaggggcctgccacccagcccctccagtgccctctcctcgatgcctcgctccttcctgcccccactcccctggcttaggcaggtaggggaattagggccatgctggaagaagcttaaccatgtgttcaaagaacggtttcttgcttgcttggtcctggaactccccttggctgccccaggcctccttggcccatgggtgctgggggaggtggatgtcagatctggtaggttgcagcagagaaaataaatgtgccttgagagaccactcagagagggtccaagggtgatggagaaggaagcatggcctgggagcttggaagggaggggtggtgggtggcggcatcttgactgccccctgttgtcccacacgtggggggtggtcaccccccttcactccagcccgcctgccttcagccttccatgagcttcacctgcttccaacttcactttggagggggtggggtccgttggcatcaacacggggaccctctgcttcaccaaagcccgagccctcagcccctggggagaacaaatggctgagctttgatacctggggtcgtcgagaggctgcgggctggcggcagtcccaggggagagacaccacagaaggagacccagacatcccgaggaagttcccagcagagcaaactgctttccagcctgaagcctgcttaaactgtgtgatgtgcaataactgagcttagagttaggaattgtgttcaagtgcttggatttccgtctgtagatttaactgctgaaattgtatctctcagtaattttagatgtcttttaaaaaattgaaaaacaaagtgttagactgtgtgcgtgtgcgttgatgggcactcaagagtcccgtgagtcatccagccctgcctttcccctgcgcccccatcctctcacgtcccgccccgcctccacttggggaccctgcctcgtgtcgtctttatctgcctattactcagcctaaggaaacaagtacactccacacatgcataaaggaaatcaaatgttatttttaagaaaatggaaaataaaaactttataaacaccaaaaaaaaaaaa

SEQ ID NO: 374889 - DNA, 4838 bp, Homo sapiens
gatctctatgatgatccccggcctatcgtggatctgcccgtgaccctcgtgagagaatttatagagcggcagcacgcaaagaacaggtattactactaccaccggcagtaccgccgcgtgccagacatcactgagtgcaaggaggaggacatcatgtgcatcagtcgcaagaagctggggcacaggatcaagcagccgaccgtgaaactccatggaaacaaagactccatctgcaagccctgccacatggcccagcttgcctctgtctgcggctcagatggccacacttacagctctgtgtgtaagctggagcaacaggcgtgcctgagcagcaagcagctggcggtgcgatgcgagggcccctgcccctgccccacggagcaggctgccacctccaccgccgatggcaaaccagagacttgcaccggtcaggacctggctgacctgggagatcggctgcgggactggttccagctccttcatgagaactccaagcagaatggctcagccagcagtgtagccggcccggccagcgggctggacaagagcctgggggccagctgcaaggactccattggctggatgttctccaagctggacaccagtgctgacctcttcctggaccagacggagctggccgccatcaacctggacaagtacgaggtctgcatccgtcccttcttcaactcctgtgacacctacaaggatggccgggtctctactgctgagtggtgcttctgcttctggagggagaagcccccctgcctggcagagctggagcgcatccagatccaggaggccgccaagaagaagccaggcatcttcatcccgagctgcgacgaggatggctactaccggaagatgcagtgtgaccagagcagcggtgactgctggtgtgtggaccagctgggcctggagctgactggcacgcgcacgcatgggagccccgactgcgatgacatcgtgggcttctcgggggactttggaagcggtgtcggctgggaggatgaggaggagaaggagacggaggaagcaggcgaggaggccgaggaggaggagggcgaggcaggcgaggctgacgacgggggctacatctggtagacgccctcagaagccggctgccgggggggactcaacagcagagctctgagcagcagcaggcaacttcgagaacggatccagaaatgcagtcagaaggaccctgctccacctggggggactgggagtgtgagtgtgcatggcatgtgtgtggcacagatggctgggacgggtgacagtgtgagtgcatgtgtgcatgcatgtgtgtatgtgtgtgtgtgtgtggcatgcgctgacaaatgtgtccttgatccacactgctcctggcagagtgagtaacccaaaggccccttcggcctccttgtagctgttttctttccttttgttgttggttttaaaatacattcacacacaaatacaaattgacaggtcaaaatccatgaaatgagatcccccagccgtgtcctccagcccagccctgaccccttggtttctaccctggctccccttggtttctaccctggctcaaccgacccctgtctgcccttctccctcctgcttctgaggtcaagctctggcctgcgagcctgtccccattgcaaaggggagggaggggcagggagctgtctaccagctgaggtcctcccaaaactgggccgatgtggtgtgacatccccaccagcctcagatgagacgggccaggacgcccagccacagcaagccctgtccctttgccggatccccaaacactagagaagctctcctaacccaaggcggagaatgaaggtggtggcggcagaggaggagggcagcagctgagaggccagggacagggtgcctcgccaagctgtctgaggtctgtcccaggtggcccaggtggtgcaggtagaacagggtgaggagagggggtcggctcaacaggaggaggctgtggctgcagagcctggaggagcttttaggtgttgagatggggcagctctgaatcctagaccctggaatagcctgtcccttttctctgggtctcgtggtggagccatgatctgggctgctctcttggggacactgggtggtggttacacagttgacctctgcctggctcccccttggtgcaactcctgcctccatcccccttgctggggtcccctcatccacttgagggcgcctgagggccaggagcagcaggcaaggagcctgggtctaggctaagggggtgtgtgcccacctcctccctgacccttaacactcctgtcctgcccagaccaacagagagagctgtccctgagaccccggagagaagcagctgccgaaagctgcagcctttccgcactctgagaccatgatcttcctcctgccaggggagagccacccacaggccatgtccagccccacttccctcagcccccagggcttccttctggcccctctgaggattccctagggctgccccgcagaggggcttccccaagctctgttttgaagcctgcaatgtggaaaagtgagaagtcagagggaacaggacaggtgcagccgggctctgaggccacacctcacacctcgctgttccccaacatcccctgagcagtgtgagctcatctcaccagatgagaagaggccctgtgcatttcttttgtttgtttgttgctgttttcccccacccatccagttctcctcagcaaagcaaattccttaacacctttggtggagaatttcttacccagacttggggctgtgatgcccttcagtgcgtggtgagtgcagcgtgtgtgcgtgtgcctgtgtgtgaacctgggggccatcctggtggcctgggagcgtgaggagaggccccctgtgtgctgggtgagtggtgggtgtggggtcaatgcagtgaggctctctgggtgaggctcccaacctggcagtccccagcctcccagcatctgtgagcgtctgttggactttacagaagagcctcatcccgtctgcccctcactctgccctggaatcaacatcttccgagtccttcttgggggaaatagcagagccccacttaactccataaactgcttcccattccgcagcccagttctgattgttgaggtgtcgcgtcgttccaggtcccccagtcccctctttctcctgtcctctctctgtccttcacctccccactccagccccggctcagttcagggaaatgctgttccacatcagccctctgctctctgaggcagccgcgcctctgactcggagctacttgaaacttctgctcttgctaggattggagtctacctatctcttccatttgtcccagctggagttctggaactttcctcctcggggtgggggtgggggttgttaaggatgctggggggcctggggaaggaaggagttcagaggaagggtgtcccctgtcctcttgatgtcaccctccgctcctgggacacgtgctctctctgtctctgggtcttctggctgtgcacgtttgtgtgtccttgtaaatatgttttaggaagaaagcaaaagggactgaactagcctctggtaggattgcaggggtccagccttgcctgtttccgaagcccccacactgcctttcgccccactgagactggtcccctcaaaaggtagacaaaacagcagctccctgtggagctgaagggcggcctcaaagtggctttttgttagacaaggttaaggtttcctcatgagcaaggttgcagatcggtccttcctcagctccttgatttgtgaccttgaccaaggggcctgccacccagcccctccagtgccctctcctcgatgcctcgctccttcctgcccccactcccctggcttaggcaggtaggggaattagggccatgctggaagaagcttaaccatgtgttcaaagaacggtttcttgcttgcttggtcctggaactccccttggctgccccaggcctccttggcccatgggtgctgggggaggtggatgtcagatctggtaggttgcagcagagaaaataaatgtgccttgagagaccactcagagagggtccaagggtgatggagaaggaagcatggcctgggagcttggaagggaggggtggtgggtggcggcatcttgactgccccctgttgtcccacacgtggggggtggtcaccccccttcactccagcccgcctgccttcagccttccatgagcttcacctgcttccaacttcactttggagggggtggggtccgttggcatcaacacggggaccctctgcttcaccaaagcccgagccctcagcccctggggagaacaaatggctgagctttgatacctggggtcgtcgagaggctgcgggctggcggcagtcccaggggagagacaccacagaaggagacccagacatcccgaggaagttcccagcagagcaaactgctttccagcctgaagcctgcttaaactgtgtgatgtgcaataactgagcttagagttaggaattgtgttcaagtgcttggatttccgtctgtagatttaactgctgaaattgtatctctcagtaattttagatgtcttttaaaaaattgaaaaacaaagtgttagactgtgtgcgtgtgcgttgatgggcactcaagagtcccgtgagtcatccagccctgcctttcccctgcgcccccatcctctcacgtcccgccccgcctccacttggggaccctgcctcgtgtcgtctttatctgcctattactcagcctaaggaaacaagtacactccacacatgcataaaggaaatcaaatgttatttttaagaaaatggaaaataaaaactttataaacaccaaaaaaaaaaaa

SEQ ID NO: 374890 - DNA, 4648 bp, Homo sapiens
acctgcagccctggctggaactacctgagagttggagccagaccctgtctgtccctgacctcggacaggtgcaggtggggagtggggcctggaagagacactatggtcagtgtaagctggagcaacaggcgtgcctgagcagcaagcagctggcggtgcgatgcgagggcccctgcccctgccccacggagcaggctgccacctccaccgccgatggcaaaccagagacttgcaccggtcaggacctggctgacctgggagatcggctgcgggactggttccagctccttcatgagaactccaagcagaatggctcagccagcagtgtagccggcccggccagcgggctggacaagagcctgggggccagctgcaaggactccattggctggatgttctccaagctggacaccagtgctgacctcttcctggaccagacggagctggccgccatcaacctggacaagtacgaggtctgcatccgtcccttcttcaactcctgtgacacctacaaggatggccgggtctctactgctgagtggtgcttctgcttctggagggagaagcccccctgcctggcagagctggagcgcatccagatccaggaggccgccaagaagaagccaggcatcttcatcccgagctgcgacgaggatggctactaccggaagatgcagtgtgaccagagcagcggtgactgctggtgtgtggaccagctgggcctggagctgactggcacgcgcacgcatgggagccccgactgcgatgacatcgtgggcttctcgggggactttggaagcggtgtcggctgggaggatgaggaggagaaggagacggaggaagcaggcgaggaggccgaggaggaggagggcgaggcaggcgaggctgacgacgggggctacatctggtagacgccctcagaagccggctgccgggggggactcaacagcagagctctgagcagcagcaggcaacttcgagaacggatccagaaatgcagtcagaaggaccctgctccacctggggggactgggagtgtgagtgtgcatggcatgtgtgtggcacagatggctgggacgggtgacagtgtgagtgcatgtgtgcatgcatgtgtgtatgtgtgtgtgtgtgtggcatgcgctgacaaatgtgtccttgatccacactgctcctggcagagtgagtaacccaaaggccccttcggcctccttgtagctgttttctttccttttgttgttggttttaaaatacattcacacacaaatacaaattgacaggtcaaaatccatgaaatgagatcccccagccgtgtcctccagcccagccctgaccccttggtttctaccctggctccccttggtttctaccctggctcaaccgacccctgtctgcccttctccctcctgcttctgaggtcaagctctggcctgcgagcctgtccccattgcaaaggggagggaggggcagggagctgtctaccagctgaggtcctcccaaaactgggccgatgtggtgtgacatccccaccagcctcagatgagacgggccaggacgcccagccacagcaagccctgtccctttgccggatccccaaacactagagaagctctcctaacccaaggcggagaatgaaggtggtggcggcagaggaggagggcagcagctgagaggccagggacagggtgcctcgccaagctgtctgaggtctgtcccaggtggcccaggtggtgcaggtagaacagggtgaggagagggggtcggctcaacaggaggaggctgtggctgcagagcctggaggagcttttaggtgttgagatggggcagctctgaatcctagaccctggaatagcctgtcccttttctctgggtctcgtggtggagccatgatctgggctgctctcttggggacactgggtggtggttacacagttgacctctgcctggctcccccttggtgcaactcctgcctccatcccccttgctggggtcccctcatccacttgagggcgcctgagggccaggagcagcaggcaaggagcctgggtctaggctaagggggtgtgtgcccacctcctccctgacccttaacactcctgtcctgcccagaccaacagagagagctgtccctgagaccccggagagaagcagctgccgaaagctgcagcctttccgcactctgagaccatgatcttcctcctgccaggggagagccacccacaggccatgtccagccccacttccctcagcccccagggcttccttctggcccctctgaggattccctagggctgccccgcagaggggcttccccaagctctgttttgaagcctgcaatgtggaaaagtgagaagtcagagggaacaggacaggtgcagccgggctctgaggccacacctcacacctcgctgttccccaacatcccctgagcagtgtgagctcatctcaccagatgagaagaggccctgtgcatttcttttgtttgtttgttgctgttttcccccacccatccagttctcctcagcaaagcaaattccttaacacctttggtggagaatttcttacccagacttggggctgtgatgcccttcagtgcgtggtgagtgcagcgtgtgtgcgtgtgcctgtgtgtgaacctgggggccatcctggtggcctgggagcgtgaggagaggccccctgtgtgctgggtgagtggtgggtgtggggtcaatgcagtgaggctctctgggtgaggctcccaacctggcagtccccagcctcccagcatctgtgagcgtctgttggactttacagaagagcctcatcccgtctgcccctcactctgccctggaatcaacatcttccgagtccttcttgggggaaatagcagagccccacttaactccataaactgcttcccattccgcagcccagttctgattgttgaggtgtcgcgtcgttccaggtcccccagtcccctctttctcctgtcctctctctgtccttcacctccccactccagccccggctcagttcagggaaatgctgttccacatcagccctctgctctctgaggcagccgcgcctctgactcggagctacttgaaacttctgctcttgctaggattggagtctacctatctcttccatttgtcccagctggagttctggaactttcctcctcggggtgggggtgggggttgttaaggatgctggggggcctggggaaggaaggagttcagaggaagggtgtcccctgtcctcttgatgtcaccctccgctcctgggacacgtgctctctctgtctctgggtcttctggctgtgcacgtttgtgtgtccttgtaaatatgttttaggaagaaagcaaaagggactgaactagcctctggtaggattgcaggggtccagccttgcctgtttccgaagcccccacactgcctttcgccccactgagactggtcccctcaaaaggtagacaaaacagcagctccctgtggagctgaagggcggcctcaaagtggctttttgttagacaaggttaaggtttcctcatgagcaaggttgcagatcggtccttcctcagctccttgatttgtgaccttgaccaaggggcctgccacccagcccctccagtgccctctcctcgatgcctcgctccttcctgcccccactcccctggcttaggcaggtaggggaattagggccatgctggaagaagcttaaccatgtgttcaaagaacggtttcttgcttgcttggtcctggaactccccttggctgccccaggcctccttggcccatgggtgctgggggaggtggatgtcagatctggtaggttgcagcagagaaaataaatgtgccttgagagaccactcagagagggtccaagggtgatggagaaggaagcatggcctgggagcttggaagggaggggtggtgggtggcggcatcttgactgccccctgttgtcccacacgtggggggtggtcaccccccttcactccagcccgcctgccttcagccttccatgagcttcacctgcttccaacttcactttggagggggtggggtccgttggcatcaacacggggaccctctgcttcaccaaagcccgagccctcagcccctggggagaacaaatggctgagctttgatacctggggtcgtcgagaggctgcgggctggcggcagtcccaggggagagacaccacagaaggagacccagacatcccgaggaagttcccagcagagcaaactgctttccagcctgaagcctgcttaaactgtgtgatgtgcaataactgagcttagagttaggaattgtgttcaagtgcttggatttccgtctgtagatttaactgctgaaattgtatctctcagtaattttagatgtcttttaaaaaattgaaaaacaaagtgttagactgtgtgcgtgtgcgttgatgggcactcaagagtcccgtgagtcatccagccctgcctttcccctgcgcccccatcctctcacgtcccgccccgcctccacttggggaccctgcctcgtgtcgtctttatctgcctattactcagcctaaggaaacaagtacactccacacatgcataaaggaaatcaaatgttatttttaagaaaatggaaaataaaaactttataaacaccaaaaaaaaaaaa

SEQ ID NO: 374891 - DNA, 1191 bp, Homo sapiens
catccaacgccgcagtgactgcatccaacgccgctgactgcatccaacgccgctgactgcatccaacgccgctcatgagcaaggttgcagatcggtccttcctcagctccttgatttgtgaccttgaccaaggggcctgccacccagcccctccagtgccctctcctcgatgcctcgctccttcctgcccccactcccctggcttaggcaggtaggggaattagggccatgctggaagaagcttaaccatgtgttcaaagaacggtttcttgcttgcttggtcctggaactccccttggctgccccaggcctccttggcccatgggtgctgggggaggtggatgtcagatctggtaggttgcagcagagaaaataaatgtgccttgagagaccactcagagagggtccaagggtgatggagaaggaagcatggcctgggagcttggaagggaggggtggtgggtggcggcatcttgactgccccctgttgtcccacacgtggggggtggtcaccccccttcactccagcccgcctgccttcagccttccatgagcttcacctgcttccaacttcactttggagggggtggggtccgttggcatcaacacggggaccctctgcttcaccaaagcccgagccctcagcccctggggagaacaaatggctgagctttgatacctggggtcgtcgagaggctgcgggctggcggcagtcccaggggagagacaccacagaaggagacccagacatcccgaggaagttcccagcagagcaaactgctttccagcctgaagcctgcttaaactgtgtgatgtgcaataactgagcttagagttaggaattgtgttcaagtgcttggatttccgtctgtagatttaactgctgaaattgtatctctcagtaattttagatgtcttttaaaaaattgaaaaacaaagtgttagactgtgtgcgtgtgcgttgatgggcactcaagagtcccgtgagtcatccagccctgcctttcccctgcgcccccatcctctcacgtcccgccccgcctccacttggggaccctgcctcgtgtcgtctttatctgcctattactcagcctaaggaaacaagtacactccacacatgcataaaggaaatcaaatgttatttttaagaaaatggaaaataaaaactttataaacaccaaaaaaaaaaaa

SEQ ID NO: 374892 - DNA, 807 bp, Homo sapiens
taaactatgtcgtcagcgtggtgggtgcacagcaaatccatctgtgcagagcctatcttcccagtctcttcttacagctgatggagatgactctactgcaaaaatgacaaccagcaagaaagcgggtggtgcccgtttcctccctggggaccctcagagggccaggccattctcttccttggtgtgactgcggatccagggtaagaagtgtgagactctcgtgtagacgcctggcttgtccttcagggcacatccatgagagtctccgtcgaactagttcgacggagactctcccctggggtcgtcgagaggctgcgggctggcggcagtcccaggggagagacaccacagaaggagacccagacatcccgaggaagttcccagcagagcaaactgctttccagcctgaagcctgcttaaactgtgtgatgtgcaataactgagcttagagttaggaattgtgttcaagtgcttggatttccgtctgtagatttaactgctgaaattgtatctctcagtaattttagatgtcttttaaaaaattgaaaaacaaagtgttagactgtgtgcgtgtgcgttgatgggcactcaagagtcccgtgagtcatccagccctgcctttcccctgcgcccccatcctctcacgtcccgccccgcctccacttggggaccctgcctcgtgtcgtctttatctgcctattactcagcctaaggaaacaagtacactccacacatgcataaaggaaatcaaatgttatttttaagaaaatggaaaataaaaactttataaacaccaaaaaaaaaaaa

SEQ ID NO: 374893 - DNA, 603 bp, Homo sapiens
agttgttatacggcttttgtcttaacgaagccacccattacggtatgatgatgtcaaacgtgatgctgatgctacagttacagcccctgctggcgcagcctctctgattctctctccctctccgcgtccagtgctgggctttttcagacaagtgcatctcctaaccaggtcacatttcagccgcgacccactctccgccagtcaccggaggcagaccgcgggaggagagctgaggacagccgcgtgcgcttcgccagcagcggggtgggaggaaggacattaaaatactgcagaagtcaagaccccccaggtcgaacccagaccacgatgcgcgccccgggctgcgggcggctggtgctgccgctgctgctcctggccgcggcagccctggccgaaggcgacgccaaggggctcaaggagggcgagacccccggcaatttcatggaggacgagcaatggctgtcgtccatctcgcagtacagcggcaagatcaagcactggaaccgcttccgagacgaagtggaagtccgcagggctgccaaggcagagacccggggttgcgggttcggggattgagctccggggtctgcgggagcggccgcc

SEQ ID NO: 374894 - DNA, 818 bp, Homo sapiens
aggagaaaaggccctggtcagaacctggctttagcaggcagctgtggcagaagcagttcttagcgaaggccgaggaattgttagatgctccataggcggtgctgtgtcctatcaggagaactgagaaaagtccactgggtgtaagctggagcaacaggcgtgcctgagcagcaagcagctggcggtgcgatgcgagggcccctgcccctgccccacggagcaggctgccacctccaccgccgatggcaaaccagagacttgcaccggtcaggacctggctgacctgggagatcggctgcgggactggttccagctccttcatgagaactccaagcagaatggctcagccagcagtgtagccggcccggccagcgggctggacaagagcctgggggccagctgcaaggactccattggctggatgttctccaagctggacaccagtgctgacctcttcctggaccagacggagctggccgccatcaacctggacaagtacgaggtctgcatccgtcccttcttcaactcctgtgacacctacaaggatggccgggtctctactgctgagtggtgcttctgcttctggagggagaagcccccctgcctggcagagctggagcgcatccagatccaggaggccgccaagaagaagccaggcatcttcatcccgagctgcgacgaggatggctactaccggaagatgcagtgtgaccagagcagcggtgactgctggtgtgtggaccagctgggcctggagctgactggcacgcgcacgcatgggagccccgactgcggtacgggctgggcagctcagggcc

SEQ ID NO: 374895 - DNA, 4235 bp, Homo sapiens
aggctcggcctcaccttaaccgcgtacctcacctaaccgcgctaactggacaagtacgaggtctgcatccgtcccttcttcaactcctgtgacacctacaaggatggccgggtctctactgctgagtggtgcttctgcttctggagggagaagcccccctgcctggcagagctggagcgcatccagatccaggaggccgccaagaagaagccaggcatcttcatcccgagctgcgacgaggatggctactaccggaagatgcagtgtgaccagagcagcggtgactgctggtgtgtggaccagctgggcctggagctgactggcacgcgcacgcatgggagccccgactgcgatgacatcgtgggcttctcgggggactttggaagcggtgtcggctgggaggatgaggaggagaaggagacggaggaagcaggcgaggaggccgaggaggaggagggcgaggcaggcgaggctgacgacgggggctacatctggtagacgccctcagaagccggctgccgggggggactcaacagcagagctctgagcagcagcaggcaacttcgagaacggatccagaaatgcagtcagaaggaccctgctccacctggggggactgggagtgtgagtgtgcatggcatgtgtgtggcacagatggctgggacgggtgacagtgtgagtgcatgtgtgcatgcatgtgtgtatgtgtgtgtgtgtgtggcatgcgctgacaaatgtgtccttgatccacactgctcctggcagagtgagtaacccaaaggccccttcggcctccttgtagctgttttctttccttttgttgttggttttaaaatacattcacacacaaatacaaattgacaggtcaaaatccatgaaatgagatcccccagccgtgtcctccagcccagccctgaccccttggtttctaccctggctccccttggtttctaccctggctcaaccgacccctgtctgcccttctccctcctgcttctgaggtcaagctctggcctgcgagcctgtccccattgcaaaggggagggaggggcagggagctgtctaccagctgaggtcctcccaaaactgggccgatgtggtgtgacatccccaccagcctcagatgagacgggccaggacgcccagccacagcaagccctgtccctttgccggatccccaaacactagagaagctctcctaacccaaggcggagaatgaaggtggtggcggcagaggaggagggcagcagctgagaggccagggacagggtgcctcgccaagctgtctgaggtctgtcccaggtggcccaggtggtgcaggtagaacagggtgaggagagggggtcggctcaacaggaggaggctgtggctgcagagcctggaggagcttttaggtgttgagatggggcagctctgaatcctagaccctggaatagcctgtcccttttctctgggtctcgtggtggagccatgatctgggctgctctcttggggacactgggtggtggttacacagttgacctctgcctggctcccccttggtgcaactcctgcctccatcccccttgctggggtcccctcatccacttgagggcgcctgagggccaggagcagcaggcaaggagcctgggtctaggctaagggggtgtgtgcccacctcctccctgacccttaacactcctgtcctgcccagaccaacagagagagctgtccctgagaccccggagagaagcagctgccgaaagctgcagcctttccgcactctgagaccatgatcttcctcctgccaggggagagccacccacaggccatgtccagccccacttccctcagcccccagggcttccttctggcccctctgaggattccctagggctgccccgcagaggggcttccccaagctctgttttgaagcctgcaatgtggaaaagtgagaagtcagagggaacaggacaggtgcagccgggctctgaggccacacctcacacctcgctgttccccaacatcccctgagcagtgtgagctcatctcaccagatgagaagaggccctgtgcatttcttttgtttgtttgttgctgttttcccccacccatccagttctcctcagcaaagcaaattccttaacacctttggtggagaatttcttacccagacttggggctgtgatgcccttcagtgcgtggtgagtgcagcgtgtgtgcgtgtgcctgtgtgtgaacctgggggccatcctggtggcctgggagcgtgaggagaggccccctgtgtgctgggtgagtggtgggtgtggggtcaatgcagtgaggctctctgggtgaggctcccaacctggcagtccccagcctcccagcatctgtgagcgtctgttggactttacagaagagcctcatcccgtctgcccctcactctgccctggaatcaacatcttccgagtccttcttgggggaaatagcagagccccacttaactccataaactgcttcccattccgcagcccagttctgattgttgaggtgtcgcgtcgttccaggtcccccagtcccctctttctcctgtcctctctctgtccttcacctccccactccagccccggctcagttcagggaaatgctgttccacatcagccctctgctctctgaggcagccgcgcctctgactcggagctacttgaaacttctgctcttgctaggattggagtctacctatctcttccatttgtcccagctggagttctggaactttcctcctcggggtgggggtgggggttgttaaggatgctggggggcctggggaaggaaggagttcagaggaagggtgtcccctgtcctcttgatgtcaccctccgctcctgggacacgtgctctctctgtctctgggtcttctggctgtgcacgtttgtgtgtccttgtaaatatgttttaggaagaaagcaaaagggactgaactagcctctggtaggattgcaggggtccagccttgcctgtttccgaagcccccacactgcctttcgccccactgagactggtcccctcaaaaggtagacaaaacagcagctccctgtggagctgaagggcggcctcaaagtggctttttgttagacaaggttaaggtttcctcatgagcaaggttgcagatcggtccttcctcagctccttgatttgtgaccttgaccaaggggcctgccacccagcccctccagtgccctctcctcgatgcctcgctccttcctgcccccactcccctggcttaggcaggtaggggaattagggccatgctggaagaagcttaaccatgtgttcaaagaacggtttcttgcttgcttggtcctggaactccccttggctgccccaggcctccttggcccatgggtgctgggggaggtggatgtcagatctggtaggttgcagcagagaaaataaatgtgccttgagagaccactcagagagggtccaagggtgatggagaaggaagcatggcctgggagcttggaagggaggggtggtgggtggcggcatcttgactgccccctgttgtcccacacgtggggggtggtcaccccccttcactccagcccgcctgccttcagccttccatgagcttcacctgcttccaacttcactttggagggggtggggtccgttggcatcaacacggggaccctctgcttcaccaaagcccgagccctcagcccctggggagaacaaatggctgagctttgatacctggggtcgtcgagaggctgcgggctggcggcagtcccaggggagagacaccacagaaggagacccagacatcccgaggaagttcccagcagagcaaactgctttccagcctgaagcctgcttaaactgtgtgatgtgcaataactgagcttagagttaggaattgtgttcaagtgcttggatttccgtctgtagatttaactgctgaaattgtatctctcagtaattttagatgtcttttaaaaaattgaaaaacaaagtgttagactgtgtgcgtgtgcgttgatgggcactcaagagtcccgtgagtcatccagccctgcctttcccctgcgcccccatcctctcacgtcccgccccgcctccacttggggaccctgcctcgtgtcgtctttatctgcctattactcagcctaaggaaacaagtacactccacacatgcataaaggaaatcaaatgttatttttaagaaaatggaaaataaaaactttataaacaccaaaaaaaaaaaa

SEQ ID NO: 374896 - DNA, 4167 bp, Homo sapiens
tgcgctccagctctgccaggcaggggggcttctccctccagaagcagaagcaccactcagcagtagagacccggccatccttgtaggtgtcacaggagttgaagaagggacggatgctgacctcttcctggaccagacggagctggccgccatcaacctggacaagtacgaggatggctactaccggaagatgcagtgtgaccagagcagcggtgactgctggtgtgtggaccagctgggcctggagctgactggcacgcgcacgcatgggagccccgactgcgatgacatcgtgggcttctcgggggactttggaagcggtgtcggctgggaggatgaggaggagaaggagacggaggaagcaggcgaggaggccgaggaggaggagggcgaggcaggcgaggctgacgacgggggctacatctggtagacgccctcagaagccggctgccgggggggactcaacagcagagctctgagcagcagcaggcaacttcgagaacggatccagaaatgcagtcagaaggaccctgctccacctggggggactgggagtgtgagtgtgcatggcatgtgtgtggcacagatggctgggacgggtgacagtgtgagtgcatgtgtgcatgcatgtgtgtatgtgtgtgtgtgtgtggcatgcgctgacaaatgtgtccttgatccacactgctcctggcagagtgagtaacccaaaggccccttcggcctccttgtagctgttttctttccttttgttgttggttttaaaatacattcacacacaaatacaaattgacaggtcaaaatccatgaaatgagatcccccagccgtgtcctccagcccagccctgaccccttggtttctaccctggctccccttggtttctaccctggctcaaccgacccctgtctgcccttctccctcctgcttctgaggtcaagctctggcctgcgagcctgtccccattgcaaaggggagggaggggcagggagctgtctaccagctgaggtcctcccaaaactgggccgatgtggtgtgacatccccaccagcctcagatgagacgggccaggacgcccagccacagcaagccctgtccctttgccggatccccaaacactagagaagctctcctaacccaaggcggagaatgaaggtggtggcggcagaggaggagggcagcagctgagaggccagggacagggtgcctcgccaagctgtctgaggtctgtcccaggtggcccaggtggtgcaggtagaacagggtgaggagagggggtcggctcaacaggaggaggctgtggctgcagagcctggaggagcttttaggtgttgagatggggcagctctgaatcctagaccctggaatagcctgtcccttttctctgggtctcgtggtggagccatgatctgggctgctctcttggggacactgggtggtggttacacagttgacctctgcctggctcccccttggtgcaactcctgcctccatcccccttgctggggtcccctcatccacttgagggcgcctgagggccaggagcagcaggcaaggagcctgggtctaggctaagggggtgtgtgcccacctcctccctgacccttaacactcctgtcctgcccagaccaacagagagagctgtccctgagaccccggagagaagcagctgccgaaagctgcagcctttccgcactctgagaccatgatcttcctcctgccaggggagagccacccacaggccatgtccagccccacttccctcagcccccagggcttccttctggcccctctgaggattccctagggctgccccgcagaggggcttccccaagctctgttttgaagcctgcaatgtggaaaagtgagaagtcagagggaacaggacaggtgcagccgggctctgaggccacacctcacacctcgctgttccccaacatcccctgagcagtgtgagctcatctcaccagatgagaagaggccctgtgcatttcttttgtttgtttgttgctgttttcccccacccatccagttctcctcagcaaagcaaattccttaacacctttggtggagaatttcttacccagacttggggctgtgatgcccttcagtgcgtggtgagtgcagcgtgtgtgcgtgtgcctgtgtgtgaacctgggggccatcctggtggcctgggagcgtgaggagaggccccctgtgtgctgggtgagtggtgggtgtggggtcaatgcagtgaggctctctgggtgaggctcccaacctggcagtccccagcctcccagcatctgtgagcgtctgttggactttacagaagagcctcatcccgtctgcccctcactctgccctggaatcaacatcttccgagtccttcttgggggaaatagcagagccccacttaactccataaactgcttcccattccgcagcccagttctgattgttgaggtgtcgcgtcgttccaggtcccccagtcccctctttctcctgtcctctctctgtccttcacctccccactccagccccggctcagttcagggaaatgctgttccacatcagccctctgctctctgaggcagccgcgcctctgactcggagctacttgaaacttctgctcttgctaggattggagtctacctatctcttccatttgtcccagctggagttctggaactttcctcctcggggtgggggtgggggttgttaaggatgctggggggcctggggaaggaaggagttcagaggaagggtgtcccctgtcctcttgatgtcaccctccgctcctgggacacgtgctctctctgtctctgggtcttctggctgtgcacgtttgtgtgtccttgtaaatatgttttaggaagaaagcaaaagggactgaactagcctctggtaggattgcaggggtccagccttgcctgtttccgaagcccccacactgcctttcgccccactgagactggtcccctcaaaaggtagacaaaacagcagctccctgtggagctgaagggcggcctcaaagtggctttttgttagacaaggttaaggtttcctcatgagcaaggttgcagatcggtccttcctcagctccttgatttgtgaccttgaccaaggggcctgccacccagcccctccagtgccctctcctcgatgcctcgctccttcctgcccccactcccctggcttaggcaggtaggggaattagggccatgctggaagaagcttaaccatgtgttcaaagaacggtttcttgcttgcttggtcctggaactccccttggctgccccaggcctccttggcccatgggtgctgggggaggtggatgtcagatctggtaggttgcagcagagaaaataaatgtgccttgagagaccactcagagagggtccaagggtgatggagaaggaagcatggcctgggagcttggaagggaggggtggtgggtggcggcatcttgactgccccctgttgtcccacacgtggggggtggtcaccccccttcactccagcccgcctgccttcagccttccatgagcttcacctgcttccaacttcactttggagggggtggggtccgttggcatcaacacggggaccctctgcttcaccaaagcccgagccctcagcccctggggagaacaaatggctgagctttgatacctggggtcgtcgagaggctgcgggctggcggcagtcccaggggagagacaccacagaaggagacccagacatcccgaggaagttcccagcagagcaaactgctttccagcctgaagcctgcttaaactgtgtgatgtgcaataactgagcttagagttaggaattgtgttcaagtgcttggatttccgtctgtagatttaactgctgaaattgtatctctcagtaattttagatgtcttttaaaaaattgaaaaacaaagtgttagactgtgtgcgtgtgcgttgatgggcactcaagagtcccgtgagtcatccagccctgcctttcccctgcgcccccatcctctcacgtcccgccccgcctccacttggggaccctgcctcgtgtcgtctttatctgcctattactcagcctaaggaaacaagtacactccacacatgcataaaggaaatcaaatgttatttttaagaaaatggaaaataaaaactttataaacaccaaaaaaaaaaaa

SEQ ID NO: 374897 - DNA, 3711 bp, Homo sapiens
agttgttatacggcttttgtcttaacgaagccacccattacggtatgatgatgtcaaacgtgatgctgatgctacagttacagcccctgctggcgcagcctctctgattctctctccctctccgcgtccagtgctgggctttttcagacaagtgcatctcctaaccaggtcacatttcagccgcgacccactctccgccagtcaccggaggcagaccgcgggaggagagctgaggacagccgcgtgcgcttcgccagcagcggggtgggaggaaggacattaaaatactgcagaagtcaagaccccccaggtcgaacccagaccacgatgcgcgccccgggctgcgggcggctggtgctgccgctgctgctcctggccgcggcagccctggccgaaggcgacgccaaggggctcaaggagggcgagacccccggcaatttcatggaggacgagcaatggctgtcgtccatctcgcagtacagcggcaagatcaagcactggaaccgcttccgagacgaagtggaggatgactatatcaagagctgggaggacaatcagcaaggagatgaagccctggataccaccaaggacccctgccagaaggtgaagtgcagccgccacaaggtgtgcattgcccagggctaccagcgggccatgtgcatcagtcgcaagaagctggagcacaggatcaagcagccgaccgtgaaactccatggaaacaaagactccatctgcaagccctgccacatggcccagcttgcctctgtctgcggctcagatggccacacttacagctctgtgtgtaagctggagcaacaggcgtgcctgagcagcaagcagctggcggtgcgatgcgagggcccctgcccctgccccacggagcaggctgccacctccaccgccgatggcaaaccagagacttgcaccggtcaggacctggctgacctgggagatcggctgcgggactggttccagctccttcatgagaactccaagcagaatggctcagccagcagtgtagccggcccggccagcgggctggacaagagcctgggggccagctgcaaggactccattggctggatgttctccaagctggacaccagtgctgacctcttcctggaccagacggagctggccgccatcaacctggacaagtacgaggtctgcatccgtcccttcttcaactcctgtgacacctacaaggatggccgggtctctactgctgagtggtgcttctgcttctggagggagaagcccccctgcctggcagagctggagcgcatccagatccaggaggccgccaagaagaagccaggcatcttcatcccgagctgcgacgaggatggctactaccggaagatgcagtgtgaccagagcagcggtgactgctggtgtgtggaccagctgggcctggagctgactggcacgcgcacgcatgggagccccgactgcgatgacatcgtgggcttctcgggggactttggaagcggtgtcggctgggaggatgaggaggagaaggagacggaggaagcaggcgaggaggccgaggaggaggagggcgaggcaggcgaggctgacgacgggggctacatctggtagacgccctcagaagccggctgccgggggggactcaacagcagagctctgagcagcagcaggcaacttcgagaacggatccagaaatgcagtcagaaggaccctgctccacctggggggactgggagtgtgagtgtgcatggcatgtgtgtggcacagatggctgggacgggtgacagtgtgagtgcatgtgtgcatgcatgtgtgtatgtgtgtgtgtgtgtggcatgcgctgacaaatgtgtccttgatccacactgctcctggcagagtgagtaacccaaaggccccttcggcctccttgtagctgttttctttccttttgttgttggttttaaaatacattcacacacaaatacaaattgacaggtcaaaatccatgaaatgagatcccccagccgtgtcctccagcccagccctgaccccttggtttctaccctggctccccttggtttctaccctggctcaaccgacccctgtctgcccttctccctcctgcttctgaggtcaagctctggcctgcgagcctgtccccattgcaaaggggagggaggggcagggagctgtctaccagctgaggtcctcccaaaactgggccgatgtggtgtgacatccccaccagcctcagatgagacgggccaggacgcccagccacagcaagccctgtccctttgccggatccccaaacactagagaagctctcctaacccaaggcggagaatgaaggtggtggcggcagaggaggagggcagcagctgagaggccagggacagggtgcctcgccaagctgtctgaggtctgtcccaggtggcccaggtggtgcaggtagaacagggtgaggagagggggtcggctcaacaggaggaggctgtggctgcagagcctggaggagcttttaggtgttgagatggggcagctctgaatcctagaccctggaatagcctgtcccttttctctgggtctcgtggtggagccatgatctgggctgctctcttggggacactgggtggtggttacacagttgacctctgcctggctcccccttggtgcaactcctgcctccatcccccttgctggggtcccctcatccacttgagggcgcctgagggccaggagcagcaggcaaggagcctgggtctaggctaagggggtgtgtgcccacctcctccctgacccttaacactcctgtcctgcccagaccaacagagagagctgtccctgagaccccggagagaagcagctgccgaaagctgcagcctttccgcactctgagaccatgatcttcctcctgccaggggagagccacccacaggccatgtccagccccacttccctcagcccccagggcttccttctggcccctctgaggattccctagggctgccccgcagaggggcttccccaagctctgttttgaagcctgcaatgtggaaaagtgagaagtcagagggaacaggacaggtgcagccgggctctgaggccacacctcacacctcgctgttccccaacatcccctgagcagtgtgagctcatctcaccagatgagaagaggccctgtgcatttcttttgtttgtttgttgctgttttcccccacccatccagttctcctcagcaaagcaaattccttaacacctttggtggagaatttcttacccagacttggggctgtgatgcccttcagtgcgtggtgagtgcagcgtgtgtgcgtgtgcctgtgtgtgcctgtgtgctgggtgagtggtgggtgtggggtcaatgcagtgaggctctctgggtgaggctcccaacctggcagtccccagcctcccagcatctgtgagcgtctgttggactttacagaagagcctcatcccgtctgcccctcactctgccctggaatcaacatcttccgagtccttcttgggggaaatagcagagccccacttaactccataaactgctcctctcacgtcccgccccgcctccacttggggaccctgcctcgtgtcgtctttatctgcctattactcagcctaaggaaacaagtacactccacacatgcataaaggaaatcaaatgttatttttaagaaaatggaaaataaaaactttataaacaccaaaaaaaaaaaa

SEQ ID NO: 374898 - DNA, 3454 bp, Homo sapiens
agttgttatacggcttttgtcttaacgaagccacccattacggtatgatgatgtcaaacgtgatgctgatgctacagttacagcccctgctggcgcagcctctctgattctctctccctctccgcgtccagtgctgggctttttcagacaagtgcatctcctaaccaggtcacatttcagccgcgacccactctccgccagtcaccggaggcagaccgcgggaggagagctgaggacagccgcgtgcgcttcgccagcagcggggtgggaggaaggacattaaaatactgcagaagtcaagaccccccaggtcgaacccagaccacgatgcgcgccccgggctgcgggcggctggtgctgccgctgctgctcctggccgcggcagccctggccgaaggcgacgccaaggggctcaaggagggcgagacccccggcaatttcatggaggacgagcaatggctgtcgtccatctcgcagtacagcggcaagatcaagcactggaaccgcttccgagacgaagtggaggatgactatatcaagagctgggaggacaatcagcaaggagatgaagccctggataccaccaaggacccctgccagaaggtgaagtgcagccgccacaaggtgtgcattgcccagggctaccagcgggccatgtgcatcagtcgcaagaagctggagcacaggatcaagcagccgaccgtgaaactccatggaaacaaagactccatctgcaagccctgccacatggcccagcttgcctctgtctgcggctcagatggccacacttacagctctgtgtgtaagctggagcaacaggcgtgcctgagcagcaagcagctggcggtgcgatgcgagggcccctgcccctgccccacggagcaggctgccacctccaccgccgatggcaaaccagagacttgcaccggtcaggacctggctgacctgggagatcggctgcgggactggttccagctccttcatgagaactccaagcagaatggctcagccagcagtgtagccggcccggccagcgggctggacaagagcctgggggccagctgcaaggactccattggctggatgttctccaagctggacaccagtgctgacctcttcctggaccagacggagctggccgccatcaacctggacaagtacgaggtctgcatccgtcccttcttcaactcctgtgacacctacaaggatggccgggtctctactgctgagtggtgcttctgcttctggagggagaagcccccctgcctggcagagctggagcgcatccagatccaggaggccgccaagaagaagccaggcatcttcatcccgagctgcgacgaggatggctactaccggaagatgcagtgtgaccagagcagcggtgactgctggtgtgtggaccagctgggcctggagctgactggcacgcgcacgcatgggagccccgactgcgatgacatcgtgggcttctcgggggactttggaagcggtgtcggctgggaggatgaggaggagaaggagacggaggaagcaggcgaggaggccgaggaggaggagggcgaggcaggcgaggctgacgacgggggctacatctggtagacgccctcagaagccggctgccgggggggactcaacagcagagctctgagcagcagcaggcaacttcgagaacggatccagaaatgcagtcagaaggaccctgctccacctggggggactgggagtgtgagtgtgcatggcatgtgtgtggcacagatggctgggacgggtgacagtgtgagtgcatgtgtgcatgcatgtgtgtatgtgtgtgtgtgtgtggcatgcgctgacaaatgtgtccttgatccacactgctcctggcagagtgagtaacccaaaggccccttcggcctccttgtagctgttttctttccttttgttgttggttttaaaatacattcacacacaaatacaaattgacaggtcaaaatccatgaaatgagatcccccagccgtgtcctccagcccagccctgaccccttggtttctaccctggctccccttggtttctaccctggctcaaccgacccctgtctgcccttctccctcctgcttctgaggtcaagctctggcctgcgagcctgtccccattgcaaaggggagggaggggcagggagctgtctaccagctgaggtcctcccaaaactgggccgatgtggtgtgacatccccaccagcctcagatgagacgggccaggacgcccagccacagcaagccctgtccctttgccggatccccaaacactagagaagctctcctaacccaaggcggagaatgaaggtggtggcggcagaggaggagggcagcagctgagaggccagggacagggtgcctcgccaagctgtctgaggtctgtcccaggtggcccaggtggtgcaggtagaacagggtgaggagagggggtcggctcaacaggaggaggctgtggctgcagagcctggaggagcttttaggtgttgagatggggcagctctgaatcctagaccctggaatagcctgtcccttttctctgggtctcgtggtggagccatgatctgggctgctctcttggggacactgggtggtggttacacagttgacctctgcctggctcccccttggtgcaactcctgcctccatcccccttgctggggtcccctcatccacttgagggcgcctgagggccaggagcagcaggcaaggagcctgggtctaggctaagggggtgtgtgcccacctcctccctgacccttaacactcctgtcctgcccagaccaacagagagagctgtccctgagaccccggagagaagcagctgccgaaagctgcagcctttccgcactctgagaccatgatcttcctcctgccaggggagagccacccacaggccatgtccagccccacttccctcagcccccagggcttccttctggcccctctgaggattccctagggctgccccgcagaggggcttccccaagctctgttttgaagcctgcaatgtggaaaagtgagaagtcagagggaacaggacaggtgcagccgggctctgaggccacacctcacacctcgctgttccccaacatcccctgagcagtgtgagctcatctcaccagatgagaagaggccctgtgcatttcttttgtttgtttgttgctgttttcccccacccatccagttctcctcagcaaagcaaattccttaacacctttggtggagaatttcttacccagacttggggctgtgatgcccttcagtgccctctcacgtcccgccccgcctccacttggggaccctgcctcgtgtcgtctttatctgcctattactcagcctaaggaaacaagtacactccacacatgcataaaggaaatcaaatgttatttttaagaaaatggaaaataaaaactttataaacaccaaaaaaaaaaaa

SEQ ID NO: 374899 - DNA, 1291 bp, Homo sapiens
agttgttatacggcttttgtcttaacgaagccacccattacggtatgatgatgtcaaacgtgatgctgatgctacagttacagcccctgctggcgcagcctctctgattctctctccctctccgcgtccagtgctgggctttttcagacaagtgcatctcctaaccaggtcacatttcagccgcgacccactctccgccagtcaccggaggcagaccgcgggaggagagctgaggacagccgcgtgcgcttcgccagcagcggggtgggaggaaggacattaaaatactgcagaagtcaagaccccccaggtcgaacccagaccacgatgcgcgccccgggctgcgggcggctggtgctgccgctgctgctcctggccgcggcagccctggccgaaggcgacgccaaggggctcaaggagggcgagacccccggcaatttcatggaggacgagcaatggctgtcgtccatctcgcagtacagcggcaagatcaagcactggaaccgcttccgagacgaagtggagttccctcgtccgacccacccagtacaacgcaggccacaccatgacctctcccgttttctccttaaactgcgtgcatccacaagttccttggaaatttgtttaaaacacacatgcttcataggctatccagccaagtgatgggaagaggcagagatttggatctttttgttaccgtcagacaagtgactgtttctccccaaagtcaaactggcaggttgtaattcacagaggacagcaggaaccacgggcagccaggtctccaggctgagtggccgggccccgcgatgggctgctgatctccgccttcgccccacatgcgacctgtccagccgcaggagcctggagccccgcgaggccttcccgaagcacctgcaggcccagcgcagatgagccgcagtctcctgccgcttcctgggcagcagcccggccacagcagcgagggggcggcagcaggccggcccatccggaatccatgtgtcactggcctaggcctccctccgactcgctggctgtttgatctgccaaaatgggaccagtgaaggtcagagggaaaagaaatgcttaatcagaacaggaaaggtttaaaataaaagattcctccccacctcccttcttccacctgcttccaatagccagctccgtgggtgagaataaatgacttactgcttgaccccatggcactgggctacccacctgtctctctgtattggtgccaaccacttcccccttcctctcatgctcatcagaagaaaggcactagatttga

SEQ ID NO: 374900 - DNA, 960 bp, Homo sapiens
tgcgcctgcgcagcaatgccatcggttaaagcgcatgcgcaagatgagctattgcggaagtgaggggagggagaggccgagagaaatttcggtactgcgcatgaaccgagcgtgacgttgaggtttgaaataaccggcaaagagtaaaggctgaaactagcttcctgaaagcttcgtagggcccgagccctgtgagcccaggttctgcgcccactaggaggtgtcatgctgactgctttttttaaagccctagaatcttggcttcggcgtttggggtaagctccgttctcgttctcaagcgcgtttccgcgaactctcgcgggattgacgggccgtctcgagagccggcatctcctaggagctagtcctggtcctcggctaggcggcttggggtcgcggcgtaactggggagccagcctgacgccggcggaccccgcctgtgatcctggcaacgatggatgatgacttgatgttggcactgcggcttcaggaggagtggaacttgcaggaggcggagcgcgatcatgcccaggagtccctgtcgctagtggacgcgtcgtgggagttggtggaccccacaccggacttgcaggcactgtttgttcagtttaacgaccaattcttctggggccagctggaggccgtcgaggtgaagtggagcgtgcgaatgaccctgtgtgctgggatatgcagctatgaagggaagggtggaatgtgttccatccgtctcagcgaaccccttttgaagttgaggccaagaaaggatcttgtagaggtatttttcgtgtaaacttgcttcctagcgcagtaatttacaaatacttgtcaatgatttagactgctgtgaattcgcctgtatgtatcgttaaaaaaagtcactttgccctcagtgaaagcttgaattatggggcaaacaataatgaacaccttatgttttttatagtgcttcatagtaaaaaa

SEQ ID NO: 374901 - DNA, 2002 bp, Homo sapiens
  misc_feature (1356)..(1356): n is a, c, g, or t
tgcgcctgcgcagcaatgccatcggttaaagcgcatgcgcaagatgagctattgcggaagtgaggggagggagaggccgagagaaatttcggtactgcgcatgaaccgagcgtgacgttgaggtttgaaataaccggcaaagagtaaaggctgaaactagcttcctgaaagcttcgtagggcccgagccctgtgagcccaggttctgcgcccactaggaggtgtcatgctgactgctttttttaaagccctagaatcttggcttcggcgtttggggtaagctccgttctcgttctcaagcgcgtttccgcgaactctcgcgggattgacgggccgtctcgagagccggcatctcctaggagctagtcctggtcctcggctaggcggcttggggtcgcggcgtaactggggagccagcctgacgccggcggaccccgcctgtgatcctggcaacgatggatgatgacttgatgttggcactgcggcttcaggaggagtggaacttgcaggaggcggagcgcgatcatgcccaggagtccctgtcgctagtggacgcgtcgtgggagttggtggaccccacaccggacttgcaggcactgtttgttcagtttaacgaccaattcttctggggccagctggaggccgtcgaggtgaagtggagcgtgcgaatgaccctgtgtgctgggatatgcagctatgaagggaagggtggaatgtgttccatccgtctcagcgaaccccttttgaagttgaggccaagaaaggatcttgtagaggtataccatacttttcacgatgaggtggatgagtatcggcgacactggtggcgctgcaatgggccgtgccagcacaggccaccgtattacggctatgtcaaacgagctactaacagggaaccctctgctcatgactattggtgggctgagcaccagaaaacctgtggaggcacttacataaaaatcaaggaaccagagaattactcaaaaaaaggcaaaggaaaggcaaaactaggaaaggaaccagtattggccgcagagaataaagaccttcgtgtatattcttctgatttttatgtgaccatagctatgatgtaaagacaatactgtccttcagagaactggtattaagataaacttaaggatcgtttctggtgtagaagtcttcaagtgtagacttaaggaaaaaatcccactgtccatgaaatgatggtaggaaaacagactttgctctgtacagaagtaagtaaaagtaggaatagtttccatggatatttttatttttattaacttttttcagtttctttttattcaaagaaacaaaattcaatctctgataatatttgaggtaaagttccttnccctatcttgactcactgagttattaggaaacagaaggcaaaaagattgtcaaaataaaaacaataattcaagtaacaatgcccggaatatacgtcctaactacaccccttcctatcagctggattctatccaagtgactctattgatgtatgtatgttcattcaaagaatgggaaaaggatatgacatatatttgccagtacttcatcttcaagatttacccttttcctgtgaagttcagagttactgaagatgcttcttcccttgggaagttgttgacccaagaacataggttatatttcccaaatctttaattattgagtgaaagagctatagatgaattgatatggaaagaccgtatcttcattttcgtgagtagaaggaaagataagaatgaggcagcagattttccctcctggaattacacataaaggacactaagcaattttcaaggtaaatgttgccttgttgttggtctttggcatgataagattctttatttaaatatgagagaatttttttttatcctttatattctctcaatatcagaactcctgaattctgaagattgccctcctcccattaataggattgtatggatgtaagatggaataaaatactagttcttcattttgagaaaactgta

SEQ ID NO: 374902 - DNA, 386 bp, Homo sapiens
catgggattgaaaagggcacatcatgtgatgtgacagtctttctttggtttccattcaggatttcttacaatctccagctacaacctgcttagcttgctactcagtacgtgaattaggatgcaggcaacacacctcagaaggcaggaagaaaaaaggcacagctgataatcaagtcgttagagtcaaccatcattactaaagccaactctccacccagcgcatctaagcctgtgcctcttcttgccaccctagcatctcctaagccagatacagcaaatgaatgccggaagctcactatcagaatgttccaagacctttccataataaaaaataagtatttttttttaatgtgctatttttctacaaatatttactttcatgataa

SEQ ID NO: 374903 - DNA, 3597 bp, Homo sapiens
tgcgcctgcgcagcaatgccatcggttaaagcgcatgcgcaagatgagctattgcggaagtgaggggagggagaggccgagagaaatttcggtactgcgcatgaaccgagcgtgacgttgaggtttgaaataaccggcaaagagtaaaggctgaaactagcttcctgaaagcttcgtagggcccgagccctgtgagcccaggttctgcgcccactaggaggtgtcatgctgactgctttttttaaagccctagaatcttggcttcggcgtttggggtaagctccgttctcgttctcaagcgcgtttccgcgaactctcgcgggattgacgggccgtctcgagagccggcatctcctaggagctagtcctggtcctcggctaggcggcttggggtcgcggcgtaactggggagccagcctgacgccggcggaccccgcctgtgatcctggcaacgatggatgatgacttgatgttggcactgcggcttcaggaggagtggaacttgcaggaggcggagcgcgatcatgcccaggagtccctgtcgctagtggacgcgtcgtgggagttggtggaccccacaccggacttgcaggcactgtttgttcagtttaacgaccaattcttctggggccagctggaggccgtcgaggtgaagtggagcgtgcgaatgaccctgtgtgctgggatatgcagctatgaagggaagggtggaatgtgttccatccgtctcagcgaaccccttttgaagttgaggccaagaaaggatcttgtagagaccctcctgcatgaaatgatacatgcctatttatttgtcactaataacgacaaagaccgagaagggcatggtccagaattttgtaaacatatgcatcgcatcaacagcctgactggagccaatataacggtataccatacttttcacgatgaggtggatgagtatcggcgacactggtggcgctgcaatgggccgtgccagcacaggccaccgtattacggctatgtcaaacgagctactaacagggaaccctctgctcatgactattggtgggctgagcaccagaaaacctgtggaggcacttacataaaaatcaaggaaccagagaattactcaaaaaaaggcaaaggaaaggcaaaactaggaaaggaaccagtattggccgcagagaataaagataaacccaacagaggtgaggcccagctagtaatcccttttagtgggaaaggatatgttctaggagaaacaagcaatttaccttcacctgggaaactgatcacttcacatgccattaataaaacccaagatcttttaaatcaaaaccattcagcaaatgctgtaagacttaattctaaaatcaaggtgaaatttgaacagaatggttcaagtaaaaattctcatctggtctcccctgctgttagtaacagtcaccaaaatgttctaagcaactactttcctagagtatcatttgccaaccaaaaggctttcagaggtgtgaatggatctccaaggataagtgtaacagttggcaacatccctaaaaactcagtctcttctagttctcagagaagggtttcatcttctaagatatccctaagaaattcttcaaaagtaacggaatcagcatctgtgatgccatcccaggatgtgagtgggtctgaagatacattcccaaataaacgacctaggctagaagataagactgtttttgacaatttttttatcaagaaagagcaaataaaaagcagtggtaatgatccaaagtatagtacaaccacagctcagaattccagcagttcatccagtcagagcaaaatggttaattgcccagtttgtcagaatgaagttctggagtctcagattaatgagcacttggactggtgccttgaaggtgacagcatcaaagtcaaaagcgaagaaagtctttgaaaaaggtttcaaagtctcaagtaccacctgtattatctcactaatgtgctatgtcagccagtcaggaagttctggttaatactaagatttgtaggttataatctagttcacataaccaatagaaagtgtcctattttatatatacgcatataagattgtaattttaagatgttttgtgtctcagggtgctacattcactcttgccttaggtatactgtaacccaggttctgcctgtcgtgtataatttttagatacttttgttctttcttgctcttaaggattttaaaaacctgttaatctttttatttgtatactttcctaaaaatattcatatggggaatcctgtcaggtgtttggttatattgactatttattaatagtattagaactcattccctgaactgatgtaaatcttcatagtgtcagacatactgaccaaaaccacaatctagactacaaagtatattgttttagagtactcaaattgtattatttattaatttttttgtttgcaaaatcttaacaggaactgtattttctatattttaaagaattttatttgtcccacttttactaaacagtggcagcagattttaagttaaagaatatggaatatagtaaaataagtaaatttcttttggaatatttttagtaacaaatagccactataattctgtaggccaaattttatattgagtttagctgttttctcaaaatttagcagagtggttaaaattctgtgctgataagtaactgatacatataacataaacataacaaagttgcctagttgatgtaacagtggaaagttatctggaaatagtattttgaactttaagccaagtttaaaacattataataaaaggaataccatttgtgcattttaagtaatctttttttaaaaacaaatattttccatgttatagggaaaggacaaagagacttttatcaagtttgcttttgtcttgtggctgtacatgctgttggcatagccctaatacagttgttcacaagtttcttttttcttgttgcaattttccttcactttgttgtaatacaggtgcacaaatcttaagtgcacagctgggtaaacttttacagtgttcacctgtgtaactaccacccggatcaagttagagaacacttccattgccacagaaggcttcctataggtgtctgttcccagttgatacccatgaccctcaccacctccagaggtccccactgttttcaccccatcgtcgcagattattttttaattttataatgtagtatctttgttcctatgtatagcaggagttcattttcattgctcttgcatttgtatgaatatactagaatttattcatccattctaatgttaatggacatttgaattatttccagtttggggctgttaagcataatgctgctaagaacattcttatcttttctgttgggtatatatacaggaatggaattgctgagtcacggggtatatttctgtttagctttagtaaattctgccagtttacactcctaccagcaatgtatgagagttttagttgttcaccattcataacactgttagcagcccttttcgttttagactggttggctgttcacaaattttgatattccttaaagcattaaaacattttaataaatacttataaataggtaaaaaaaaata

SEQ ID NO: 374904 - DNA, 2504 bp, Homo sapiens
gaagcaaacgcaaaaagtagtacacgtcgtacccgtgttaatcgtcacgaggagctagcggcttggggtcgcggcgtaactggggagccagcctgacgccggcggaccccgcctgtgatcctggcaacgatggatgatgacttgatgttggcactgcggcttcaggaggagtggaacttgcaggaggcggagcgcgatcatgcccaggagtccctgtcgctagtggacgcgtcgtgggagttggtggaccccacaccggacttgcaggcactgtttgttcagtttaacgaccaattcttctggggccagctggaggccgtcgaggtgaagtggagcgtgcgaatgaccctgtgtgctgggatatgcagctatgaagggaagggtggaatgtgttccatccgtctcagcgaaccccttttgaagttgaggccaagaaaggatcttgtagagaccctcctgcatgaaatgatacatgcctatttatttgtcactaataacgacaaagaccgagaagggcatggtccagaattttgtaaacatatgcatcgcatcaacagcctgactggagccaatataacggtataccatacttttcacgatgaggtggatgagtatcggcgacactggtggcgctgcaatgggccgtgccagcacaggccaccgtattacggctatgtcaaacgagctactaacagggaaccctctgctcatgactattggtgggctgagcaccagaaaacctgtggaggcacttacataaaaatcaaggaaccagagaattactcaaaaaaaggcaaaggaaaggcaaaactaggaaaggaaccagtattggccgcagagaataaagataaacccaacagaggtgaggcccagctagtaatcccttttagtgggaaaggatatgttctaggagaaacaagcaatttaccttcacctgggaaactgatcacttcacatgccattaataaaacccaagatcttttaaatcaaaaccattcagcaaatgctgtaagacttaattctaaaatcaaggtgaaatttgaacagaatggttcaagtaaaaattctcatctggtctcccctgctgttagtaacagtcaccaaaatgttctaagcaactactttcctagagtatcatttgccaaccaaaaggctttcagaggtgtgaatggatctccaaggataagtgtaacagttggcaacatccctaaaaactcagtctcttctagttctcagagaagggtttcatcttctaagatatccctaagaaattcttcaaaagtaacggaatcagcatctgtgatgccatcccaggatgtgagtgggtctgaagatacattcccaaataaacgacctaggctagaagataagactgtttttgacaatttttttatcaagaaagagcaaataaaaagcagtggtaatgatccaaagtatagtacaaccacagctcagaattccagcagttcatccagtcagagcaaaatggttaattgcccagtttgtcagaatgaagttctggagtctcagattaatgagcacttggactggtgccttgaaggtgacagcatcaaagtcaaaagcgaagaaagtctttgaaaaaggtttcaaagtctcaagtaccacctgtattatctcactaatgtgctatgtcagccagtcaggaagttctggttaatactaagatttgtaggttataatctagttcacataaccaatagaaagtgtcctattttatatatacgcatataagattgtaattttaagatgttttgtgtctcagggtgctacattcactcttgccttaggtatactgtaacccaggttctgcctgtcgtgtataatttttagatacttttgttctttcttgctcttaaggattttaaaaacctgttaatctttttatttgtatactttcctaaaaatattcatatggggaatcctgtcaggtgtttggttatattgactatttattaatagtattagaactcattccctgaactgatgtaaatcttcatagtgtcagacatactgaccaaaaccacaatctagactacaaagtatattgttttagagtactcaaattgtattatttattaatttttttgtttgcaaaatcttaacaggaactgtattttctatattttaaagaattttatttgtcccacttttactaaacagtggcagcagattttaagttaaagaatatggaatatagtaaaataagtaaatttcttttggaatatttttagtaacaaatagccactataattctgtaggccaaattttatattgagtttagctgttttctcaaaatttagcagagtggttaaaattctgtgctgataagtaactgatacatataacataaacataacaaagttgcctagttgatgtaacagtggaaagttatctggaaatagtattttgaactttaagccaagtttaaaacattataataaaaggaataccatttgtgcattttaagtaatctttttttaaaa

SEQ ID NO: 374905 - DNA, 1507 bp, Homo sapiens
tgcgcctgcgcagcaatgccatcggttaaagcgcatgcgcaagatgagctattgcggaagtgaggggagggagaggccgagagaaatttcggtactgcgcatgaaccgagcgtgacgttgaggtttgaaataaccggcaaagagtaaaggctgaaactagcttcctgaaagcttcgtagggcccgagccctgtgagcccaggttctgcgcccactaggaggtgtcatgctgactgctttttttaaagccctagaatcttggcttcggcgtttggggtaagctccgttctcgttctcaagcgcgtttccgcgaactctcgcgggattgacgggccgtctcgagagccggcatctcctaggagctagtcctggtcctcggctaggcggcttggggtcgcggcgtaactggggagccagcctgacgccggcggaccccgcctgtgatcctggcaacgatggatgatgacttgatgttggcactgcggcttcaggaggagtggaacttgcaggaggcggagcgcgatcatgcccaggagtccctgtcgctagtggacgcgtcgtgggagttggtggaccccacaccggacttgcaggcactgtttgttcagtttaacgaccaattcttctggggccagctggaggccgtcgaggtgaagtggagcgtgcgaatgaccctgtgtgctgggatatgcagctatgaagggaagggtggaatgtgttccatccgtctcagcgaaccccttttgaagttgaggccaagaaaggatcttgtagagaccctcctgcatgaaatgatacatgcctatttatttgtcactaataacgacaaagaccgagaagggcatggtccagaattttgtaaacatatgcatcgcatcaacagcctgactggagccaatataacggtataccatacttttcacgatgaggtggatgagtatcggcgacactggtggcgctgcaatgggccgtgccagcacaggccaccgtattacggctatgtcaaacgagctactaacagggaaccctctgctcatgactattggtgggctgagcaccagaaaacctgtggaggcacttacataaaaatcaaggaaccagagaattactcaaaaaaaggcaaaggaaaggcaaaactaggaaaggaaccagtattggccgcagagaataaagccattcaggatttcttacaatctccagctacaacctgcttagcttgctactcagtacgtgaattaggatgcaggcaacacacctcagaaggcaggaagaaaaaaggcacagctgataatcaagtcgttagagtcaaccatcattactaaagccaactctccacccagcgcatctaagcctgtgcctcttcttgccaccctagcatctcctaagccagatacagcaaatgaatgccggaagctcactatcagaatgttccaagacctttccataataaaaaataagtatttttttttaatgtgctatttttctacaaatatttactttcatgataa

SEQ ID NO: 374906 - DNA, 3571 bp, Homo sapiens
tgcgcctgcgcagcaatgccatcggttaaagcgcatgcgcaagatgagctattgcggaagtgaggggagggagaggccgagagaaatttcggtactgcgcatgaaccgagcgtgacgttgaggtttgaaataaccggcaaagagtaaaggctgaaactagcttcctgaaagcttcgtagggcccgagccctgtgagcccaggttctgcgcccactaggaggtgtcatgctgactgctttttttaaagccctagaatcttggcttcggcgtttggggtaagctccgttctcgttctcaagcgcgtttccgcgaactctcgcgggattgacgggccgtctcgagagccggcatctcctaggagctagtcctggtcctcggctaggcggcttggggtcgcggcgtaactggggagccagcctgacgccggcggaccccgcctgtgatcctggcaacgatggatgatgacttgatgttggcactgcggcttcaggaggagtggaacttgcaggaggcggagcgcgatcatgcccaggagtccctgtcgctagtggacgcgtcgtgggagttggtggaccccacaccggacttgcaggcactgtttgttcagtttaacgaccaattcttctggggccagctggaggccgtcgaggtgtgctgggatatgcagctatgaagggaagggtggaatgtgttccatccgtctcagcgaaccccttttgaagttgaggccaagaaaggatcttgtagagaccctcctgcatgaaatgatacatgcctatttatttgtcactaataacgacaaagaccgagaagggcatggtccagaattttgtaaacatatgcatcgcatcaacagcctgactggagccaatataacggtataccatacttttcacgatgaggtggatgagtatcggcgacactggtggcgctgcaatgggccgtgccagcacaggccaccgtattacggctatgtcaaacgagctactaacagggaaccctctgctcatgactattggtgggctgagcaccagaaaacctgtggaggcacttacataaaaatcaaggaaccagagaattactcaaaaaaaggcaaaggaaaggcaaaactaggaaaggaaccagtattggccgcagagaataaagataaacccaacagaggtgaggcccagctagtaatcccttttagtgggaaaggatatgttctaggagaaacaagcaatttaccttcacctgggaaactgatcacttcacatgccattaataaaacccaagatcttttaaatcaaaaccattcagcaaatgctgtaagacttaattctaaaatcaaggtgaaatttgaacagaatggttcaagtaaaaattctcatctggtctcccctgctgttagtaacagtcaccaaaatgttctaagcaactactttcctagagtatcatttgccaaccaaaaggctttcagaggtgtgaatggatctccaaggataagtgtaacagttggcaacatccctaaaaactcagtctcttctagttctcagagaagggtttcatcttctaagatatccctaagaaattcttcaaaagtaacggaatcagcatctgtgatgccatcccaggatgtgagtgggtctgaagatacattcccaaataaacgacctaggctagaagataagactgtttttgacaatttttttatcaagaaagagcaaataaaaagcagtggtaatgatccaaagtatagtacaaccacagctcagaattccagcagttcatccagtcagagcaaaatggttaattgcccagtttgtcagaatgaagttctggagtctcagattaatgagcacttggactggtgccttgaaggtgacagcatcaaagtcaaaagcgaagaaagtctttgaaaaaggtttcaaagtctcaagtaccacctgtattatctcactaatgtgctatgtcagccagtcaggaagttctggttaatactaagatttgtaggttataatctagttcacataaccaatagaaagtgtcctattttatatatacgcatataagattgtaattttaagatgttttgtgtctcagggtgctacattcactcttgccttaggtatactgtaacccaggttctgcctgtcgtgtataatttttagatacttttgttctttcttgctcttaaggattttaaaaacctgttaatctttttatttgtatactttcctaaaaatattcatatggggaatcctgtcaggtgtttggttatattgactatttattaatagtattagaactcattccctgaactgatgtaaatcttcatagtgtcagacatactgaccaaaaccacaatctagactacaaagtatattgttttagagtactcaaattgtattatttattaatttttttgtttgcaaaatcttaacaggaactgtattttctatattttaaagaattttatttgtcccacttttactaaacagtggcagcagattttaagttaaagaatatggaatatagtaaaataagtaaatttcttttggaatatttttagtaacaaatagccactataattctgtaggccaaattttatattgagtttagctgttttctcaaaatttagcagagtggttaaaattctgtgctgataagtaactgatacatataacataaacataacaaagttgcctagttgatgtaacagtggaaagttatctggaaatagtattttgaactttaagccaagtttaaaacattataataaaaggaataccatttgtgcattttaagtaatctttttttaaaaacaaatattttccatgttatagggaaaggacaaagagacttttatcaagtttgcttttgtcttgtggctgtacatgctgttggcatagccctaatacagttgttcacaagtttcttttttcttgttgcaattttccttcactttgttgtaatacaggtgcacaaatcttaagtgcacagctgggtaaacttttacagtgttcacctgtgtaactaccacccggatcaagttagagaacacttccattgccacagaaggcttcctataggtgtctgttcccagttgatacccatgaccctcaccacctccagaggtccccactgttttcaccccatcgtcgcagattattttttaattttataatgtagtatctttgttcctatgtatagcaggagttcattttcattgctcttgcatttgtatgaatatactagaatttattcatccattctaatgttaatggacatttgaattatttccagtttggggctgttaagcataatgctgctaagaacattcttatcttttctgttgggtatatatacaggaatggaattgctgagtcacggggtatatttctgtttagctttagtaaattctgccagtttacactcctaccagcaatgtatgagagttttagttgttcaccattcataacactgttagcagcccttttcgttttagactggttggctgttcacaaattttgatattccttaaagcattaaaacattttaataaatacttataaataggtaaaaaaaaata

SEQ ID NO: 374907 - DNA, 280 bp, Homo sapiens
gactgcttatgtaaattgttttcttgcagttgttaacttgcttattgaatactaaaaattctgtctccactcaggtataccatacttttcacgatgaggtggatgagtatcggcgacactggtggcgctgcaatgggccgtgccagcacaggccaccgtattacggctatgtcaaacgagctactaacagggaaccctctgctcatgactattggtgggctgagcaccagaaaacctgtggaggcacttacataaaaatcaaggaaccagagaattactc

SEQ ID NO: 374908 - DNA, 464 bp, Homo sapiens
gcgcccgcgggggttgtaactaattaattaggtgaaatgcaagtatctgctaaccaaggggggtatactttcatgaaagccatctgccaactgagttagtgtgaactgcccaagaatgtgtaaggacttgggcatatttggccaatgtaacacatttttatggtgattgttttctaggtgtgctgggatatgcagctatgaagggaagggtggaatgtgttccatccgtctcagcgaaccccttttgaagttgaggccaagaaaggatcttgtagaggtatttttcgtgtaaacttgcttcctagcgcagtaatttacaaatacttgtcaatgatttagactgctgtgaattcgcctgtatgtatcgttaaaaaaagtcactttgccctcagtgaaagcttgaattatggggcaaacaataatgaacaccttatgttttttatagtgcttcatagtaaaaaaaa

SEQ ID NO: 374909 - DNA, 2829 bp, Homo sapiens
tgcgcctgcgcagcaatgccatcggttaaagcgcatgcgcaagatgagctattgcggaagtgaggggagggagaggccgagagaaatttcggtactgcgcatgaaccgagcgtgacgttgaggtttgaaataaccggcaaagagtaaaggctgaaactagcttcctgaaagcttcgtagggcccgagccctgtgagcccaggttctgcgcccactaggaggtgtcatgctgactgctttttttaaagccctagaatcttggcttcggcgtttggggtaagctccgttctcgttctcaagcgcgtttccgcgaactctcgcgggattgacgggccgtctcgagagccggcatctcctaggagctagtcctggtcctcggctaggcggcttggggtcgcggcgtaactggggagccagcctgacgccggcggaccccgcctgtgatcctggcaacgatggatgatgacttgatgttggcactgcggcttcaggaggagtggaacttgcaggaggcggagcgcgatcatgcccaggagtccctgtcgctagtggacgcgtcgtgggagttggtggaccccacaccggacttgcaggcactgtttgttcagtttaacgaccaattcttctggggccagctggaggccgtcgaggtgaagtggagcgtgcgaatgaccctgtgtgctgggatatgcagctatgaagggaagggtggaatgtgttccatccgtctcagcgaaccccttttgaagttgaggccaagaaaggatcttgtagagaccctcctgcatgaaatgatacatgcctatttatttgtcactaataacgacaaagaccgagaagggcatggtccagaattttgtaaacatatgcatcgcatcaacagcctgactggagccaatataacggtataccatacttttcacgatgaggtggatgagtatcggcgacactggtggcgctgcaatgggccgtgccagcacaggccaccgtattacggctatgtcaaacgagctactaacagggaaccctctgctcatgactattggtgggctgagcaccagaaaacctgtggaggcacttacataaaaatcaaggaaccagagaattactcaaaaaaaggcaaaggaaaggcaaaactaggaaaggaaccagtattggccgcagagaataaagataaacccaacagaggtgaggcccagctagtaatcccttttagtgggaaaggatatgttctaggagaaacaagcaatttaccttcacctgggaaactgatcacttcacatgccattaataaaacccaagatcttttaaatcaaaaccattcagcaaatgctgtaagacttaattctaaaatcaaggtgaaatttgaacagaatggttcaagtaaaaattctcatctggtctcccctgctgttagtaacagtcaccaaaatgttctaagcaactactttcctagagtatcatttgccaaccaaaaggctttcagaggtgtgaatggatctccaaggataagtgtaacagttggcaacatccctaaaaactcagtctcttctagttctcagagaagggtttcatcttctaagatatccctaagaaattcttcaaaagtaacggaatcagcatctgtgatgccatcccaggatgtgagtgggtctgaagatacattcccaaataaacgacctaggctagaagataagactgtttttgacaatttttttatcaagaaagagcaaataaaaagcagtggtaatgatccaaagtatagtacaaccacagctcagaattccagcagttcatccagtcagagcaaaatggttaattgcccagtttgtcagaatgaagttctggagtctcagattaatgagcacttggactggtgccttgaaggtgacagcatcaaagtcaaaagcgaagaaagtctttgaaaaaggtttcaaagtctcaagtaccacctgtattatctcactaatgtgctatgtcagccagtcaggaagttctggttaatactaagatttgtaggttataatctagttcacataaccaatagaaagtgtcctattttatatatacgcatataagattgtaattttaagatgttttgtgtctcagggtgctacattcactcttgccttaggtatactgtaacccaggttctgcctgtcgtgtataatttttagatacttttgttctttcttgctcttaaggattttaaaaacctgttaatctttttatttgtatactttcctaaaaatattcatatggggaatcctgtcaggtgtttggttatattgactatttattaatagtattagaactcattccctgaactgatgtaaatcttcatagtgtcagacatactgaccaaaaccacaatctagactacaaagtatattgttttagagtactcaaattgtattatttattaatttttttgtttgcaaaatcttaacaggaactgtattttctatattttaaagaattttatttgtcccacttttactaaacagtggcagcagattttaagttaaagaatatggaatatagtaaaataagtaaatttcttttggaatatttttagtaacaaatagccactataattctgtaggccaaattttatattgagtttagctgttttctcaaaatttagcagagtggttaaaattctgtgctgataagtaactgatacatataacataaacataacaaagttgcctagttgatgtaacagtggaaagttatctggaaatagtattttgaactttaagccaagtttaaaacattataataaaaggaataccatttgtgcattttaagtaatctttttttaaaa

SEQ ID NO: 374910 - DNA, 3542 bp, Homo sapiens
tgcgcctgcgcagcaatgccatcggttaaagcgcatgcgcaagatgagctattgcggaagtgaggggagggagaggccgagagaaatttcggtactgcgcatgaaccgagcgtgacgttgaggtttgaaataaccggcaaagagtaaaggctgaaactagcttcctgaaagcttcgtagggcccgagccctgtgagcccaggttctgcgcccactaggaggtgtcatgctgactgctttttttaaagccctagaatcttggcttcggcgtttggggtaagctccgttctcgttctcaagcgcgtttccgcgaactctcgcgggattgacgggccgtctcgagagccggcatctcctaggagctagtcctggtcctcggctaggcggcttggggtcgcggcgtaactggggagccagcctgacgccggcggaccccgcctgtgatcctggcaacgatggatgatgacttgatgttggcactgcggcttcaggaggagtggaacttgcaggaggcggagcgcgatcatgcccaggagtccctgtcgctagtggacgcgtcgtgggagttggtggaccccacaccggacttgcaggcactgtttgttcagtttaacgaccaattcttctggggccagctggaggccgtcgaggtgaagtggagcgtgcgaatgaccctgtgtgctgggatatgcagctatgaagggaagggtggaatgtgttccatccgtctcagcgaaccccttttgaagttgaggccaagaaaggatcttgtagagaccctcctgcatgaaatgatacatgcctatttatttgtcactaataacgacaaagaccgagaagggcatggtccagaattttgtaaacatatgcatcgcatcaacagcctgactggagccaatataacggtataccatacttttcacgatgaggtggatgagtatcggcgacactggtggcgctgcaatgggccgtgccagcacaggccaccgtattacggctatgtcaaacgagctactaacagggaaccctctgctcatgactattggtgggctgagcaccagaaaacctgtggaggcacttacataaaaatcaaggaaccagagaattactcaaaaaaaggcaaaggaaaggcaaaactaggaaaggaaccagtattggccgcagagaataaagataaacccaacagaggtgaggcccagctagtaatcccttttagtgggaaaggatatgttctaggagaaacaagcaatttaccttcacctgggaaactgatcacttcacatgccattaataaaacccaagatcttttaaatcaaaaccattcagcaaatgctgtaagacttaattctaaaatcaaggtgaaatttgaacagaatggttcaagtaaaaattctcatctggtctcccctgctgttagtaacagtcaccaaaatgttctaagcaactactttcctagagtatcatttgccaaccaaaaggctttcagaggtgtgaatggatctccaaggataagtgtaacagttggcaacatccctaaaaactcagtctcttctagttctcagagaagggtttcatcttctaagatatccctaagaaattcttcaaaagtaacggaatcagcatctgtgatgccatcccaggatgtgagtgggtctgaagatacattcccaaataaacgacctaggctagaagataagactgtttttgacaatttttttatcaagaaagagcaaataaaaagcagtggtaatgatccaaagtatagtacaaccacagctcagaattccagcagttcatccagtcagagcaaaatggttaattgcccagtttgtcagaatgaagttctggagtctcagattaatgagcacttggactggtgccttgaaggtgacagcatcaaagtcaaaagcgaagaaagtctttgaaaaaggtttcaaagtctcaagtaccacctgtattatctcactaatgtgctatgtcagccagtcaggaagttctggttaatactaagatttgtaggttataatctagttcacataaccaatagaaagtgtcctattttatatatacgcatataagattgtaattttaagatgttttgtgtctcagggtgctacattcactcttgccttaggtatactgtaacccaggttctgcctgtcgtgtataatttttagatacttttgttctttcttgctcttaaggattttaaaaacctgttaatctttttatttgtatactttcctaaaaatattcatatggggaatcctgtcaggtgtttggttatattgactatttattaatagtattagaactcattccctgaactgatgtaaatcttcatagtgtcagacatactgaccaaaaccacaatctagactacaaagtatattgttttagagtactcaaattgtattatttattaatttttttgtttgcaaaatcttaacaggaactgtattttctatattttaaagaattttatttgtcccacttttactaaacagtggcagcagattttaagttaaagaatatggaatatagtaaaataagtaaatttcttttggaatatttttagtaacaaatagccactataattctgtaggccaaattttatattgagtttagctgttttctcaaaatttagcagagtggttaaaattctgtgctgataagtaactgatacatataacataaacataacaaagttgcctagttgatgtaacagtggaaagttatctggaaatagtattttgaactttaagccaagtttaaaacattataataaaaggaataccatttgtgcattttaagtaatctttttttaaaatttgtcttgtggctgtacatgctgttggcatagccctaatacagttgttcacaagtttcttttttcttgttgcaattttccttcactttgttgtaatacaggtgcacaaatcttaagtgcacagctgggtaaacttttacagtgttcacctgtgtaactaccacccggatcaagttagagaacacttccattgccacagaaggcttcctataggtgtctgttcccagttgatacccatgaccctcaccacctccagaggtccccactgttttcaccccatcgtcgcagattattttttaattttataatgtagtatctttgttcctatgtatagcaggagttcattttcattgctcttgcatttgtatgaatatactagaatttattcatccattctaatgttaatggacatttgaattatttccagtttggggctgttaagcataatgctgctaagaacattcttatcttttctgttgggtatatatacaggaatggaattgctgagtcacggggtatatttctgtttagctttagtaaattctgccagtttacactcctaccagcaatgtatgagagttttagttgttcaccattcataacactgttagcagcccttttcgttttagactggttggctgttcacaaattttgatattccttaaagcattaaaacattttaataaatacttataaataggtaaaaaaaaata

SEQ ID NO: 374911 - DNA, 1468 bp, Homo sapiens
tgcgcctgcgcagcaatgccatcggttaaagcgcatgcgcaagatgagctattgcggaagtgaggggagggagaggccgagagaaatttcggtactgcgcatgaaccgagcgtgacgttgaggtttgaaataaccggcaaagagtaaaggctgaaactagcttcctgaaagcttcgtagggcccgagccctgtgagcccaggttctgcgcccactaggaggtgtcatgctgactgctttttttaaagccctagaatcttggcttcggcgtttggggtaagctccgttctcgttctcaagcgcgtttccgcgaactctcgcgggattgacgggccgtctcgagagccggcatctcctaggagctagtcctggtcctcggctaggcggcttggggtcgcggcgtaactggggagccagcctgacgccggcggaccccgcctgtgatcctggcaacgatggatgatgacttgatgttggcactgcggcttcaggaggagtggaacttgcaggaggcggagcgcgatcatgcccaggagtccctgtcgctagtggacgcgtcgtgggagttggtggaccccacaccggacttgcaggcactgtttgttcagtttaacgaccaattcttctggggccagctggaggccgtcgaggtgaagtggagcgtgcgaatgaccctgtgtgctgggatatgcagctatgaagggaagggtggaatgtgttccatccgtctcagcgaaccccttttgaagttgaggccaagaaaggatcttgtagagaccctcctgcatgaaatgatacatgcctatttatttgtcactaataacgacaaagaccgagaagggcatggtccagaattttgtaaacatatgcatcgcatcaacagcctgactggagccaatataacggtataccatacttttcacgatgaggtggatgagtatcggcgacactggtggcgctgcaatgggccgtgccagcacaggccaccgtattacggctatgtcaaacgagctactaacagggaaccctctgctcatgactattggtgggctgagcaccagaaaacctgtggaggcacttacataaaaatcaaggaaccagagaattactcaaaaaaaggcaaaggaaaggcaaaactaggaaaggaaccagtattggccgcagagaataaagccattcaggatttcttacaatctccagctacaacctgcttagcttgctactcagtacgtgaattaggatgcaggcaacacacctcagaaggcaggaagaaaaaaggcacagctgataatcaagtcgttagagtcaaccatcattactaaagccaactctccacccagcgcatctaagcctgtgcctcttcttgccaccctagcatctcctaagccagatacagcaaatgaatgccggaagctcactatcagaatgttccaagacctttccataataaaaaataagtattttttttt

SEQ ID NO: 374912 - DNA, 2131 bp, Homo sapiens
  misc_feature (1485)..(1485): n is a, c, g, or t
tgcgcctgcgcagcaatgccatcggttaaagcgcatgcgcaagatgagctattgcggaagtgaggggagggagaggccgagagaaatttcggtactgcgcatgaaccgagcgtgacgttgaggtttgaaataaccggcaaagagtaaaggctgaaactagcttcctgaaagcttcgtagggcccgagccctgtgagcccaggttctgcgcccactaggaggtgtcatgctgactgctttttttaaagccctagaatcttggcttcggcgtttggggtaagctccgttctcgttctcaagcgcgtttccgcgaactctcgcgggattgacgggccgtctcgagagccggcatctcctaggagctagtcctggtcctcggctaggcggcttggggtcgcggcgtaactggggagccagcctgacgccggcggaccccgcctgtgatcctggcaacgatggatgatgacttgatgttggcactgcggcttcaggaggagtggaacttgcaggaggcggagcgcgatcatgcccaggagtccctgtcgctagtggacgcgtcgtgggagttggtggaccccacaccggacttgcaggcactgtttgttcagtttaacgaccaattcttctggggccagctggaggccgtcgaggtgaagtggagcgtgcgaatgaccctgtgtgctgggatatgcagctatgaagggaagggtggaatgtgttccatccgtctcagcgaaccccttttgaagttgaggccaagaaaggatcttgtagagaccctcctgcatgaaatgatacatgcctatttatttgtcactaataacgacaaagaccgagaagggcatggtccagaattttgtaaacatatgcatcgcatcaacagcctgactggagccaatataacggtataccatacttttcacgatgaggtggatgagtatcggcgacactggtggcgctgcaatgggccgtgccagcacaggccaccgtattacggctatgtcaaacgagctactaacagggaaccctctgctcatgactattggtgggctgagcaccagaaaacctgtggaggcacttacataaaaatcaaggaaccagagaattactcaaaaaaaggcaaaggaaaggcaaaactaggaaaggaaccagtattggccgcagagaataaagaccttcgtgtatattcttctgatttttatgtgaccatagctatgatgtaaagacaatactgtccttcagagaactggtattaagataaacttaaggatcgtttctggtgtagaagtcttcaagtgtagacttaaggaaaaaatcccactgtccatgaaatgatggtaggaaaacagactttgctctgtacagaagtaagtaaaagtaggaatagtttccatggatatttttatttttattaacttttttcagtttctttttattcaaagaaacaaaattcaatctctgataatatttgaggtaaagttccttnccctatcttgactcactgagttattaggaaacagaaggcaaaaagattgtcaaaataaaaacaataattcaagtaacaatgcccggaatatacgtcctaactacaccccttcctatcagctggattctatccaagtgactctattgatgtatgtatgttcattcaaagaatgggaaaaggatatgacatatatttgccagtacttcatcttcaagatttacccttttcctgtgaagttcagagttactgaagatgcttcttcccttgggaagttgttgacccaagaacataggttatatttcccaaatctttaattattgagtgaaagagctatagatgaattgatatggaaagaccgtatcttcattttcgtgagtagaaggaaagataagaatgaggcagcagattttccctcctggaattacacataaaggacactaagcaattttcaaggtaaatgttgccttgttgttggtctttggcatgataagattctttatttaaatatgagagaatttttttttatcctttatattctctcaatatcagaactcctgaattctgaagattgccctcctcccattaataggattgtatggatgtaagatggaataaaatactagttcttcattttgagaaaactgta

SEQ ID NO: 374913 - DNA, 887 bp, Homo sapiens
agggcgccgagggcgggactggactcggcttgggcgtgagatggcggcggcagcggtgagcagcgccaagcggagcctgcggggagagctgaagcagcgtctgcgggcgatgagtgccgaggagcggctacgccagtcccgcgtactgagccagaaggtgattgcccacagtgagtatcaaaagtccaaaagaatttccatctttctgagcatgcaagatgaaattgagacagaagagatcatcaaggacattttccaacgaggcaaaatctgcttcatccctcggtaccggttccagagcaatcacatggatatggtgagaatagaatcaccagaggaaatttctttacttcccaaaacatcctggaatatccctcagcctggtgagggtgatgttcgggaggaggccttgtccacagggggacttgatctcatcttcatgccaggccttgggtttgacaaacatggcaaccgactggggaggggcaagggctactatgatgcctatctgaagcgctgtttgcagcatcaggaagtgaagccctacaccctggcgttggctttcaaagaacagatttgcctccaggtcccagtgaatgaaaacgacatgaaggtagatgaagtcctttacgaagactcgtcaacagcttaaatctggattactacagccaaataatcagtgttttatatgagagtaaagcaaagtatgtgtatttttcccttgtcaaaaattagttgaaattgttcattaatgtgaatacagactgcattttaaaattgtaattatgaaataccttatataaaaccatctttaaaaaccaaatagaagtgtgaatagtagaatattaattaaaatggaggctatcagcctgtgattttcagcttaa

SEQ ID NO: 374914 - DNA, 1806 bp, Homo sapiens
gtcagcgtgttcaaatacttttaatacacaacttttaatacacaagacacactttggaaaactttttccgaagaaaatgatccaaagagcagaatgtgagtcaataaacggagaaaggcaagcagcggttttccatcttctgcgccagtgtgctgtaaacttttaagtccggaaaactatgttttaaccgatgagataatgcctttcaaagtgattagcacgaccgggcgcgcggtggctgacgccagtaatcccagcacttttgagtggctgaggtgagcggatcaccctgaggtcagggtcgagaccagcctggccaaaatggcgaaaccccgtctctactaaaatacaaaaatcagcgaggcgtggtggcgcccgcctgtaatcccagttactcgggaggctgaggcaggagaatcgctttaaaccgggaggcggaggttgcagagccaagatcgggccattgcactccagcctcggtgacaaaatataataataataaaattaaaaagggcttagcatagtatctggccagtaagaagaaattatgattattattttgaccttagacctctcttaactgtctgaaattcgggtttcttaaaggacacaggcggtctctgaggctcccgccagcggaaacaatctcccattaaaataggcatcggttaaatatttgctgaacaaagtaaactacgtctccccgaatcccattgagcgcctactcgagatccggaccggagccgggcaggacgggcccgtcggtcccacacgccgtataagtgggtggagaataccccacacgcccagaccaataggcggggtgaacgaggaccgtgttcaccaactcagcccggctcgcggaatgccttctgttcgcctccgggcttgcagtggctttccgtcgcaggtcaggccgcgttccacttccgccggcagtccagacacgcccctccgggtccaatccccgcccctcacacacctggccccgccccgtcgggagctcggcggtcctctctgcgctaggtcttcttagcgcccgacggggccacgcccatccccgacgctctgaggtcacctacagggccgaccctcggtgggcggagggacggagggaagatggctgcagagaccggatattggcgctgcctccccgaatcccggacctgcgctgaggaggcggttcatctgtggccagcggtgcttcgggacccgcgctgggggaaccctggcgacggggcctggccctgctatatgcgggggcctcggctggagtgagcggcgtggacgcctctttcctccggctcttcccttgttgctgcgagagcgagagggccgcgggcggcggaggcagcggggccgggatggaggacgttaactctaacgtgaacgcggaccaggagggggacttgatctcatcttcatgccaggccttgggtttgacaaacatggcaaccgactggggaggggcaagggctactatgatgcctatctgaagcgctgtttgcagcatcaggaagtgaagccctacaccctggcgttggctttcaaagaacagatttgcctccaggtcccagtgaatgaaaacgacatgaaggtagatgaagtcctttacgaagactcgtcaacagcttaaatctggattactacagccaaataatcagtgttttatatgagagtaaagcaaagtatgtgtatttttcccttgtcaaaaattagttgaaattgttcattaatgtgaatacagactgcattttaaaattgtaattatgaaataccttatataaaaccatctttaaaaaccaa

SEQ ID NO: 374915 - DNA, 629 bp, Homo sapiens
atttccttttttgtccaactctgtgctttttggatattaatggtcacacattgtttttagaaatcagagaaagaattgatgtcattacaaaacaaaaaacacatcctgaaatgatctttcagaaacaattaatcctcttaaatttgttcctcttttccgcaggggacttgatctcatcttcatgccaggccttgggtttgacaaacatggcaaccgactggggaggggcaagggctactatgatgcctatctgaagcgctgtttgcagcatcaggaagtgaagccctacaccctggcgttggctttcaaagaacagatttgcctccaggtcccagtgaatgaaaacgacatgaaggtagatgaagtcctttacgaagactcgtcaacagcttaaatctggattactacagccaaataatcagtgttttatatgagagtaaagcaaagtatgtgtatttttcccttgtcaaaaattagttgaaattgttcattaatgtgaatacagactgcattttaaaattgtaattatgaaataccttatataaaaccatctttaaaaaccaaatagaagtgtgaatagtagaatattaattaaaatggaggctatcagcctgtgattttcagcttaa

SEQ ID NO: 374916 - DNA, 1997 bp, Homo sapiens
gtcagcgtgttcaaatacttttaatacacaacttttaatacacaagacacactttggaaaactttttccgaagaaaatgatccaaagagcagaatgtgagtcaataaacggagaaaggcaagcagcggttttccatcttctgcgccagtgtgctgtaaacttttaagtccggaaaactatgttttaaccgatgagataatgcctttcaaagtgattagcacgaccgggcgcgcggtggctgacgccagtaatcccagcacttttgagtggctgaggtgagcggatcaccctgaggtcagggtcgagaccagcctggccaaaatggcgaaaccccgtctctactaaaatacaaaaatcagcgaggcgtggtggcgcccgcctgtaatcccagttactcgggaggctgaggcaggagaatcgctttaaaccgggaggcggaggttgcagagccaagatcgggccattgcactccagcctcggtgacaaaatataataataataaaattaaaaagggcttagcatagtatctggccagtaagaagaaattatgattattattttgaccttagacctctcttaactgtctgaaattcgggtttcttaaaggacacaggcggtctctgaggctcccgccagcggaaacaatctcccattaaaataggcatcggttaaatatttgctgaacaaagtaaactacgtctccccgaatcccattgagcgcctactcgagatccggaccggagccgggcaggacgggcccgtcggtcccacacgccgtataagtgggtggagaataccccacacgcccagaccaataggcggggtgaacgaggaccgtgttcaccaactcagcccggctcgcggaatgccttctgttcgcctccgggcttgcagtggctttccgtcgcaggtcaggccgcgttccacttccgccggcagtccagacacgcccctccgggtccaatccccgcccctcacacacctggccccgccccgtcgggagctcggcggtcctctctgcgctaggtcttcttagcgcccgacggggccacgcccatccccgacgctctgaggtcacctacagggccgaccctcggtgggcggagggacggagggaagatggctgcagagaccggatattggcgctgcctccccgaatcccggacctgcgctgaggaggcggttcatctgtggccagcggtgcttcgggacccgcgctgggggaaccctggcgacggggcctggccctgctatatgcgggggcctcggctggagtgagcggcgtggacgcctctttcctccggctcttcccttgttgctgcgagagcgagagggccgcgggcggcggaggcagcggggccgggatggaggacgttaactctaacgtgaacgcggaccaggaggtgcggaagctgcaggtgccggtgaagaagctggggaagcagcacgaacagccgaggagccgctcgcgctgtgctgggccccggctccatcgcggttcgccggctcctccactccctcctacggcgcggggtcccctcggggcttccccttgggtctcagcgcaaagtcgggcggcggggccggatggacccgaggcggacgaataacgaggagctgcgagacgccaccttcttgctggcggcgggggagggcggcttgctagacgacctggagcgtctgtcaggctaggaggagggggaggagagctggtgagcgccgggcgccgggcggggctgggcggggacgccccggtggcggaggacgtcccggaggatccctctggtcgggcgcctggctttgtgtagccagccaggtccgctctcggcgggtactcgtggtcttgctctggcagaggggaggtcagttggagttgggggttcgaggcttgcaagtacagggcttgtagctccttctctggattgtggaccctctgggtgctgggccctattggggttggtgggttggttggatccagaagggctgttcgccgtggg

SEQ ID NO: 374917 - DNA, 2124 bp, Homo sapiens
gtcagcgtgttcaaatacttttaatacacaacttttaatacacaagacacactttggaaaactttttccgaagaaaatgatccaaagagcagaatgtgagtcaataaacggagaaaggcaagcagcggttttccatcttctgcgccagtgtgctgtaaacttttaagtccggaaaactatgttttaaccgatgagataatgcctttcaaagtgattagcacgaccgggcgcgcggtggctgacgccagtaatcccagcacttttgagtggctgaggtgagcggatcaccctgaggtcagggtcgagaccagcctggccaaaatggcgaaaccccgtctctactaaaatacaaaaatcagcgaggcgtggtggcgcccgcctgtaatcccagttactcgggaggctgaggcaggagaatcgctttaaaccgggaggcggaggttgcagagccaagatcgggccattgcactccagcctcggtgacaaaatataataataataaaattaaaaagggcttagcatagtatctggccagtaagaagaaattatgattattattttgaccttagacctctcttaactgtctgaaattcgggtttcttaaaggacacaggcggtctctgaggctcccgccagcggaaacaatctcccattaaaataggcatcggttaaatatttgctgaacaaagtaaactacgtctccccgaatcccattgagcgcctactcgagatccggaccggagccgggcaggacgggcccgtcggtcccacacgccgtataagtgggtggagaataccccacacgcccagaccaataggcggggtgaacgaggaccgtgttcaccaactcagcccggctcgcggaatgccttctgttcgcctccgggcttgcagtggctttccgtcgcaggtcaggccgcgttccacttccgccggcagtccagacacgcccctccgggtccaatccccgcccctcacacacctggccccgccccgtcgggagctcggcggtcctctctgcgctaggtcttcttagcgcccgacggggccacgcccatccccgacgctctgaggtcacctacagggccgaccctcggtgggcggagggacggagggaagatggctgcagagaccggatattggcgctgcctccccgaatcccggacctgcgctgaggaggcggttcatctgtggccagcggtgcttcgggacccgcgctgggggaaccctggcgacggggcctggccctgctatatgcgggggcctcggctggagtgagcggcgtggacgcctctttcctccggctcttcccttgttgctgcgagagcgagagggccgcgggcggcggaggcagcggggccgggatggaggacgttaactctaacgtgaacgcggaccaggaggctggagtgcaatggcgcgatctcggctcactgcaacctctgtctcccaggttcaggtgattgcccacagtgagtatcaaaagtccaaaagaatttccatctttctgagcatgcaagatgaaattgagacagaagagatcatcaaggacattttccaacgaggcaaaatctgcttcatccctcggtaccggttccagagcaatcacatggatatggtgagaatagaatcaccagaggaaatttctttacttcccaaaacatcctggaatatccctcagcctggtgagggtgatgttcgggaggaggccttgtccacagggggacttgatctcatcttcatgccaggccttgggtttgacaaacatggcaaccgactggggaggggcaagggctactatgatgcctatctgaagcgctgtttgcagcatcaggaagtgaagccctacaccctggcgttggctttcaaagaacagatttgcctccaggtcccagtgaatgaaaacgacatgaaggtagatgaagtcctttacgaagactcgtcaacagcttaaatctggattactacagccaaataatcagtgttttatatgagagtaaagcaaagtatgtgtatttttcccttgtcaaaaattagttgaaattgttcattaatgtgaatacagactgcattttaaaattgtaattatgaaataccttatataaaaccatctttaaaaaccaa

SEQ ID NO: 374918 - DNA, 903 bp, Homo sapiens
agggcgccgagggcgggactggactcggcttgggcgtgagatggcggcggcagcggtgagcagcgccaagcggagcctgcggggagagctgaagcagcgtctgcgggcgatgagtgccgaggagcggctacgccagtcccgcgtactgagccagaaggtgcgaggccgcccgtagcggaagccgcggcggacagaccctccgaaggcctggcggccagcgattgctgatctgtgcatggtgattgcccacagtgagtatcaaaagtccaaaagaatttccatctttctgagcatgcaagatgaaattgagacagaagagatcatcaaggacattttccaacgaggcaaaatctgcttcatccctcggtaccggttccagagcaatcacatggatatggtgagaatagaatcaccagaggaaatttctttacttcccaaaacatcctggaatatccctcagcctggtgagggtgatgttcgggaggaggccttgtccacagggggacttgatctcatcttcatgccaggccttgggtttgacaaacatggcaaccgactggggaggggcaagggctactatgatgcctatctgaagcgctgtttgcagcatcaggaagtgaagccctacaccctggcgttggctttcaaagaacagatttgcctccaggtcccagtgaatgaaaacgacatgaaggtagatgaagtcctttacgaagactcgtcaacagcttaaatctggattactacagccaaataatcagtgttttatatgagagtaaagcaaagtatgtgtatttttcccttgtcaaaaattagttgaaattgttcattaatgtgaatacagactgcattttaaaattgtaattatgaaataccttatataaaaccatctttaaaaaccaa

SEQ ID NO: 374919 - DNA, 2068 bp, Homo sapiens
gtcagcgtgttcaaatacttttaatacacaacttttaatacacaagacacactttggaaaactttttccgaagaaaatgatccaaagagcagaatgtgagtcaataaacggagaaaggcaagcagcggttttccatcttctgcgccagtgtgctgtaaacttttaagtccggaaaactatgttttaaccgatgagataatgcctttcaaagtgattagcacgaccgggcgcgcggtggctgacgccagtaatcccagcacttttgagtggctgaggtgagcggatcaccctgaggtcagggtcgagaccagcctggccaaaatggcgaaaccccgtctctactaaaatacaaaaatcagcgaggcgtggtggcgcccgcctgtaatcccagttactcgggaggctgaggcaggagaatcgctttaaaccgggaggcggaggttgcagagccaagatcgggccattgcactccagcctcggtgacaaaatataataataataaaattaaaaagggcttagcatagtatctggccagtaagaagaaattatgattattattttgaccttagacctctcttaactgtctgaaattcgggtttcttaaaggacacaggcggtctctgaggctcccgccagcggaaacaatctcccattaaaataggcatcggttaaatatttgctgaacaaagtaaactacgtctccccgaatcccattgagcgcctactcgagatccggaccggagccgggcaggacgggcccgtcggtcccacacgccgtataagtgggtggagaataccccacacgcccagaccaataggcggggtgaacgaggaccgtgttcaccaactcagcccggctcgcggaatgccttctgttcgcctccgggcttgcagtggctttccgtcgcaggtcaggccgcgttccacttccgccggcagtccagacacgcccctccgggtccaatccccgcccctcacacacctggccccgccccgtcgggagctcggcggtcctctctgcgctaggtcttcttagcgcccgacggggccacgcccatccccgacgctctgaggtcacctacagggccgaccctcggtgggcggagggacggagggaagatggctgcagagaccggatattggcgctgcctccccgaatcccggacctgcgctgaggaggcggttcatctgtggccagcggtgcttcgggacccgcgctgggggaaccctggcgacggggcctggccctgctatatgcgggggcctcggctggagtgagcggcgtggacgcctctttcctccggctcttcccttgttgctgcgagagcgagagggccgcgggcggcggaggcagcggggccgggatggaggacgttaactctaacgtgaacgcggaccaggaggtgattgcccacagtgagtatcaaaagtccaaaagaatttccatctttctgagcatgcaagatgaaattgagacagaagagatcatcaaggacattttccaacgaggcaaaatctgcttcatccctcggtaccggttccagagcaatcacatggatatggtgagaatagaatcaccagaggaaatttctttacttcccaaaacatcctggaatatccctcagcctggtgagggtgatgttcgggaggaggccttgtccacagggggacttgatctcatcttcatgccaggccttgggtttgacaaacatggcaaccgactggggaggggcaagggctactatgatgcctatctgaagcgctgtttgcagcatcaggaagtgaagccctacaccctggcgttggctttcaaagaacagatttgcctccaggtcccagtgaatgaaaacgacatgaaggtagatgaagtcctttacgaagactcgtcaacagcttaaatctggattactacagccaaataatcagtgttttatatgagagtaaagcaaagtatgtgtatttttcccttgtcaaaaattagttgaaattgttcattaatgtgaatacagactgcattttaaaattgtaattatgaaataccttatataaaaccatctttaaaaaccaa

SEQ ID NO: 374920 - DNA, 1018 bp, Homo sapiens
agggcgccgagggcgggactggactcggcttgggcgtgagatggcggcggcagcggtgagcagcgccaagcggagcctgcggggagagctgaagcagcgtctgcgggcgatgagtgccgaggagcggctacgccagtcccgcgtactgagccagaaggtgattgcccacagtgagtatcaaaagtccaaaagaatttccatctttctgagcatgcaagatgaaattgagacagaagagatcatcaaggacattttccaacgaggcaaaatctgcttcatccctcggtaccggttccagagcaatcacatggatatggtgagaatagaatcaccagaggaaatttctttacttcccaaaacatcctggaatatccctcagcctggtgagggtgatgttcgggaggaggccttgtccacagggggacttgatctcatcttcatgccaggccttgggtttgacaaacatggcaaccgactggggaggggcaagggctactatgatgcctatctgaagcgctgtttgcagcatcaggaagtgaagccctacaccctggcgttggctttcaaagaacagatttgcctccaggtcccagtgaatgaaaacgacatgaaggtagatgaagtcctttacgaagactcgtcaacagcttaaatctggattactacagccaaataatcagtgttttatatgagagtaaagcaaagtatgtgtatttttcccttgtcaaaaattagttgaaattgttcattaatgtgaatacagactgcattttaaaattgtaattatgaaataccttatataaaaccatctttaaaaaccaaatagaagtgtgaatagtagaatattaattaaaatggaggctatcagcctgtgattttcagcttaaaaaaaaaaaaaaaaaaaaaaaaactcgagttttttttttttttttttttcatgattcattagacacttttaatgaaaatagtgcttgacaattagaaaacagttaaaatttttgttttagaaatagcattc

SEQ ID NO: 374921 - DNA, 2163 bp, Homo sapiens
gtcagcgtgttcaaatacttttaatacacaacttttaatacacaagacacactttggaaaactttttccgaagaaaatgatccaaagagcagaatgtgagtcaataaacggagaaaggcaagcagcggttttccatcttctgcgccagtgtgctgtaaacttttaagtccggaaaactatgttttaaccgatgagataatgcctttcaaagtgattagcacgaccgggcgcgcggtggctgacgccagtaatcccagcacttttgagtggctgaggtgagcggatcaccctgaggtcagggtcgagaccagcctggccaaaatggcgaaaccccgtctctactaaaatacaaaaatcagcgaggcgtggtggcgcccgcctgtaatcccagttactcgggaggctgaggcaggagaatcgctttaaaccgggaggcggaggttgcagagccaagatcgggccattgcactccagcctcggtgacaaaatataataataataaaattaaaaagggcttagcatagtatctggccagtaagaagaaattatgattattattttgaccttagacctctcttaactgtctgaaattcgggtttcttaaaggacacaggcggtctctgaggctcccgccagcggaaacaatctcccattaaaataggcatcggttaaatatttgctgaacaaagtaaactacgtctccccgaatcccattgagcgcctactcgagatccggaccggagccgggcaggacgggcccgtcggtcccacacgccgtataagtgggtggagaataccccacacgcccagaccaataggcggggtgaacgaggaccgtgttcaccaactcagcccggctcgcggaatgccttctgttcgcctccgggcttgcagtggctttccgtcgcaggtcaggccgcgttccacttccgccggcagtccagacacgcccctccgggtccaatccccgcccctcacacacctggccccgccccgtcgggagctcggcggtcctctctgcgctaggtcttcttagcgcccgacggggccacgcccatccccgacgctctgaggtcacctacagggccgaccctcggtgggcggagggacggagggaagatggctgcagagaccggatattggcgctgcctccccgaatcccggacctgcgctgaggaggcggttcatctgtggccagcggtgcttcgggacccgcgctgggggaaccctggcgacggggcctggccctgctatatgcgggggcctcggctggagtgagcggcgtggacgcctctttcctccggctcttcccttgttgctgcgagagcgagagggccgcgggcggcggaggcagcggggccgggatggaggacgttaactctaacgtgaacgcggaccaggaggctggagtgcaatggcgcgatctcggctcactgcaacctctgtctcccaggttcaggtgattgcccacagtgagtatcaaaagtccaaaagaatttccatctttctgagcatgcaagatgaaattgagacagaagagatcatcaaggacattttccaacgaggcaaaatctgcttcatccctcggtaccggttccagagcaatcacatggatatggtgagaatagaatcaccagaggaaatttctttacttcccaaaacatcctggaatatccctcagcctggtgagggtgatgttcgggaggaggccttgtccacagggggacttgatctcatcttcatgccaggccttgggtttgacaaacatggcaaccgactggggaggggcaagggctactatgatgcctatctgaagcgctgtttgcagcatcaggaagtgaagccctacaccctggcgttggctttcaaagaacagatttgcctccaggtcccagtgaatgaaaacgacatgaaggtagatgaagtcctttacgaagactcgtcaacagcttaaatctggattactacagccaaataatcagtgttttatatgagagtaaagcaaagtatgtgtatttttcccttgtcaaaaattagttgaaattgttcattaatgtgaatacagactgcattttaaaattgtaattatgaaataccttatataaaaccatctttaaaaaccaaaaaaaagcagcaaaaagaattatggcctccttggcctca

SEQ ID NO: 374922 - DNA, 831 bp, Homo sapiens
agggcgccgagggcgggactggactcggcttgggcgtgagatggcggcggcagcggtgagcagcgccaagcggagcctgcggggagagctgaagcagcgtctgcgggcgatgagtgccgaggagcggctacgccagtcccgcgtactgagccagaaggtgattgcccacagtgagtatcaaaagtccaaaagaatttccatctttctgagcatgcaagatgaaattgagacagaagagatcatcaaggacattttccaacgaggcaaaatctgcttcatccctcggtaccggttccagagcaatcacatggatatggtgagaatagaatcaccagaggaaatttctttacttcccaaaacatcctggaatatccctcagcctggtgagggtgatgttcgggaggaggccttgtccacagggggacttgatctcatcttcatgccaggccttgggtttgacaaacatggcaaccgactggggaggggcaagggctactatgatgcctatctgaagcgctgtttgcagcatcaggaagtgaagccctacaccctggcgttggctttcaaagaacagatttgcctccaggtcccagtgaatgaaaacgacatgaaggtagatgaagtcctttacgaagactcgtcaacagcttaaatctggattactacagccaaataatcagtgttttatatgagagtaaagcaaagtatgtgtatttttcccttgtcaaaaatgtacgttggtccttcttcgattagtggtccagggcacccggcggtccgacgtcgtcgttaactctggacgctgaaccgggccctttctgtggatcgccc

SEQ ID NO: 374923 - DNA, 757 bp, Homo sapiens
agggcgccgagggcgggactggactcggcttgggcgtgagatggcggcggcagcggtgagcagcgccaagcggagcctgcggggagagctgaagcagcgtctgcgggcgatgagtgccgaggagcggctacgccagtcccgcgtactgagccagaaggtgattgcccacagtgagtatcaaaagtccaaaagaatttccatctttctgagcatgcaagatgaaattgagacagaagagatcatcaaggacattttccaacgaggcaaaatctgcttcatccctcggtaccggttccagagcaatcacatggatatggtgagaatagaatcaccagaggaaatttctttacttccggggacttgatctcatcttcatgccaggccttgggtttgacaaacatggcaaccgactggggaggggcaagggctactatgatgcctatctgaagcgctgtttgcagcatcaggaagtgaagccctacaccctggcgttggctttcaaagaacagatttgcctccaggtcccagtgaatgaaaacgacatgaaggtagatgaagtcctttacgaagactcgtcaacagcttaaatctggattactacagccaaataatcagtgttttatatgagagtaaagcaaagtatgtgtatttttcccttgtcaaaaattagttgaaattgttcattaatgtgaatacagactgcattttaaaattgtaattatgaaataccttatataaaaccatctttaaaaaccaa

SEQ ID NO: 374924 - DNA, 2544 bp, Homo sapiens
  misc_feature (2316)..(2316): n is a, c, g, or t
  misc_feature (2318)..(2318): n is a, c, g, or t
  misc_feature (2320)..(2320): n is a, c, g, or t
gtcagcgtgttcaaatacttttaatacacaacttttaatacacaagacacactttggaaaactttttccgaagaaaatgatccaaagagcagaatgtgagtcaataaacggagaaaggcaagcagcggttttccatcttctgcgccagtgtgctgtaaacttttaagtccggaaaactatgttttaaccgatgagataatgcctttcaaagtgattagcacgaccgggcgcgcggtggctgacgccagtaatcccagcacttttgagtggctgaggtgagcggatcaccctgaggtcagggtcgagaccagcctggccaaaatggcgaaaccccgtctctactaaaatacaaaaatcagcgaggcgtggtggcgcccgcctgtaatcccagttactcgggaggctgaggcaggagaatcgctttaaaccgggaggcggaggttgcagagccaagatcgggccattgcactccagcctcggtgacaaaatataataataataaaattaaaaagggcttagcatagtatctggccagtaagaagaaattatgattattattttgaccttagacctctcttaactgtctgaaattcgggtttcttaaaggacacaggcggtctctgaggctcccgccagcggaaacaatctcccattaaaataggcatcggttaaatatttgctgaacaaagtaaactacgtctccccgaatcccattgagcgcctactcgagatccggaccggagccgggcaggacgggcccgtcggtcccacacgccgtataagtgggtggagaataccccacacgcccagaccaataggcggggtgaacgaggaccgtgttcaccaactcagcccggctcgcggaatgccttctgttcgcctccgggcttgcagtggctttccgtcgcaggtcaggccgcgttccacttccgccggcagtccagacacgcccctccgggtccaatccccgcccctcacacacctggccccgccccgtcgggagctcggcggtcctctctgcgctaggtcttcttagcgcccgacggggccacgcccatccccgacgctctgaggtcacctacagggccgaccctcggtgggcggagggacggagggaagatggctgcagagaccggatattggcgctgcctccccgaatcccggacctgcgctgaggaggcggttcatctgtggccagcggtgcttcgggacccgcgctgggggaaccctggcgacggggcctggccctgctatatgcgggggcctcggctggagtgagcggcgtggacgcctctttcctccggctcttcccttgttgctgcgagagcgagagggccgcgggcggcggaggcagcggggccgggatggaggacgttaactctaacgtgaacgcggaccaggaggctggagtgcaatggcgcgatctcggctcactgcaacctctgtctcccaggttcaggtgattgcccacagtgagtatcaaaagtccaaaagaatttccatctttctgagcatgcaagatgaaattgagacagaagagatcatcaaggacattttccaacgaggcaaaatctgcttcatccctcggtaccggttccagagcaatcacatggatatggtgagaatagaatcaccagaggaaatttctttacttcccaaaacatcctggaatatccctcagcctggtgagggtgatgttcgggaggaggccttgtccacaggtatagaagacagaactgaacttcaagcctgatggtgctctggcaacagaaagaggacacgagggagtaaagtccaaattcacagtccactgtcaatcccaagagggacaaatgagctggacaggaacagggaggaaagacagagggggacttgatctcatcttcatgccaggccttgggtttgacaaacatggcaaccgactggggaggggcaagggctactatgatgcctatctgaagcgctgtttgcagcatcaggaagtgaagccctacaccctggcgttggctttcaaagaacagatttgcctccaggtcccagtgaatgaaaacgacatgaaggtagatgaagtcctttacgaagactcgtcaacagcttaaatctggattactacagccaaataatcagtgttttatatgagagtaaagcaaagtatgtgtatttttcccttgtcaaaaattagttgaaattgttcattaatgtgaatacagactgcattttaaaattgtaattatgaaataccttatataaaaccatctttaaaaaccaacggggaaagataaaagcataaaattgggcatttgtgcgaaatgaatngngntggccaaagtcggccgtttccctttaggggggggtattaaataaccctcgttcattaacctcctgcccttgggcgtttgggtgcggcaaccgtttttatttaatttaaagggggaattaccgttttcccagaaattcgggatatacccacgaagaaaaatgtgtggcaaagggccccaaagggcgggaatccttaaaggggcggtgtttgggggttgtcctagg

SEQ ID NO: 374925 - DNA, 822 bp, Homo sapiens
agggcgccgagggcgggactggactcggcttgggcgtgagatggcggcggcagcggtgagcagcgccaagcggagcctgcggggagagctgaagcagcgtctgcgggcgatgagtgccgaggagcggctacgccagtcccgcgtactgagccagaaggtgattgcccacagtgagtatcaaaagtccaaaagaatttccatctttctgagcatgcaagatgaaattgagacagaagagatcatcaaggacattttccaacgaggcaaaatctgcttcatccctcggtaccggttccagagcaatcacatggatatggtgagaatagaatcaccagaggaaatttctttacttcccaaaacatcctggaatatccctcagcctggtgagggtgatgttcgggaggaggccttgtccacagggggacttgatctcatcttcatgccaggccttgggtttgacaaacatggcaaccgactggggaggggcaagggctactatgatgcctatctgaagcgctgtttgcagcatcaggaagtgaagccctacaccctggcgttggctttcaaagaacagatttgcctccaggtcccagtgaatgaaaacgacatgaaggtagatgaagtcctttacgaagactcgtcaacagcttaaatctggattactacagccaaataatcagtgttttatatgagagtaaagcaaagtatgtgtatttttcccttgtcaaaaattagttgaaattgttcattaatgtgaatacagactgcattttaaaattgtaattatgaaataccttatataaaaccatctttaaaaaccaa

SEQ ID NO: 374926 - DNA, 861 bp, Homo sapiens
agggcgccgagggcgggactggactcggcttgggcgtgagatggcggcggcagcggtgagcagcgccaagcggagcctgcggggagagctgaagcagcgtctgcgggcgatgagtgccgaggagcggctacgccagtcccgcgtactgagccagaaggtgattgcccacagtgagtatcaaaagtccaaaagaatttccatctttctgagcatgcaagatgaaattgagacagaagagatcatcaaggacattttccaacgaggcaaaatctgcttcatccctcggtaccggttccagagcaatcacatggatatggtgagaatagaatcaccagaggaaatttctttacttcccaaaacatcctggaatatccctcagcctggtgagggtgatgttcgggaggaggccttgtccacagggggacttgatctcatcttcatgccaggccttgggtttgacaaacatggcaaccgactggggaggggcaagggctactatgatgcctatctgaagcgctgtttgcagcatcaggaagtgaagccctacaccctggcgttggctttcaaagaacagatttgcctccaggtcccagtgaatgaaaacgacatgaaggtagatgaagtcctttacgaagactcgtcaacagcttaaatctggattactacagccaaataatcagtgttttatatgagagtaaagcaaagtatgtgtatttttcccttgtcaaaaattagttgaaattgttcattaatgtgaatacagactgcattttaaaattgtaattatgaaataccttatataaaaccatctttaaaaaccaaaaaaaagcagcaaaaagaattatggcctccttggcctca

SEQ ID NO: 374927 - DNA, 968 bp, Homo sapiens
agggcgccgagggcgggactggactcggcttgggcgtgagatggcggcggcagcggtgagcagcgccaagcggagcctgcggggagagctgaagcagcgtctgcgggcgatgagtgccgaggagcggctacgccagtcccgcgtactgagccagaaggtgcgaggccgcccgtagcggaagccgcggcggacagaccctccgaaggcctggcggccagcgattgctgatctgtgcatggtgattgcccacagtgagtatcaaaagtccaaaagaatttccatctttctgagcatgcaagatgaaattgagacagaagagatcatcaaggacattttccaacgaggcaaaatctgcttcatccctcggtaccggttccagagcaatcacatggatatggtgagaatagaatcaccagaggaaatttctttacttcccaaaacatcctggaatatccctcagcctggtgagggtgatgttcgggaggaggccttgtccacagggggacttgatctcatcttcatgccaggccttgggtttgacaaacatggcaaccgactggggaggggcaagggctactatgatgcctatctgaagcgctgtttgcagcatcaggaagtgaagccctacaccctggcgttggctttcaaagaacagatttgcctccaggtcccagtgaatgaaaacgacatgaaggtagatgaagtcctttacgaagactcgtcaacagcttaaatctggattactacagccaaataatcagtgttttatatgagagtaaagcaaagtatgtgtatttttcccttgtcaaaaattagttgaaattgttcattaatgtgaatacagactgcattttaaaattgtaattatgaaataccttatataaaaccatctttaaaaaccaaatagaagtgtgaatagtagaatattaattaaaatggaggctatcagcctgtgattttcagcttaa

SEQ ID NO: 374928 - DNA, 462 bp, Homo sapiens
  misc_feature (20)..(20): n is a, c, g, or t
  misc_feature (23)..(23): n is a, c, g, or t
  misc_feature (42)..(42): n is a, c, g, or t
  misc_feature (44)..(44): n is a, c, g, or t
gggagcgccgcccttggggnagngaggttcggtcttttcccngntggtctagttggaaaggggacttgatctcatcttcatgccaggccttgggtttgacaaacatggcaaccgactggggaggggcaagggctactatgatgcctatctgaagcgctgtttgcagcatcaggaagtgaagccctacaccctggcgttggctttcaaagaacagatttgcctccaggtcccagtgaatgaaaacgacatgaaggtagatgaagtcctttacgaagactcgtcaacagcttaaatctggattactacagccaaataatcagtgttttatatgagagtaaagcaaagtatgtgtatttttcccttgtcaaaaattagttgaaattgttcattaatgtgaatacagactgcattttaaaattgtaattatgaaataccttatataaaaccatctttaaaaaccaa

SEQ ID NO: 374929 - DNA, 760 bp, Homo sapiens
atttccttttttgtccaactctgtgctttttggatattaatggtcacacattgtttttagaaatcagagaaagaattgatgtcattacaaaacaaaaaacacatcctgaaatgatctttcagaaacaattaatcctcttaaatttgttcctcttttccgcaggggacttgatctcatcttcatgccaggccttgggtttgacaaacatggcaaccgactggggaggggcaagggctactatgatgcctatctgaagcgctgtttgcagcatcaggaagtgaagccctacaccctggcgttggctttcaaagaacagatttgcctccaggtcccagtgaatgaaaacgacatgaaggtagatgaagtcctttacgaagactcgtcaacagcttaaatctggattactacagccaaataatcagtgttttatatgagagtaaagcaaagtatgtgtatttttcccttgtcaaaaattagttgaaattgttcattaatgtgaatacagactgcattttaaaattgtaattatgaaataccttatataaaaccatctttaaaaaccaaatagaagtgtgaatagtagaatattaattaaaatggaggctatcagcctgtgattttcagcttaaaaaaaaaaaaaaaaaaaaaaaaactcgagttttttttttttttttttttcatgattcattagacacttttaatgaaaatagtgcttgacaattagaaaacagttaaaatttttgttttagaaatagcattc

SEQ ID NO: 374930 - DNA, 2269 bp, Homo sapiens
gtcagcgtgttcaaatacttttaatacacaacttttaatacacaagacacactttggaaaactttttccgaagaaaatgatccaaagagcagaatgtgagtcaataaacggagaaaggcaagcagcggttttccatcttctgcgccagtgtgctgtaaacttttaagtccggaaaactatgttttaaccgatgagataatgcctttcaaagtgattagcacgaccgggcgcgcggtggctgacgccagtaatcccagcacttttgagtggctgaggtgagcggatcaccctgaggtcagggtcgagaccagcctggccaaaatggcgaaaccccgtctctactaaaatacaaaaatcagcgaggcgtggtggcgcccgcctgtaatcccagttactcgggaggctgaggcaggagaatcgctttaaaccgggaggcggaggttgcagagccaagatcgggccattgcactccagcctcggtgacaaaatataataataataaaattaaaaagggcttagcatagtatctggccagtaagaagaaattatgattattattttgaccttagacctctcttaactgtctgaaattcgggtttcttaaaggacacaggcggtctctgaggctcccgccagcggaaacaatctcccattaaaataggcatcggttaaatatttgctgaacaaagtaaactacgtctccccgaatcccattgagcgcctactcgagatccggaccggagccgggcaggacgggcccgtcggtcccacacgccgtataagtgggtggagaataccccacacgcccagaccaataggcggggtgaacgaggaccgtgttcaccaactcagcccggctcgcggaatgccttctgttcgcctccgggcttgcagtggctttccgtcgcaggtcaggccgcgttccacttccgccggcagtccagacacgcccctccgggtccaatccccgcccctcacacacctggccccgccccgtcgggagctcggcggtcctctctgcgctaggtcttcttagcgcccgacggggccacgcccatccccgacgctctgaggtcacctacagggccgaccctcggtgggcggagggacggagggaagatggctgcagagaccggatattggcgctgcctccccgaatcccggacctgcgctgaggaggcggttcatctgtggccagcggtgcttcgggacccgcgctgggggaaccctggcgacggggcctggccctgctatatgcgggggcctcggctggagtgagcggcgtggacgcctctttcctccggctcttcccttgttgctgcgagagcgagagggccgcgggcggcggaggcagcggggccgggatggaggacgttaactctaacgtgaacgcggaccaggaggctggagtgcaatggcgcgatctcggctcactgcaacctctgtctcccaggttcaggtgattgcccacagtgagtatcaaaagtccaaaagaatttccatctttctgagcatgcaagatgaaattgagacagaagagatcatcaaggacattttccaacgaggcaaaatctgcttcatccctcggtaccggttccagagcaatcacatggatatggtgagaatagaatcaccagaggaaatttctttacttcccaaaacatcctggaatatccctcagcctggtgagggtgatgttcgggaggaggccttgtccacaggtatagaagacagaactgaacttcaagcctgatggtgctctggcaacagaaagaggacacgagggagtaaagtccaaattcacagtccactgtcaatcccaagagggacaaatgagctggacaggaacagggaggaaagacagagggggacttgatctcatcttcatgccaggccttgggtttgacaaacatggcaaccgactggggaggggcaagggctactatgatgcctatctgaagcgctgtttgcagcatcaggaagtgaagccctacaccctggcgttggctttcaaagaacagatttgcctccaggtcccagtgaatgaaaacgacatgaaggtagatgaagtcctttacgaagactcgtcaacagcttaaatctggattactacagccaaataatcagtgttttatatgagagtaaagcaaagtatgtgtatttttcccttgtcaaaaattagttgaaattgttcattaatgtgaatacagactgcattttaaaattgtaattatgaaataccttatataaaaccatctttaaaaaccaa

SEQ ID NO: 374931 - DNA, 967 bp, Homo sapiens
agggcgccgagggcgggactggactcggcttgggcgtgagatggcggcggcagcggtgagcagcgccaagcggagcctgcggggagagctgaagcagcgtctgcgggcgatgagtgccgaggagcggctacgccagtcccgcgtactgagccagaaggtgattgcccacagtgagtatcaaaagtccaaaagaatttccatctttctgagcatgcaagatgaaattgagacagaagagatcatcaaggacattttccaacgaggcaaaatctgcttcatccctcggtaccggttccagagcaatcacatggatatggtgagaatagaatcaccagaggaaatttctttacttcccaaaacatcctggaatatccctcagcctggtgagggtgatgttcgggaggaggccttgtccacaggtatagaagacagaactgaacttcaagcctgatggtgctctggcaacagaaagaggacacgagggagtaaagtccaaattcacagtccactgtcaatcccaagagggacaaatgagctggacaggaacagggaggaaagacagagggggacttgatctcatcttcatgccaggccttgggtttgacaaacatggcaaccgactggggaggggcaagggctactatgatgcctatctgaagcgctgtttgcagcatcaggaagtgaagccctacaccctggcgttggctttcaaagaacagatttgcctccaggtcccagtgaatgaaaacgacatgaaggtagatgaagtcctttacgaagactcgtcaacagcttaaatctggattactacagccaaataatcagtgttttatatgagagtaaagcaaagtatgtgtatttttcccttgtcaaaaattagttgaaattgttcattaatgtgaatacagactgcattttaaaattgtaattatgaaataccttatataaaaccatctttaaaaaccaa

SEQ ID NO: 374932 - DNA, 603 bp, Homo sapiens
cgaccttatttgcctcgagccaagattccggcctggcgagagtttgtgcggcgacatgaaactgcttacccacaatctgctgagctcgcatgtgcggggggtggggtcccgtggcttccccctgcgcctccaggccaccgaggtccgtatctgccctgtggaattcaaccccaacttcgtggcgcgtatgatacctaaagtggagtggtcggcgttcctggaggcggccgataacttgcgtctgatccaggtgccgaaagggccggttgagggatatgaggagaatgaggagtttctgaggaccatgcaccacctgctgctggaggtggaagtgatagagggcaccctgcagtgcccggaatctggacgtatgttccccatcagccgcgggatccccaacatgctgctgagtgaagaggaaactgagagttgattgtgccaggcgccagtttttcttgttatgactgtgtatttttgttgatctataccctgtttccgaattctgccgtgtgtatccccaacccttgacccaatgacaccaaacacagtgtttttgagctcggtattatatatttttttctcattaaaggtttaaaaccaaaa

SEQ ID NO: 374933 - DNA, 1516 bp, Homo sapiens
gggccacccgcagaacagagcttccgggacccacgcctcgtttgcactgggtgctggacagccgacgcaactacaaatggggcggagctttcggcactggagcagctaatttgcatataggaatgaggtgcggctcggcttccatgggcctaatttacagatagggcggtatttctgccccttaaccgaaagtgggatacagaggacgacggtgttaggcgcctgtgtaggagtaaaatgtgtttattttgcattcaacgagagctcctgcattgcagctattttgcatatgatttgcatcttacgaagaatttgtggcaaaaaaaagctgggcgtgcgccgtaggaacctcctgctgagacgcttccggtagcggcgcgtgacccgacaggtctttcacctacctacctcagctcccacaaacacgagaagttccagcaagttcgccacttccggttctcctggctatccaatagcatcgagtggagcatccccggaagtgaggcagcggaggacgacctttttccggttccggcctggcgagagtttgtgcggcgacatgaaactgcttacccacaatctgctgagctcgcatgtgcggggggtggggtcccgtggcttccccctgcgcctccagagcaataaagtcagctggctttctcaccaaaaaaaaaaaaaaaaaaaaaaaaaaaaaaaaaaaaaaaaaaaaaaaaaaaaaaaaaaaaaaaaaaaagggggggggcgaagataaaagatgcgcacccgagggggacacaaaaacaccacaccccaccgggcgatgctacacagaggggtcacaaacaaagagaggcgaaagtaccacaacaacacgaagcacgcgcccacagaacaaaccacaacactaggcacgaggacacaaaccgagtccacccggggcgacacacgcgggggggggagaacacacaacaaaggaggagggaggggagcgaaatgaagggcgcggaacaacaacacgagcagccgagaaggaagagggggacgccgcagagggcggaaaaacaaacaacatagaccagccgggaggacaagggagaagggaaacagcagcgcgagcaggcatcacccacggcgcgcgccgaagaaagagaatgaaagagaacagagaagaagaagacaagagcgagcaggcgagacaaagagaccacctacacagagcggtgcgcggagctgtgctacacagcaacagaccgacacccagggacagcgagggagacagagagcgggaggaagcgcagccgacggcagagaggaccaggaaggaagtcagaggagccgaggtaagagaggagcgggacaaggggcggggagggagcggacccagagcgaaagcgggacgagccaagcaagagaggagtaggaggagcgagagcgaggtgaggagggcagaagagcgagcaagagaagcaaagaacagagagacggaggagaagacgaagagacaagggaacgacacaggaagagagcgacgcgagct

SEQ ID NO: 374934 - DNA, 963 bp, Homo sapiens
gggccacccgcagaacagagcttccgggacccacgcctcgtttgcactgggtgctggacagccgacgcaactacaaatggggcggagctttcggcactggagcagctaatttgcatataggaatgaggtgcggctcggcttccatgggcctaatttacagatagggcggtatttctgccccttaaccgaaagtgggatacagaggacgacggtgttaggcgcctgtgtaggagtaaaatgtgtttattttgcattcaacgagagctcctgcattgcagctattttgcatatgatttgcatcttacgaagaatttgtggcaaaagcgtgacccgacaggtctttcacctacctacctcagctcccacaaacacgagaagttccagcaagttcgccacttccggttctcctggctatccaatagcatcgagtggagcatccccggaagtgaggcagcggaggacgacctttttccggttccggcctggcgagaagtttgtgcggtcgacactgaaactggttacgcgacaatctgcgtggactctcatgttccgtaggttggagtcccatagctttcgccctactcgttcaactcacccaagatcatatcttaccttatgaattcaacctgcactgtcgagcgccttattatacttatagtagattttctcgcttccttgaagccgtccttacctacctctaacccaattccaaaggtccgctcatgatataataataaacttcaattgtatatccacccccacttttctattatactactgtgttaggcaccataccctcttccaatctttcctatttaccgactctgtatccatacacgaacacacattttactcccgtatatatattttcataaccgttaaccgctcacagaaactctctctacttcgctgccgccttcccataacaatgcgcactcactctgcacttaactactgacgact

SEQ ID NO: 374935 - DNA, 594 bp, Homo sapiens
gcggccgcctactactactactacattcgagagtttgtgcggcgacatgaaactgcttacccacaatctgctgagctcgcatgtgcggggggtggggtcccgtggcttccccctgcgcctccaggccaccgaggtccgtatctgccctgtggaattcaaccccaacttcgtggcgcgtatgatacctaaagtggagtggtcggcgttcctggaggcggccgataacttgcgtctgatccaggtgccgaaagggccggttgagggatatgaggagaatgaggagtttctgaggaccatgcaccacctgctgctggaggtggaagtgatagagggcaccctgcagtgcccggaatctggacgtatgttccccatcagccgcgggatccccaacatgctgctgagtgaagaggaaactgagagttgattgtgccaggcgccagtttttcttgttatgactgtgtatttttgttgatctataccctgtttccgaattctgccgtgtgtatccccaacccttgacccaatgacaccaaacacagtgtttttgagctcggtattatatatttttttctcattaaaggtttaaaaccaaaa

SEQ ID NO: 374936 - DNA, 604 bp, Homo sapiens
ggctgatgctgaggtgactctaaggattcccgtacttggagagtttgtgcggcgacatgaaactgcttacccacaatctgctgagctcgcatgtgcggggggtggggtcccgtggcttccccctgcgcctccaggccaccgaggtccgtatctgccctgtggaattcaaccccaacttcgtggcgcgtatgatacctaaagtggagtggtcggcgttcctggaggcggccgataacttgcgtctgatccaggtgccgaaagggccggttgagggatatgaggagaatgaggagtttctgaggaccatgcaccacctgctgctggaggtggaagtgatagagggcaccctgcagtgcccggaatctggacgtatgttccccatcagccgcgggatccccaacatgctgctgagtgaagaggaaactgagagttgattgtgccaggcgccagtttttcttgttatgactgtgtatttttgttgatctataccctgtttccgaattctgccgtgtgtatccccaacccttgacccaatgacaccaaacacagtgtttttgagctcggtattatatatttttttctcattaaaggtttaaaaccaaaa

SEQ ID NO: 374937 - DNA, 1283 bp, Homo sapiens
gggccacccgcagaacagagcttccgggacccacgcctcgtttgcactgggtgctggacagccgacgcaactacaaatggggcggagctttcggcactggagcagctaatttgcatataggaatgaggtgcggctcggcttccatgggcctaatttacagatagggcggtatttctgccccttaaccgaaagtgggatacagaggacgacggtgttaggcgcctgtgtaggagtaaaatgtgtttattttgcattcaacgagagctcctgcattgcagctattttgcatatgatttgcatcttacgaagaatttgtggcaaaaaaaagctgggcgtgcgccgtaggaacctcctgctgagacgcttccggtagcggcgcgtgacccgacaggtctttcacctacctacctcagctcccacaaacacgagaagttccagcaagttcgccacttccggttctcctggctatccaatagcatcgagtggagcatccccggaagtgaggcagcggaggacgacctttttccggttccggcctggcgagagtttgtgcggcgacatgaaactgcttacccacaatctgctgagctcgcatgtgcggggggtggggtcccgtggcttccccctgcgcctccaggccaccgaggtccgtatctgccctgtggaattcaaccccaacttcgtggcgcgtatgatacctaaagtggagtggtcggcgttcctggaggcggccgataacttgcgtctgatccaggtgccgaaagggccggttgagggatatgaggagaatgaggagtttctgaggaccatgcaccacctgctgctggaggtggaagtgatagagggcaccctgcagtgcccggaatctggacgtatgttccccatcagccgcgggatccccaacatgctgctgagtgaagaggaaactgagagttgattgtgccaggcgccagtttttcttgttatgactgtgtatttttgttgatctataccctgtttccgaattctgccgtgtgtatccccaacccttgacccaatgacaccaaacacagtgtttttgagctcggtattatatatttttttctcattaaaggtttaaaaccaaaaaaaaaaaaaaaaacttcaggggggggcccggggcccattacggcctatatggaggcggattacaattcacttggccgggggtttacaacgcggggactgggacccggggttacccactaattagctttgagtcccctttttcagctggggatatcgggggcccacgtcgcccttcc

SEQ ID NO: 374938 - DNA, 1617 bp, Homo sapiens
gggccacccgcagaacagagcttccgggacccacgcctcgtttgcactgggtgctggacagccgacgcaactacaaatggggcggagctttcggcactggagcagctaatttgcatataggaatgaggtgcggctcggcttccatgggcctaatttacagatagggcggtatttctgccccttaaccgaaagtgggatacagaggacgacggtgttaggcgcctgtgtaggagtaaaatgtgtttattttgcattcaacgagagctcctgcattgcagctattttgcatatgatttgcatcttacgaagaatttgtggcaaaaaaaagctgggcgtgcgccgtaggaacctcctgctgagacgcttccggtagcggcgcgtgacccgacaggtctttcacctacctacctcagctcccacaaacacgagaagttccagcaagttcgccacttccggttctcctggctatccaatagcatcgagtggagcatccccggaagtgaggcagcggaggacgacctttttccggttccggcctggcgagagtttgtgcggcgacatgaaactgcttacccacaatctgctgagctcgcatgtgcggggggtggggtcccgtggcttccccctgcgcctccaggccaccgaggtccgtatctgccctgtggaattcaaccccaacttcgtggcgcgtatgatacctaaagtggagtggtcggcgttcctggaggcggccgataacttgcgtctgatccaggtgccgaaagggccggttgagggatatgaggagaatgaggagtttctgaggaccatgcaccacctgctgctggaggtggaagtgatagagggcaccctgcagtgcccggaatctggacgtatgttccccatcagccgcgggatccccaacatgctgctgagtgaagaggaaactgagagttgattgtgccaggcgccagtttttcttgttatgactgtgtatttttgttgatctataccctgtttccgaattctgccgtgtgtatccccaacccttgacccaatgacaccaaacacagtgtttttgagctcggtattatatatttttttctcattaaaggtttaaaaccaaaagcggtttctctttgcagcaaatatacattaaaatagagtctctgtacagccaagggctctgggccctggcttgccccatgtccctgcgcctccctggccaaacccaaaaataaatatagtgttattgctctgcagggcatagaggcagtgctctcctaccccctgaggaggctcgttgggagctgatggggaagccctggccaccccaggggtccaggggctggagtctgcttggagttattgcttcaaggggggacactaatgcccaatgcaaaagatgatgaggagcaggatgaagtacaggcgcagcaggttccgacgctccttgaaggtggcgcagcagcccaagaccccagtcaccatgacgacagtgcccgccaccaccaggatgtaggctgtggccaggtaggtgcctgaggccagcaggctgatgtagtcactcttgagggccagcgtccagatgcccactgccatgacagccaggccagccagccagaaccacaaatatcg

SEQ ID NO: 374939 - DNA, 1294 bp, Homo sapiens
gggccacccgcagaacagagcttccgggacccacgcctcgtttgcactgggtgctggacagccgacgcaactacaaatggggcggagctttcggcactggagcagctaatttgcatataggaatgaggtgcggctcggcttccatgggcctaatttacagatagggcggtatttctgccccttaaccgaaagtgggatacagaggacgacggtgttaggcgcctgtgtaggagtaaaatgtgtttattttgcattcaacgagagctcctgcattgcagctattttgcatatgatttgcatcttacgaagaatttgtggcaaaaaaaagctgggcgtgcgccgtaggaacctcctgctgagacgcttccggtagcggcgcgtgacccgacaggtctttcacctacctacctcagctcccacaaacacgagaagttccagcaagttcgccacttccggttctcctggctatccaatagcatcgagtggagcatccccggaagtgaggcagcggaggacgacctttttccggttccggcctggcgagagtttgtgcggcgacatgaaactgcttacccacaatctgctgagctcgcatgtgcggggggtggggtcccgtggcttccccctgcgcctccaggccaccgaggtccgtatctgccctgtggaattcaaccccaacttcgtggcgcgtatgatacctaaagtggagtggtcggcgttcctggaggcggccgataacttgcgtctgatccaggtgccgaaagggccggttgagggatatgaggagaatgaggagtttctgaggaccatgcaccacctgctgctggaggtggaagtgatagagggcaccctgcagtgcccggaatctggacgtatgttccccatcagccgcgggatccccaacatgctgctgagtgaagaggaaactgagagttgattgtgccaggcgccagtttttcttgttatgactgtgtatttttgttgatctataccctgtttccgaattctgccgtgtgtatccccaacccttgacccaatgacaccaaacacagtgtttttgagctcggtattatatatttttttctcattaaaggtttaaaaccaaaagcggtttctctttgcagcaaatatacattaaaatagagtctctgtacagccaagggctctgggccctggcttgccccatgtccctgcgcctccctggccaaacccaaaaataaatatagtgttattgctctgtctccgaggaaccctttggactgtcagggctggccggctctgctttgatgtagag

SEQ ID NO: 374940 - DNA, 1260 bp, Homo sapiens
  misc_feature (1119)..(1119): n is a, c, g, or t
gggccacccgcagaacagagcttccgggacccacgcctcgtttgcactgggtgctggacagccgacgcaactacaaatggggcggagctttcggcactggagcagctaatttgcatataggaatgaggtgcggctcggcttccatgggcctaatttacagatagggcggtatttctgccccttaaccgaaagtgggatacagaggacgacggtgttaggcgcctgtgtaggagtaaaatgtgtttattttgcattcaacgagagctcctgcattgcagctattttgcatatgatttgcatcttacgaagaatttgtggcaaaaaaaagctgggcgtgcgccgtaggaacctcctgctgagacgcttccggtagcggcgcgtgacccgacaggtctttcacctacctacctcagctcccacaaacacgagaagttccagcaagttcgccacttccggttctcctggctatccaatagcatcgagtggagcatccccggaagtgaggcagcggaggacgacctttttccggttccggcctggcgagagtttgtgcggcgacatgaaactgcttacccacaatctgctgagctcgcatgtgcggggggtggggtcccgtggcttccccctgcgcctccaggccaccgaggtccgtatctgccctgtggaattcaaccccaacttcgtggcgcgtatgatacctaaagtggagtggtcggcgttcctggaggcggccgataacttgcgtctgatccaggtgccgaaagggccggttgagggatatgaggagaatgaggagtttctgaggaccatgcaccacctgctgctggaggtggaagtgatagagggcaccctgcagtgcccggaatctggacgtatgttccccatcagccgcgggatccccaacatgctgctgagtgaagaggaaactgagagttgattgtgccaggcgccagtttttcttgttatgactgtgtatttttgttgatctataccctgtttccgaattctgccgtgtgtatccccaacccttgacccaatgacaccaaacacagtgtttttgagctcggtattatatatttttttctcattaaaggtttaaaaccaaaaaaaaaacaacgnaataaacaaacatgccggcgcaattcgagcttacattgcccaattccccctatgtgagccgtatacaattcactgaccgtcgtttaacactgtcggacttggaaaccctgccgtaaccaacttaaatcgcttggacacaac

SEQ ID NO: 374941 - DNA, 2145 bp, Homo sapiens
gggccacccgcagaacagagcttccgggacccacgcctcgtttgcactgggtgctggacagccgacgcaactacaaatggggcggagctttcggcactggagcagctaatttgcatataggaatgaggtgcggctcggcttccatgggcctaatttacagatagggcggtatttctgccccttaaccgaaagtgggatacagaggacgacggtgttaggcgcctgtgtaggagtaaaatgtgtttattttgcattcaacgagagctcctgcattgcagctattttgcatatgatttgcatcttacgaagaatttgtggcaaaaaaaagctgggcgtgcgccgtaggaacctcctgctgagacgcttccggtagcggcgcgtgacccgacaggtctttcacctacctacctcagctcccacaaacacgagaagttccagcaagttcgccacttccggttctcctggctatccaatagcatcgagtggagcatccccggaagtgaggcagcggaggacgacctttttccggttccggcctggcgagagtttgtgcggcgacatgaaactgcttacccacaatctgctgagctcgcatgtgcggggggtggggtcccgtggcttccccctgcgcctccaggtacccgccggcggcagtcttcccttttcgggcgggatggtgggccggggtccagtgcttgcctaaactcctccgccctgcaggccaccgaggtccgtatctgccctgtggaattcaaccccaacttcgtggcgcgtatgatacctaaagtggagtggtcggcgttcctggaggcggccgataacttgcgtctgatccaggtgccgaaagggccggttgagggatatgaggagaatgaggagtttctgaggaccatgcaccacctgctgctggaggtggaagtgatagagggcaccctgcagtgcccggaatctggacgtatgttccccatcagccgcgggatccccaacatgctgctgagtgaagaggaaactgagagttgattgtgccaggcgccagtttttcttgttatgactgtgtatttttgttgatctataccctgtttccgaattctgccgtgtgtatccccaacccttgacccaatgacaccaaacacagtgtttttgagctcggtattatatatttttttctcattaaaggtttaaaaccaaaagcggtttctctttgcagcaaatatacattaaaatagagtctctgtacagccaagggctctgggccctggcttgccccatgtccctgcgcctccctggccaaacccaaaaataaatatagtgttattgctctgcagggcatagaggcagtgctctcctaccccctgaggaggctcgttgggagctgatggggaagccctggccaccccaggggtccaggggctggagtctgcttggagttattgcttcaaggggggacactaatgcccaatgcaaatgatgagaggaggagcgaagggggcatgggcctttgctctccaagtcccactctgctttgaagagggggtaggattaagcagcagcaaaagcatcacccactgggagactctggcctccatccccttccctccctgagataggtttctgcctcccacgcatcccgtgcagccccctatggcttccgcaaggccccctacactctgggggcacgttatggcttgcaaggggcagcactgtgcccagagcctggacacacgttcccagcttctgacaccccctaggagggggaggagagggcgtggggcctgttcccaggggctgatggcattgccctggccctgccagcaggctgtggcactgcccagaccccagctccgccccagcccttggggctgaccccatgctaggcaggtcctgccagaacccccaccagtcccaccccttgcctcagtccatcatggcctcgagcatctccaagaacagcttgtgcatgggcaccttgccctccagcttcaccccatagaaatgggccagcactttgcccgctgtctggcggaggagcggtagcgtgagcagcagcctgcccgcccgccgccgctcagcaccccctccggggccagcccggccggcttcatactccagcagggcctcgtgcagagcttctcgcagctgctccac

SEQ ID NO: 374942 - DNA, 2151 bp, Homo sapiens
gggccacccgcagaacagagcttccgggacccacgcctcgtttgcactgggtgctggacagccgacgcaactacaaatggggcggagctttcggcactggagcagctaatttgcatataggaatgaggtgcggctcggcttccatgggcctaatttacagatagggcggtatttctgccccttaaccgaaagtgggatacagaggacgacggtgttaggcgcctgtgtaggagtaaaatgtgtttattttgcattcaacgagagctcctgcattgcagctattttgcatatgatttgcatcttacgaagaatttgtggcaaaaaaaagctgggcgtgcgccgtaggaacctcctgctgagacgcttccggtagcggcgcgtgacccgacaggtctttcacctacctacctcagctcccacaaacacgagaagttccagcaagttcgccacttccggttctcctggctatccaatagcatcgagtggagcatccccggaagtgaggcagcggaggacgacctttttccggttccggcctggcgagagtttgtgcggcgacatgaaactgcttacccacaatctgctgagctcgcatgtgcggggggtggggtcccgtggcttccccctgcgcctccaggccaccgaggtccgtatctgccctgtggaattcaaccccaacttcgtggcgcgtatgatacctaaagtggagtggtcggcgttcctggaggcggccgataacttgcgtctgatccaggtgccgaaagggccggttgagggatatgaggagaatgaggagtttctgaggaccatgcaccacctgctgctggaggtgagaagcggcccatcacttgcttcccgggccacctgcctcccgcactgaggctgccagtgctcagctctgtccctccctgcccgcaggtggaagtgatagagggcaccctgcagtgcccggaatctggacgtatgttccccatcagccgcgggatccccaacatgctgctgagtgaagaggaaactgagagttgattgtgccaggcgccagtttttcttgttatgactgtgtatttttgttgatctataccctgtttccgaattctgccgtgtgtatccccaacccttgacccaatgacaccaaacacagtgtttttgagctcggtattatatatttttttctcattaaaggtttaaaaccaaaagcggtttctctttgcagcaaatatacattaaaatagagtctctgtacagccaagggctctgggccctggcttgccccatgtccctgcgcctccctggccaaacccaaaaataaatatagtgttattgctctgcagggcatagaggcagtgctctcctaccccctgaggaggctcgttgggagctgatggggaagccctggccaccccaggggtccaggggctggagtctgcttggagttattgcttcaaggggggacactaatgcccaatgcaaatgatgagaggaggagcgaagggggcatgggcctttgctctccaagtcccactctgctttgaagagggggtaggattaagcagcagcaaaagcatcacccactgggagactctggcctccatccccttccctccctgagataggtttctgcctcccacgcatcccgtgcagccccctatggcttccgcaaggccccctacactctgggggcacgttatggcttgcaaggggcagcactgtgcccagagcctggacacacgttcccagcttctgacaccccctaggagggggaggagagggcgtggggcctgttcccaggggctgatggcattgccctggccctgccagcaggctgtggcactgcccagaccccagctccgccccagcccttggggctgaccccatgctaggcaggtcctgccagaacccccaccagtcccaccccttgcctcagtccatcatggcctcgagcatctccaagaacagcttgtgcatgggcaccttgccctccagcttcaccccatagaaatgggccagcactttgcccgctgtctggcggaggagcggtagcgtgagcagcagcctgcccgcccgccgccgctcagcaccccctccggggccagcccggccggcttcatactccagcagggcctcgtgcagagcttctcgcagctgctccac

SEQ ID NO: 374943 - DNA, 1972 bp, Homo sapiens
gggccacccgcagaacagagcttccgggacccacgcctcgtttgcactgggtgctggacagccgacgcaactacaaatggggcggagctttcggcactggagcagctaatttgcatataggaatgaggtgcggctcggcttccatgggcctaatttacagatagggcggtatttctgccccttaaccgaaagtgggatacagaggacgacggtgttaggcgcctgtgtaggagtaaaatgtgtttattttgcattcaacgagagctcctgcattgcagctattttgcatatgatttgcatcttacgaagaatttgtggcaaaaaaaagctgggcgtgcgccgtaggaacctcctgctgagacgcttccggtagcggcgcgtgacccgacaggtctttcacctacctacctcagctcccacaaacacgagaagttccagcaagttcgccacttccggttctcctggctatccaatagcatcgagtggagcatccccggaagtgaggcagcggaggacgacctttttccggttccggcctggcgagagtttgtgcggcgacatgaaactgcttacccacaatctgctgagctcgcatgtgcggggggtggggtcccgtggcttccccctgcgcctccaggccaccgaggtccgtatctgccctgtggaattcaaccccaacttcgtggcgcgtatgatacctaaagtggagtggtcggcgttcctggaggcggccgataacttgcgtctgatccaggtgccgaaagggccggttgagggatatgaggagaatgaggagtttctgaggaccatgcaccacctgctgctggaagaggaaactgagagttgattgtgccaggcgccagtttttcttgttatgactgtgtatttttgttgatctataccctgtttccgaattctgccgtgtgtatccccaacccttgacccaatgacaccaaacacagtgtttttgagctcggtattatatatttttttctcattaaaggtttaaaaccaaaagcggtttctctttgcagcaaatatacattaaaatagagtctctgtacagccaagggctctgggccctggcttgccccatgtccctgcgcctccctggccaaacccaaaaataaatatagtgttattgctctgcagggcatagaggcagtgctctcctaccccctgaggaggctcgttgggagctgatggggaagccctggccaccccaggggtccaggggctggagtctgcttggagttattgcttcaaggggggacactaatgcccaatgcaaatgatgagaggaggagcgaagggggcatgggcctttgctctccaagtcccactctgctttgaagagggggtaggattaagcagcagcaaaagcatcacccactgggagactctggcctccatccccttccctccctgagataggtttctgcctcccacgcatcccgtgcagccccctatggcttccgcaaggccccctacactctgggggcacgttatggcttgcaaggggcagcactgtgcccagagcctggacacacgttcccagcttctgacaccccctaggagggggaggagagggcgtggggcctgttcccaggggctgatggcattgccctggccctgccagcaggctgtggcactgcccagaccccagctccgccccagcccttggggctgaccccatgctaggcaggtcctgccagaacccccaccagtcccaccccttgcctcagtccatcatggcctcgagcatctccaagaacagcttgtgcatgggcaccttgccctccagcttcaccccatagaaatgggccagcactttgcccgctgtctggcggaggagcggtagcgtgagcagcagcctgcccgcccgccgccgctcagcaccccctccggggccagcccggccggcttcatactccagcagggcctcgtgcagagcttctcgcagctgctccac

SEQ ID NO: 374944 - DNA, 1392 bp, Homo sapiens
gtttttttgccgtgctggtgtgcacagtgcaatgtgatatgcggaatgatatagagagaaagtgaatagatgtcatgggtcgggttagaagatgtgtgttaagtttgtgtctgctgcccgttgttggtcgatacgttgtgttccccgcgttgttgtgcactctggtcgtgtgtgtcaaatgtttggttggacggagaaatcataagcagtaaaccggcgttttggctattttttcccccccccttttggggcccccccatttccccccctggcccaaaaaaggggcccggaaacacctgccccgcccctttctacccctttttcccccccccccaaaaaaccccgcgcgttttttttttttttttttttttttttttttttttttttttgagctcggtattatatatttttttctcattaaaggtttaaaaccaaaagcggtttctctttgcagcaaatatacattaaaatagagtctctgtacagccaagggctctgggccctggcttgccccatgtccctgcgcctccctggccaaacccaaaaataaatatagtgttattgctctgcagggcatagaggcagtgctctcctaccccctgaggaggctcgttgggagctgatggggaagccctggccaccccaggggtccaggggctggagtctgcttggagttattgcttcaaggggggacactaatgcccaatgcaaatgatgagaggaggagcgaagggggcatgggcctttgctctccaagtcccactctgctttgaagagggggtaggattaagcagcagcaaaagcatcacccactgggagactctggcctccatccccttccctccctgagataggtttctgcctcccacgcatcccgtgcagccccctatggcttccgcaaggccccctacactctgggggcacgttatggcttgcaaggggcagcactgtgcccagagcctggacacacgttcccagcttctgacaccccctaggagggggaggagagggcgtggggcctgttcccaggggctgatggcattgccctggccctgccagcaggctgtggcactgcccagaccccagctccgccccagcccttggggctgaccccatgctaggcaggtcctgccagaacccccaccagtcccaccccttgcctcagtccatcatggcctcgagcatctccaagaacagcttgtgcatgggcaccttgccctccagcttcaccccatagaaatgggccagcactttgcccgctgtctggcggaggagcggtagcgtgagcagcagcctgcccgcccgccgccgctcagcaccccctccggggccagcccggccggcttcatactccagcagggcctcgtgcagagcttctcgcagctgctccac

SEQ ID NO: 374945 - DNA, 2234 bp, Homo sapiens
gggccacccgcagaacagagcttccgggacccacgcctcgtttgcactgggtgctggacagccgacgcaactacaaatggggcggagctttcggcactggagcagctaatttgcatataggaatgaggtgcggctcggcttccatgggcctaatttacagatagggcggtatttctgccccttaaccgaaagtgggatacagaggacgacggtgttaggcgcctgtgtaggagtaaaatgtgtttattttgcattcaacgagagctcctgcattgcagctattttgcatatgatttgcatcttacgaagaatttgtggcaaaaaaaagctgggcgtgcgccgtaggaacctcctgctgagacgcttccggtagcggcgcgtgacccgacaggtctttcacctacctacctcagctcccacaaacacgagaagttccagcaagttcgccacttccggttctcctggctatccaatagcatcgagtggagcatccccggaagtgaggcagcggaggacgacctttttccggttccggcctggcgagagtttgtgcggcgacatgaaactgcttacccacaatctgctgagctcgcatgtgcggggggtggggtcccgtggcttccccctgcgcctccaggtacccgccggcggcagtcttcccttttcgggcgggatggtgggccggggtccagtgcttgcctaaactcctccgccctgcaggccaccgaggtccgtatctgccctgtggaattcaaccccaacttcgtggcgcgtatgatacctaaagtggagtggtcggcgttcctggaggcggccgataacttgcgtctgatccaggtgccgaaagggccggttgagggatatgaggagaatgaggagtttctgaggaccatgcaccacctgctgctggaggtgagaagcggcccatcacttgcttcccgggccacctgcctcccgcactgaggctgccagtgctcagctctgtccctccctgcccgcaggtggaagtgatagagggcaccctgcagtgcccggaatctggacgtatgttccccatcagccgcgggatccccaacatgctgctgagtgaagaggaaactgagagttgattgtgccaggcgccagtttttcttgttatgactgtgtatttttgttgatctataccctgtttccgaattctgccgtgtgtatccccaacccttgacccaatgacaccaaacacagtgtttttgagctcggtattatatatttttttctcattaaaggtttaaaaccaaaagcggtttctctttgcagcaaatatacattaaaatagagtctctgtacagccaagggctctgggccctggcttgccccatgtccctgcgcctccctggccaaacccaaaaataaatatagtgttattgctctgcagggcatagaggcagtgctctcctaccccctgaggaggctcgttgggagctgatggggaagccctggccaccccaggggtccaggggctggagtctgcttggagttattgcttcaaggggggacactaatgcccaatgcaaatgatgagaggaggagcgaagggggcatgggcctttgctctccaagtcccactctgctttgaagagggggtaggattaagcagcagcaaaagcatcacccactgggagactctggcctccatccccttccctccctgagataggtttctgcctcccacgcatcccgtgcagccccctatggcttccgcaaggccccctacactctgggggcacgttatggcttgcaaggggcagcactgtgcccagagcctggacacacgttcccagcttctgacaccccctaggagggggaggagagggcgtggggcctgttcccaggggctgatggcattgccctggccctgccagcaggctgtggcactgcccagaccccagctccgccccagcccttggggctgaccccatgctaggcaggtcctgccagaacccccaccagtcccaccccttgcctcagtccatcatggcctcgagcatctccaagaacagcttgtgcatgggcaccttgccctccagcttcaccccatagaaatgggccagcactttgcccgctgtctggcggaggagcggtagcgtgagcagcagcctgcccgcccgccgccgctcagcaccccctccggggccagcccggccggcttcatactccagcagggcctcgtgcagagcttctcgcagctgctccac

SEQ ID NO: 374946 - DNA, 1044 bp, Homo sapiens
actatagggcaaaagtgtgttttgttgttttgtgtttttttgagctcggtattatatatttttttctcattaaaggtttaaaaccaaaagcggtttctctttgcagcaaatatacattaaaatagagtctctgtacagccaagggctctgggccctggcttgccccatgtccctgcgcctccctggccaaacccaaaaataaatatagtgttattgctctgcagggcatagaggcagtgctctcctaccccctgaggaggctcgttgggagctgatggggaagccctggccaccccaggggtccaggggctggagtctgcttggagttattgcttcaaggggggacactaatgcccaatgcaaatgatgagaggaggagcgaagggggcatgggcctttgctctccaagtcccactctgctttgaagagggggtaggattaagcagcagcaaaagcatcacccactgggagactctggcctccatccccttccctccctgagataggtttctgcctcccacgcatcccgtgcagccccctatggcttccgcaaggccccctacactctgggggcacgttatggcttgcaaggggcagcactgtgcccagagcctggacacacgttcccagcttctgacaccccctaggagggggaggagagggcgtggggcctgttcccaggggctgatggcattgccctggccctgccagcaggctgtggcactgcccagaccccagctccgccccagcccttggggctgaccccatgctaggcaggtcctgccagaacccccaccagtcccaccccttgcctcagtccatcatggcctcgagcatctccaagaacagcttgtgcatgggcaccttgccctccagcttcaccccatagaaatgggccagcactttgcccgctgtctggcggaggagcggtagcgtgagcagcagcctgcccgcccgccgccgctcagcaccccctccggggccagcccggccggcttcatactccagcagggcctcgtgcagagcttctcgcagctgctccac

SEQ ID NO: 374947 - DNA, 1196 bp, Homo sapiens
gggccacccgcagaacagagcttccgggacccacgcctcgtttgcactgggtgctggacagccgacgcaactacaaatggggcggagctttcggcactggagcagctaatttgcatataggaatgaggtgcggctcggcttccatgggcctaatttacagatagggcggtatttctgccccttaaccgaaagtgggatacagaggacgacggtgttaggcgcctgtgtaggagtaaaatgtgtttattttgcattcaacgagagctcctgcattgcagctattttgcatatgatttgcatcttacgaagaatttgtggcaaaaaaaagctgggcgtgcgccgtaggaacctcctgctgagacgcttccggtagcggcgcgtgacccgacaggtctttcacctacctacctcagctcccacaaacacgagaagttccagcaagttcgccacttccggttctcctggctatccaatagcatcgagtggagcatccccggaagtgaggcagcggaggacgacctttttccggttccggcctggcgagagtttgtgcggcgacatgaaactgcttacccacaatctgctgagctcgcatgtgcggggggtggggtcccgtggcttccccctgcgcctccaggccaccgaggtccgtatctgccctgtggaattcaaccccaacttcgtggcgcgtatgatacctaaagtggagtggtcggcgttcctggaggcggccgataacttgcgtctgatccaggtgccgaaagggccggttgagggatatgaggagaatgaggagtttctgaggaccatgcaccacctgctgctggaggtgagaagcggcccatcacttgcttcccgggccacctgcctcccgcactgaggctgccagtgctcagctctgtccctccctgcccgcaggtggaagtgatagagggcaccctgcagtgcccggaatctggacgtatgttccccatcagccgcgggatccccaacatgctgctgagtgaagaggaaactgagagttgattgtgccaggcgccagtttttcttgttatgactgtgtatttttgttgatctataccctgtttccgaattctgccgtgtgtatccccaacccttgacccaatgacaccaaacacagtgtttttgagctcggtattatatatttttttctcattaaaggtttaaaaccaaaa

SEQ ID NO: 374948 - DNA, 1279 bp, Homo sapiens
gggccacccgcagaacagagcttccgggacccacgcctcgtttgcactgggtgctggacagccgacgcaactacaaatggggcggagctttcggcactggagcagctaatttgcatataggaatgaggtgcggctcggcttccatgggcctaatttacagatagggcggtatttctgccccttaaccgaaagtgggatacagaggacgacggtgttaggcgcctgtgtaggagtaaaatgtgtttattttgcattcaacgagagctcctgcattgcagctattttgcatatgatttgcatcttacgaagaatttgtggcaaaaaaaagctgggcgtgcgccgtaggaacctcctgctgagacgcttccggtagcggcgcgtgacccgacaggtctttcacctacctacctcagctcccacaaacacgagaagttccagcaagttcgccacttccggttctcctggctatccaatagcatcgagtggagcatccccggaagtgaggcagcggaggacgacctttttccggttccggcctggcgagagtttgtgcggcgacatgaaactgcttacccacaatctgctgagctcgcatgtgcggggggtggggtcccgtggcttccccctgcgcctccaggtacccgccggcggcagtcttcccttttcgggcgggatggtgggccggggtccagtgcttgcctaaactcctccgccctgcaggccaccgaggtccgtatctgccctgtggaattcaaccccaacttcgtggcgcgtatgatacctaaagtggagtggtcggcgttcctggaggcggccgataacttgcgtctgatccaggtgccgaaagggccggttgagggatatgaggagaatgaggagtttctgaggaccatgcaccacctgctgctggaggtgagaagcggcccatcacttgcttcccgggccacctgcctcccgcactgaggctgccagtgctcagctctgtccctccctgcccgcaggtggaagtgatagagggcaccctgcagtgcccggaatctggacgtatgttccccatcagccgcgggatccccaacatgctgctgagtgaagaggaaactgagagttgattgtgccaggcgccagtttttcttgttatgactgtgtatttttgttgatctataccctgtttccgaattctgccgtgtgtatccccaacccttgacccaatgacaccaaacacagtgtttttgagctcggtattatatatttttttctcattaaaggtttaaaaccaaaa

SEQ ID NO: 374949 - DNA, 2070 bp, Homo sapiens
gggccacccgcagaacagagcttccgggacccacgcctcgtttgcactgggtgctggacagccgacgcaactacaaatggggcggagctttcggcactggagcagctaatttgcatataggaatgaggtgcggctcggcttccatgggcctaatttacagatagggcggtatttctgccccttaaccgaaagtgggatacagaggacgacggtgttaggcgcctgtgtaggagtaaaatgtgtttattttgcattcaacgagagctcctgcattgcagctattttgcatatgatttgcatcttacgaagaatttgtggcaaaaaaaagctgggcgtgcgccgtaggaacctcctgctgagacgcttccggtagcggcgcgtgacccgacaggtctttcacctacctacctcagctcccacaaacacgagaagttccagcaagttcgccacttccggttctcctggctatccaatagcatcgagtggagcatccccggaagtgaggcagcggaggacgacctttttccggttccggcctggcgagagtttgtgcggcgacatgaaactgcttacccacaatctgctgagctcgcatgtgcggggggtggggtcccgtggcttccccctgcgcctccaggccaccgaggtccgtatctgccctgtggaattcaaccccaacttcgtggcgcgtatgatacctaaagtggagtggtcggcgttcctggaggcggccgataacttgcgtctgatccaggtgccgaaagggccggttgagggatatgaggagaatgaggagtttctgaggaccatgcaccacctgctgctggaggtgagaagcggcccatcacttgcttcccgggccacctgcctcccgcactgaggctgccagtgctcagctctgtccctccctgcccgcaggtggaagtgatagagggcaccctgcagtgcccggaatctggacgtatgttccccatcagccgcgggatccccaacatgctgctgagtgaagaggaaactgagagttgattgtgccaggcgccagtttttcttgttatgactgtgtatttttgttgatctataccctgtttccgaattctgccgtgtgtatccccaacccttgacccaatgacaccaaacacagtgtttttgagctcggtattatatatttttttctcattaaaggtttaaaaccaaaaaaaaaaaaaaaaaaaaaaaaaaaaaaaaaaaaaaaaaaaaaaaaaaaaaaaaaaaaaaaaaaaaaaaaaaaaaaaaaaaaaaaaaaaaaaagggggggggcgaagataaaagatgcgcacccgagggggacacaaaaacaccacaccccaccgggcgatgctacacagaggggtcacaaacaaagagaggcgaaagtaccacaacaacacgaagcacgcgcccacagaacaaaccacaacactaggcacgaggacacaaaccgagtccacccggggcgacacacgcgggggggggagaacacacaacaaaggaggagggaggggagcgaaatgaagggcgcggaacaacaacacgagcagccgagaaggaagagggggacgccgcagagggcggaaaaacaaacaacatagaccagccgggaggacaagggagaagggaaacagcagcgcgagcaggcatcacccacggcgcgcgccgaagaaagagaatgaaagagaacagagaagaagaagacaagagcgagcaggcgagacaaagagaccacctacacagagcggtgcgcggagctgtgctacacagcaacagaccgacacccagggacagcgagggagacagagagcgggaggaagcgcagccgacggcagagaggaccaggaaggaagtcagaggagccgaggtaagagaggagcgggacaaggggcggggagggagcggacccagagcgaaagcgggacgagccaagcaagagaggagtaggaggagcgagagcgaggtgaggagggcagaagagcgagcaagagaagcaaagaacagagagacggaggagaagacgaagagacaagggaacgacacaggaagagagcgacgcgagct

SEQ ID NO: 374950 - DNA, 972 bp, Homo sapiens
gggccacccgcagaacagagcttccgggacccacgcctcgtttgcactgggtgctggacagccgacgcaactacaaatggggcggagctttcggcactggagcagctaatttgcatataggaatgaggtgcggctcggcttccatgggcctaatttacagatagggcggtatttctgccccttaaccgaaagtgggatacagaggacgacggtgttaggcgcctgtgtaggagtaaaatgtgtttattttgcattcaacgagagctcctgcattgcagctattttgcatatgatttgcatcttacgaagaatttgtggcaaaaaaaagctgggcgtgcgccgtaggaacctcctgctgagacgcttccggtagcggcgcgtgacccgacaggtctttcacctacctacctcagctcccacaaacacgagaagttccagcaagttcgccacttccggttctcctggctatccaatagcatcgagtggagcatccccggaagtgaggcagcggaggacgacctttttccggttccggcctggcgagagtttgtgcggcgacatgaaactgcttacccacaatctgctgagctcgcatgtgcggggggtggggtcccgtggcttccccctgcgcctccaggccaccgaggtccgtatctgccctgtggaattcaaccccaacttcgtggcgcgtatgatacctaaagtggagtggtcggcgttcctggaggcggccgataacttgcgtctgatccaggtgccgaaagggccggttgagggatatgaagaggaaactgagagttgattgtgccaggcgccagtttttcttgttatgactgtgtatttttgttgatctataccctgtttccgaattctgccgtgtgtatccccaacccttgacccaatgacaccaaacacagtgtttttgagctcggtattatatatttttttctcattaaaggtttaaaaccaaaa

SEQ ID NO: 374951 - DNA, 1264 bp, Homo sapiens
gggccacccgcagaacagagcttccgggacccacgcctcgtttgcactgggtgctggacagccgacgcaactacaaatggggcggagctttcggcactggagcagctaatttgcatataggaatgaggtgcggctcggcttccatgggcctaatttacagatagggcggtatttctgccccttaaccgaaagtgggatacagaggacgacggtgttaggcgcctgtgtaggagtaaaatgtgtttattttgcattcaacgagagctcctgcattgcagctattttgcatatgatttgcatcttacgaagaatttgtggcaaaaaaaagctgggcgtgcgccgtaggaacctcctgctgagacgcttccggtagcggcgcgtgacccgacaggtctttcacctacctacctcagctcccacaaacacgagaagttccagcaagttcgccacttccggttctcctggctatccaatagcatcgagtggagcatccccggaagtgaggcagcggaggacgacctttttccggttccggcctggcgagagtttgtgcggcgacatgaaactgcttacccacaatctgctgagctcgcatgtgcggggggtggggtcccgtggcttccccctgcgcctccaggccaccgaggtccgtatctgccctgtggaattcaaccccaacttcgtggcgcgtatgatacctaaagtggagtggtcggcgttcctggaggcggccgataacttgcgtctgatccaggtgccgaaagggccggttgagggatatgaggagaacgaagaggacctgacgcactccctctaaatgaagcctagcatgctcaataccacggcgctccggcgcgagccgaagcccaccttaagagcaattccattcagtggatatgaagcacacttcggactacagtagcgtttcgaatcgatgggcaacacgcttactccacgcattatggcaaggctcaattcccacactccgctcagccaccgttcaccgcaagtcgcaacacccacaaccttcgacgctctcgacagcccatacatcgtcactattcatagcagacatctatccccagggcagcgtgccacttgacaacaacccctcggcactcagcacacacgcgcacttcccgacactccatcctcaaagctcgtcaaccgcgtgcagctatcactgaccttcaccccgctcgcctccagccacgtccgaggcgcgacgtctccatgcagctctcttaactcgccctctccgatc

SEQ ID NO: 374952 - DNA, 814 bp, Homo sapiens
actatagggcaaaagtgtgttttgttgttttgtgtttttttgagctcggtattatatatttttttctcattaaaggtttaaaaccaaaagcggtttctctttgcagcaaatatacattaaaatagagtctctgtacagccaagggctctgggccctggcttgccccatgtccctgcgcctccctggccaaacccaaaaataaatatagtgttattgctctgcagggcatagaggcagtgctctcctaccccctgaggaggctcgttgggagctgatggggaaagagggggtaggattaagcagcagcaaaagcatcacccactgggagactctggcctccatccccttccctccctgagataggtttctgcctcccacgcatcccgtgcagccccctatggcttccgcaaggccccctacactctgggggcacgttatggcttgcaaggggcagcactgtgcccagagcctggacacacgttcccagcttctgacaccccctaggagggggaggagagggcgtggggcctgttcccaggggctgatggcattgccctggccctgccagcaggctgtggcactgcccagaccccagctccgccccagcccttggggctgaccccatgctaggcaggtcctgccagaacccccaccccaggggtccaggggctggagtctgcttggagttattgcttcaaggggggacactaatgcccaatgcaaatgatgagaggaggagcgaagggggcatgggcctttgctctcaaagtcccactctgctttgaagagggggtaggattaagcagcagcaaaa

SEQ ID NO: 374953 - DNA, 690 bp, Homo sapiens
gaatacgcagtgggccggggatgaatcggacgagggagagtttgtgcggcgacatgaaactgcttacccacaatctgctgagctcgcatgtgcggggggtggggtcccgtggcttccccctgcgcctccaggccaccgaggtccgtatctgccctgtggaattcaaccccaacttcgtggcgcgtatgatacctaaagtggagtggtcggcgttcctggaggcggccgataacttgcgtctgatccaggtgccgaaagggccggttgagggatatgaggagaatgaggagtttctgaggaccatgcaccacctgctgctggaggtgagaagcggcccatcacttgcttcccgggccacctgcctcccgcactgaggctgccagtgctcagctctgtccctccctgcccgcaggtggaagtgatagagggcaccctgcagtgcccggaatctggacgtatgttccccatcagccgcgggatccccaacatgctgctgagtgaagaggaaactgagagttgattgtgccaggcgccagtttttcttgttatgactgtgtatttttgttgatctataccctgtttccgaattctgccgtgtgtatccccaacccttgacccaatgacaccaaacacagtgtttttgagctcggtattatatatttttttctcattaaaggtttaaaaccaaaa

SEQ ID NO: 374954 - DNA, 1107 bp, Homo sapiens
gggccacccgcagaacagagcttccgggacccacgcctcgtttgcactgggtgctggacagccgacgcaactacaaatggggcggagctttcggcactggagcagctaatttgcatataggaatgaggtgcggctcggcttccatgggcctaatttacagatagggcggtatttctgccccttaaccgaaagtgggatacagaggacgacggtgttaggcgcctgtgtaggagtaaaatgtgtttattttgcattcaacgagagctcctgcattgcagctattttgcatatgatttgcatcttacgaagaatttgtggcaaaaaaaagctgggcgtgcgccgtaggaacctcctgctgagacgcttccggtagcggcgcgtgacccgacaggtctttcacctacctacctcagctcccacaaacacgagaagttccagcaagttcgccacttccggttctcctggctatccaatagcatcgagtggagcatccccggaagtgaggcagcggaggacgacctttttccggttccggcctggcgagagtttgtgcggcgacatgaaactgcttacccacaatctgctgagctcgcatgtgcggggggtggggtcccgtggcttccccctgcgcctccaggccaccgaggtccgtatctgccctgtggaattcaaccccaacttcgtggcgcgtatgatacctaaagtggagtggtcggcgttcctggaggcggccgataacttgcgtctgatccaggtgccgaaagggccggttgagggatatgaggagaatgaggagtttctgaggaccatgcaccacctgctgctggaggtggaagtgatagagggcaccctgcagtgcccggaatctggacgtatgttccccatcagccgcgggatccccaacatgctgctgagtgaagaggaaactgagagttgattgtgccaggcgccagtttttcttgttatgactgtgtatttttgttgatctataccctgtttccgaattctgccgtgtgtatccccaacccttgacccaatgacaccaaacacagtgtttttgagctcggtattatatatttttttctcattaaaggtttaaaaccaaaa

SEQ ID NO: 374955 - DNA, 2062 bp, Homo sapiens
gggccacccgcagaacagagcttccgggacccacgcctcgtttgcactgggtgctggacagccgacgcaactacaaatggggcggagctttcggcactggagcagctaatttgcatataggaatgaggtgcggctcggcttccatgggcctaatttacagatagggcggtatttctgccccttaaccgaaagtgggatacagaggacgacggtgttaggcgcctgtgtaggagtaaaatgtgtttattttgcattcaacgagagctcctgcattgcagctattttgcatatgatttgcatcttacgaagaatttgtggcaaaaaaaagctgggcgtgcgccgtaggaacctcctgctgagacgcttccggtagcggcgcgtgacccgacaggtctttcacctacctacctcagctcccacaaacacgagaagttccagcaagttcgccacttccggttctcctggctatccaatagcatcgagtggagcatccccggaagtgaggcagcggaggacgacctttttccggttccggcctggcgagagtttgtgcggcgacatgaaactgcttacccacaatctgctgagctcgcatgtgcggggggtggggtcccgtggcttccccctgcgcctccaggccaccgaggtccgtatctgccctgtggaattcaaccccaacttcgtggcgcgtatgatacctaaagtggagtggtcggcgttcctggaggcggccgataacttgcgtctgatccaggtgccgaaagggccggttgagggatatgaggagaatgaggagtttctgaggaccatgcaccacctgctgctggaggtggaagtgatagagggcaccctgcagtgcccggaatctggacgtatgttccccatcagccgcgggatccccaacatgctgctgagtgaagaggaaactgagagttgattgtgccaggcgccagtttttcttgttatgactgtgtatttttgttgatctataccctgtttccgaattctgccgtgtgtatccccaacccttgacccaatgacaccaaacacagtgtttttgagctcggtattatatatttttttctcattaaaggtttaaaaccaaaagcggtttctctttgcagcaaatatacattaaaatagagtctctgtacagccaagggctctgggccctggcttgccccatgtccctgcgcctccctggccaaacccaaaaataaatatagtgttattgctctgcagggcatagaggcagtgctctcctaccccctgaggaggctcgttgggagctgatggggaagccctggccaccccaggggtccaggggctggagtctgcttggagttattgcttcaaggggggacactaatgcccaatgcaaatgatgagaggaggagcgaagggggcatgggcctttgctctccaagtcccactctgctttgaagagggggtaggattaagcagcagcaaaagcatcacccactgggagactctggcctccatccccttccctccctgagataggtttctgcctcccacgcatcccgtgcagccccctatggcttccgcaaggccccctacactctgggggcacgttatggcttgcaaggggcagcactgtgcccagagcctggacacacgttcccagcttctgacaccccctaggagggggaggagagggcgtggggcctgttcccaggggctgatggcattgccctggccctgccagcaggctgtggcactgcccagaccccagctccgccccagcccttggggctgaccccatgctaggcaggtcctgccagaacccccaccagtcccaccccttgcctcagtccatcatggcctcgagcatctccaagaacagcttgtgcatgggcaccttgccctccagcttcaccccatagaaatgggccagcactttgcccgctgtctggcggaggagcggtagcgtgagcagcagcctgcccgcccgccgccgctcagcaccccctccggggccagcccggccggcttcatactccagcagggcctcgtgcagagcttctcgcagctgctccac

SEQ ID NO: 374956 - DNA, 1975 bp, Homo sapiens
gggccacccgcagaacagagcttccgggacccacgcctcgtttgcactgggtgctggacagccgacgcaactacaaatggggcggagctttcggcactggagcagctaatttgcatataggaatgaggtgcggctcggcttccatgggcctaatttacagatagggcggtatttctgccccttaaccgaaagtgggatacagaggacgacggtgttaggcgcctgtgtaggagtaaaatgtgtttattttgcattcaacgagagctcctgcattgcagctattttgcatatgatttgcatcttacgaagaatttgtggcaaaaaaaagctgggcgtgcgccgtaggaacctcctgctgagacgcttccggtagcggcgcgtgacccgacaggtctttcacctacctacctcagctcccacaaacacgagaagttccagcaagttcgccacttccggttctcctggctatccaatagcatcgagtggagcatccccggaagtgaggcagcggaggacgacctttttccggttccggcctggcgagagtttgtgcggcgacatgaaactgcttacccacaatctgctgagctcgcatgtgcggggggtggggtcccgtggcttccccctgcgcctccaggccaccgaggtccgtatctgccctgtggaattcaaccccaacttcgtggcgcgtatgatacctaaagtggagtggtcggcgttcctggaggcggccgataacttgcgtctgatccaggtgccgaaagggccggttgagggatatgaggagaatgaggagtttctgaggaccatgcaccacctgctgctggaggtggaagtgatagagggcaccctgcagtgcccggaatctggacgtatgttccccatcagccgcgggatccccaacatgctgctgagtgaagaggaaactgagagttgattgtgccaggcgccagtttttcttgttatgactgtgtatttttgttgatctataccctgtttccgaattctgccgtgtgtatccccaacccttgacccaatgacaccaaacacagtgtttttgagctcggtattatatatttttttctcattaaaggtttaaaaccaaaagcggtttctctttgcagcaaatatacattaaaatagagtctctgtacagccaagggctctgggccctggcttgccccatgtccctgcgcctccctggccaaacccaaaaataaatatagtgttattgctctgcagggcatagaggcagtgctctcctaccccctgaggaggctcgttgggagctgatggggaagccctggccaccccaggggtccaggggctggagtctgcttggagttattgcttcaaggggggacactaatgcccaatgcaaatgatgagaggaggagcgaagggggcatgggcctttgctctccaagtcccactctgctttgaagagggggtaggattaagcagcagcaaaagcatcacccactgggagactctggcctccatccccttccctccctgagataggtttctgcctcccacgcatcccgtgcagccccctatggcttccgcaaggccccctacactctgggggcacgttatggcttgcaaggggcagcactgtgcccagagcctggacacacgttcccagcttctgacaccccctaggagggggaggagagggcgtggggcctgttcccaggggctgatggcattgccctggccctgccagcaggctgtggcactgcccagaccccagctccgccccagcccttggggctgaccccatgctaggcaggtcctgccagaacccccaccccaggggtccaggggctggagtctgcttggagttattgcttcaaggggggacactaatgcccaatgcaaatgatgagaggaggagcgaagggggcatgggcctttgctctcaaagtcccactctgctttgaagagggggtaggattaagcagcagcaaaa

SEQ ID NO: 374957 - DNA, 1190 bp, Homo sapiens
gggccacccgcagaacagagcttccgggacccacgcctcgtttgcactgggtgctggacagccgacgcaactacaaatggggcggagctttcggcactggagcagctaatttgcatataggaatgaggtgcggctcggcttccatgggcctaatttacagatagggcggtatttctgccccttaaccgaaagtgggatacagaggacgacggtgttaggcgcctgtgtaggagtaaaatgtgtttattttgcattcaacgagagctcctgcattgcagctattttgcatatgatttgcatcttacgaagaatttgtggcaaaaaaaagctgggcgtgcgccgtaggaacctcctgctgagacgcttccggtagcggcgcgtgacccgacaggtctttcacctacctacctcagctcccacaaacacgagaagttccagcaagttcgccacttccggttctcctggctatccaatagcatcgagtggagcatccccggaagtgaggcagcggaggacgacctttttccggttccggcctggcgagagtttgtgcggcgacatgaaactgcttacccacaatctgctgagctcgcatgtgcggggggtggggtcccgtggcttccccctgcgcctccaggtacccgccggcggcagtcttcccttttcgggcgggatggtgggccggggtccagtgcttgcctaaactcctccgccctgcaggccaccgaggtccgtatctgccctgtggaattcaaccccaacttcgtggcgcgtatgatacctaaagtggagtggtcggcgttcctggaggcggccgataacttgcgtctgatccaggtgccgaaagggccggttgagggatatgaggagaatgaggagtttctgaggaccatgcaccacctgctgctggaggtggaagtgatagagggcaccctgcagtgcccggaatctggacgtatgttccccatcagccgcgggatccccaacatgctgctgagtgaagaggaaactgagagttgattgtgccaggcgccagtttttcttgttatgactgtgtatttttgttgatctataccctgtttccgaattctgccgtgtgtatccccaacccttgacccaatgacaccaaacacagtgtttttgagctcggtattatatatttttttctcattaaaggtttaaaaccaaaa

SEQ ID NO: 374958 - DNA, 1981 bp, Homo sapiens
gggccacccgcagaacagagcttccgggacccacgcctcgtttgcactgggtgctggacagccgacgcaactacaaatggggcggagctttcggcactggagcagctaatttgcatataggaatgaggtgcggctcggcttccatgggcctaatttacagatagggcggtatttctgccccttaaccgaaagtgggatacagaggacgacggtgttaggcgcctgtgtaggagtaaaatgtgtttattttgcattcaacgagagctcctgcattgcagctattttgcatatgatttgcatcttacgaagaatttgtggcaaaaaaaagctgggcgtgcgccgtaggaacctcctgctgagacgcttccggtagcggcgcgtgacccgacaggtctttcacctacctacctcagctcccacaaacacgagaagttccagcaagttcgccacttccggttctcctggctatccaatagcatcgagtggagcatccccggaagtgaggcagcggaggacgacctttttccggttccggcctggcgagagtttgtgcggcgacatgaaactgcttacccacaatctgctgagctcgcatgtgcggggggtggggtcccgtggcttccccctgcgcctccaggccaccgaggtccgtatctgccctgtggaattcaaccccaacttcgtggcgcgtatgatacctaaagtggagtggtcggcgttcctggaggcggccgataacttgcgtctgatccaggtgccgaaagggccggttgagggatatgaggagaatgaggagtttctgaggaccatgcaccacctgctgctggaggtggaagtgatagagggcaccctgcagtgcccggaatctggacgtatgttccccatcagccgcgggatccccaacatgctgctgagtgaagaggaaactgagagttgattgtgccaggcgccagtttttcttgttatgactgtgtatttttgttgatctataccctgtttccgaattctgccgtgtgtatccccaacccttgacccaatgacaccaaacacagtgtttttgagctcggtattatatatttttttctcattaaaggtttaaaaccaaaaaaaaaaaaaaaaaaaaaaaaaaaaaaaaaaaaaaaaaaaaaaaaaaaaaaaaaaaaaaaaaaaaaaaaaaaaaaaaaaaaaaaaaaaaaaagggggggggcgaagataaaagatgcgcacccgagggggacacaaaaacaccacaccccaccgggcgatgctacacagaggggtcacaaacaaagagaggcgaaagtaccacaacaacacgaagcacgcgcccacagaacaaaccacaacactaggcacgaggacacaaaccgagtccacccggggcgacacacgcgggggggggagaacacacaacaaaggaggagggaggggagcgaaatgaagggcgcggaacaacaacacgagcagccgagaaggaagagggggacgccgcagagggcggaaaaacaaacaacatagaccagccgggaggacaagggagaagggaaacagcagcgcgagcaggcatcacccacggcgcgcgccgaagaaagagaatgaaagagaacagagaagaagaagacaagagcgagcaggcgagacaaagagaccacctacacagagcggtgcgcggagctgtgctacacagcaacagaccgacacccagggacagcgagggagacagagagcgggaggaagcgcagccgacggcagagaggaccaggaaggaagtcagaggagccgaggtaagagaggagcgggacaaggggcggggagggagcggacccagagcgaaagcgggacgagccaagcaagagaggagtaggaggagcgagagcgaggtgaggagggcagaagagcgagcaagagaagcaaagaacagagagacggaggagaagacgaagagacaagggaacgacacaggaagagagcgacgcgagct

SEQ ID NO: 374959 - DNA, 1251 bp, Homo sapiens
gggccacccgcagaacagagcttccgggacccacgcctcgtttgcactgggtgctggacagccgacgcaactacaaatggggcggagctttcggcactggagcagctaatttgcatataggaatgaggtgcggctcggcttccatgggcctaatttacagatagggcggtatttctgccccttaaccgaaagtgggatacagaggacgacggtgttaggcgcctgtgtaggagtaaaatgtgtttattttgcattcaacgagagctcctgcattgcagctattttgcatatgatttgcatcttacgaagaatttgtggcaaaaaaaagctgggcgtgcgccgtaggaacctcctgctgagacgcttccggtagcggcgcgtgacccgacaggtctttcacctacctacctcagctcccacaaacacgagaagttccagcaagttcgccacttccggttctcctggctatccaatagcatcgagtggagcatccccggaagtgaggcagcggaggacgacctttttccggttccggcctggcgagagtttgtgcggcgacatgaaactgcttacccacaatctgctgagctcgcatgtgcggggggtggggtcccgtggcttccccctgcgcctccaggccaccgaggtccgtatctgccctgtggaattcaaccccaacttcgtggcgcgtatgatacctaaagtggagtggtcggcgttcctggaggcggccgataacttgcgtctgatccaggtgccgaaagggccggttgagggatatgaggagaatgaggagtttctgaggaccatgcaccacctgctgctggaggtggaagtgatagagggcaccctgcagtgcccggaatctggacgtatgttccccatcagccgcgggatccccaacatgctgctgagtgaagaggaaactgagagttgattgtgccaggcgccagtttttcttgttatgactgtgtatttttgttgatctataccctgtttccgaattctgccgtgtgtatccccaacccttgacccaatgacaccaaacacagtgtttttgagctcggtattatatatttttttctcattaaaggtttaaaaccaaaaaaaaaaaaaaaaaaaaaaaaaaattccggggcttcttttggggggggggaaaaaggggtttggaatgggccttgggcatgtgttttctggccccggttttttggtccaagggggggattcggggggtccccaaaggggggcgga

SEQ ID NO: 374960 - DNA, 1810 bp, Homo sapiens
gggccacccgcagaacagagcttccgggacccacgcctcgtttgcactgggtgctggacagccgacgcaactacaaatggggcggagctttcggcactggagcagctaatttgcatataggaatgaggtgcggctcggcttccatgggcctaatttacagatagggcggtatttctgccccttaaccgaaagtgggatacagaggacgacggtgttaggcgcctgtgtaggagtaaaatgtgtttattttgcattcaacgagagctcctgcattgcagctattttgcatatgatttgcatcttacgaagaatttgtggcaaaaaaaagctgggcgtgcgccgtaggaacctcctgctgagacgcttccggtagcggcgcgtgacccgacaggtctttcacctacctacctcagctcccacaaacacgagaagttccagcaagttcgccacttccggttctcctggctatccaatagcatcgagtggagcatccccggaagtgaggcagcggaggacgacctttttccggttccggcctggcgagagtttgtgcggcgacatgaaactgcttacccacaatctgctgagctcgcatgtgcggggggtggggtcccgtggcttccccctgcgcctccaggccaccgaggtccgtatctgccctgtggaattcaaccccaacttcgtggcgcgtatgatacctaaagtggagtggtcggcgttcctggaggcggccgataacttgcgtctgatccaggtgccgaaagggccggttgagggatatgaggagaatgaggagtttctgaggaccatgcaccacctgctgctggaggtggaagtgatagagggcaccctgcagtgcccggaatctggacgtatgttccccatcagccgcgggatccccaacatgctgctgagtgaagaggaaactgagagttgattgtgccaggcgccagtttttcttgttatgactgtgtatttttgttgatctataccctgtttccgaattctgccgtgtgtatccccaacccttgacccaatgacaccaaacacagtgtttttgagctcggtattatatatttttttctcattaaaggtttaaaaccaaaagcggtttctctttgcagcaaatatacattaaaatagagtctctgtacagccaagggctctgggccctggcttgccccatgtccctgcgcctccctggccaaacccaaaaataaatatagtgttattgctctgcagggcatagaggcagtgctctcctaccccctgaggaggctcgttgggagctgatggggaagccctggccaccccaggggtccaggggctggagtctgcttggagttattgcttcaaggggggacactgtgcccagagcctggacacacgttcccagcttctgacaccccctaggagggggaggagagggcgtggggcctgttcccaggggctgatggcattgccctggccctgccagcaggctgtggcactgcccagaccccagctccgccccagcccttggggctgaccccatgctaggcaggtcctgccagaacccccaccagtcccaccccttgcctcagtccatcatggcctcgagcatctccaagaacagcttgtgcatgggcaccttgccctccagcttcaccccatagaaatgggccagcactttgcccgctgtctggcggaggagcggtagcgtgagcagcagcctgcccgcccgccgccgctcagcaccccctccggggccagcccggccggcttcatactccagcagggcctcgtgcagagcttctcgcagctgctccac

SEQ ID NO: 374961 - DNA, 1848 bp, Homo sapiens
gggccacccgcagaacagagcttccgggacccacgcctcgtttgcactgggtgctggacagccgacgcaactacaaatggggcggagctttcggcactggagcagctaatttgcatataggaatgaggtgcggctcggcttccatgggcctaatttacagatagggcggtatttctgccccttaaccgaaagtgggatacagaggacgacggtgttaggcgcctgtgtaggagtaaaatgtgtttattttgcattcaacgagagctcctgcattgcagctattttgcatatgatttgcatcttacgaagaatttgtggcaaaaaaaagctgggcgtgcgccgtaggaacctcctgctgagacgcttccggtagcggcgcgtgacccgacaggtctttcacctacctacctcagctcccacaaacacgagaagttccagcaagttcgccacttccggttctcctggctatccaatagcatcgagtggagcatccccggaagtgaggcagcggaggacgacctttttccggttccggcctggcgagagtttgtgcggcgacatgaaactgcttacccacaatctgctgagctcgcatgtgcggggggtggggtcccgtggcttccccctgcgcctccaggccaccgaggtccgtatctgccctgtggaattcaaccccaacttcgtggcgcgtatgatacctaaagtggagtggtcggcgttcctggaggcggccgataacttgcgtctgatccaggtgccgaaagggccggttgagggatatgaggagaatgaggagtttctgaggaccatgcaccacctgctgctggaggtggaagtgatagagggcaccctgcagtgcccggaatctggacgtatgttccccatcagccgcgggatccccaacatgctgctgagtgaagaggaaactgagagttgattgtgccaggcgccagtttttcttgttatgactgtgtatttttgttgatctataccctgtttccgaattctgccgtgtgtatccccaacccttgacccaatgacaccaaacacagtgtttttgagctcggtattatatatttttttctcattaaaggtttaaaaccaaaagcggtttctctttgcagcaaatatacattaaaatagagtctctgtacagccaagggctctgggccctggcttgccccatgtccctgcgcctccctggccaaacccaaaaataaatatagtgttattgctctgcagggcatagaggcagtgctctcctaccccctgaggaggctcgttgggagctgatggggaagccctggccaccccaggggtccaggggctggagtctgcttggagttattgcttcaaggggggactctggcctccatccccttccctccctgagataggtttctgcctcccacgcatcccgtgcagccccctatggcttccgcaaggccccctacactctgggggcacgttatggcttgcaaggggcagcactgtgcccagagcctggacacacgttcccagcttctgacaccccctaggagggggaggagagggcgtggggcctgttcccaggggctgatggcattgccctggccctgccagcaggctgtggcactgcccagaccccagctccgccccagcccttggggctgaccccatgctaggcaggtcctgccagaacccccaccccaggggtccaggggctggagtctgcttggagttattgcttcaaggggggacactaatgcccaatgcaaatgatgagaggaggagcgaagggggcatgggcctttgctctcaaagtcccactctgctttgaagagggggtaggattaagcagcagcaaaa

SEQ ID NO: 374962 - DNA, 1106 bp, Homo sapiens
gggccacccgcagaacagagcttccgggacccacgcctcgtttgcactgggtgctggacagccgacgcaactacaaatggggcggagctttcggcactggagcagctaatttgcatataggaatgaggtgcggctcggcttccatgggcctaatttacagatagggcggtatttctgccccttaaccgaaagtgggatacagaggacgacggtgttaggcgcctgtgtaggagtaaaatgtgtttattttgcattcaacgagagctcctgcattgcagctattttgcatatgatttgcatcttacgaagaatttgtggcaaaaaaaagctgggcgtgcgccgtaggaacctcctgctgagacgcttccggtagcggcgcgtgacccgacaggtctttcacctacctacctcagctcccacaaacacgagaagttccagcaagttcgccacttccggttctcctggctatccaatagcatcgagtggagcatccccggaagtgaggcagcggaggacgacctttttccggttccggcctggcgagagtttgtgcggcgacatgaaactgcttacccacaatctgctgagctcgcatgtgcggggggtggggtcccgtggcttccccctgcgcctccaggccaccgaggtccgtatctgccctgtggaattcaaccccaacttcgtggcgcgtatgatacctaaagtggagtggtcggcgttcctggaggcggccgataacttgcgtctgatccaggtgccgaaagggccggttgagggatatgaggagaatgaggagtttctgaggaccatgcaccacctgctgctggaggtggaagtgatagagggcaccctgcagtgcccggaatctggacgtatgttccccatcagccgcgggatccccaacatgctgctgagtgaagaggaaactgagagttgattgtgccaggcgccagtttttcttgttatgactgtgtatttttgttgatctataccctgtttccgaattctgccgtgtgtatccccaacccttgacccaatgacaccaaacacagtgccttcccatctggaggtcccaccaggctattaaaggggaatgttactgcaaa

SEQ ID NO: 374963 - DNA, 1223 bp, Homo sapiens
gggccacccgcagaacagagcttccgggacccacgcctcgtttgcactgggtgctggacagccgacgcaactacaaatggggcggagctttcggcactggagcagctaatttgcatataggaatgaggtgcggctcggcttccatgggcctaatttacagatagggcggtatttctgccccttaaccgaaagtgggatacagaggacgacggtgttaggcgcctgtgtaggagtaaaatgtgtttattttgcattcaacgagagctcctgcattgcagctattttgcatatgatttgcatcttacgaagaatttgtggcaaaaaaaagctgggcgtgcgccgtaggaacctcctgctgagacgcttccggtagcggcgcgtgacccgacaggtctttcacctacctacctcagctcccacaaacacgagaagttccagcaagttcgccacttccggttctcctggctatccaatagcatcgagtggagcatccccggaagtgaggcagcggaggacgacctttttccggttccggcctggcgagagtttgtgcggcgacatgaaactgcttacccacaatctgctgagctcgcatgtgcggggggtggggtcccgtggcttccccctgcgcctccaggccaccgaggtccgtatctgccctgtggaattcaaccccaacttcgtggcgcgtatgatacctaaagtggagtggtcggcgttcctggaggcggccgataacgtgaggatccttaccccgccccagcatatcccggggaatgcggggcgggcacacctcagccgggctgaggcgggagttcgggatgcccggagataattttggcctcttgcccacagttgcgtctgatccaggtgccgaaagggccggttgagggatatgaggagaatgaggagtttctgaggaccatgcaccacctgctgctggaggtggaagtgatagagggcaccctgcagtgcccggaatctggacgtatgttccccatcagccgcgggatccccaacatgctgctgagtgaagaggaaactgagagttgattgtgccaggcgccagtttttcttgttatgactgtgtatttttgttgatctataccctgtttccgaattctgccgtgtgtatccccaacccttgacccaatgacaccaaacacagtgtttttgagctcggtattatatatttttttctcattaaaggtttaaaaccaaaa

SEQ ID NO: 374964 - DNA, 1236 bp, Homo sapiens
gggccacccgcagaacagagcttccgggacccacgcctcgtttgcactgggtgctggacagccgacgcaactacaaatggggcggagctttcggcactggagcagctaatttgcatataggaatgaggtgcggctcggcttccatgggcctaatttacagatagggcggtatttctgccccttaaccgaaagtgggatacagaggacgacggtgttaggcgcctgtgtaggagtaaaatgtgtttattttgcattcaacgagagctcctgcattgcagctattttgcatatgatttgcatcttacgaagaatttgtggcaaaaaaaagctgggcgtgcgccgtaggaacctcctgctgagacgcttccggtagcggcgcgtgacccgacaggtctttcacctacctacctcagctcccacaaacacgagaagttccagcaagttcgccacttccggttctcctggctatccaatagcatcgagtggagcatccccggaagtgaggcagcggaggacgacctttttccggttccggcctggcgagagtttgtgcggcgacatgaaactgcttacccacaatctgctgagctcgcatgtgcggggggtggggtcccgtggcttccccctgcgcctccaggccaccgaggtccgtatctgccctgtggaattcaaccccaacttcgtggcgcgtatgatacctaaagtggagtggtcggcgttcctggaggcggccgataacttgcgtctgatccaggtgccgaaagggccggttgagggatatgaggagaatgaggagtttctgaggaccatgcaccacctgctgctggaggtggaagtgatagagggcaccctgcagtgcccggaatctggacgtatgttccccatcagccgcgggatccccaacatgctgctgagtgaagaggtcactgagagattgttgcgccagcgccaggttttctaggtatgatcgcgcttttagaagatctatccccggataccgaatgctggcgcgtaaccaactgttgacccaatgtcctcttccacagagctgcagagctcggtatgacctgtactgttcgtcattacgggcaggtgcctcacctttaggatcacaggaacgctgaacccgtcagatattgcgacacctttccacatattctcttatggctataacttgtttaaccaatacgccccaagatggagtaacctctgtaataatgagcccttattccgagc

SEQ ID NO: 374965 - DNA, 385 bp, Homo sapiens
aaataataatgacttttttgggttctactgacccggcctggattcagactgctgacccagaaaagaaaggcttcacacatcccattagcagtcctttcagccattgaagacatccccatccaattctgactttctttcctttacagcagtcttgctcttttttacgggcatgtaaaccaaattgacgtttacttactgcttttgtttggttccttgatgtaacttctctaatttaacagcagctttccaggcatagcgtttgaatgaatcaggccaaataacattaaagttcactttctcaaagcttaaactctgttaccgagaaaagatgggggtagagttttaaagtattcttcttagtataaaactaaacgtttttctctag

SEQ ID NO: 374966 - DNA, 425 bp, Homo sapiens
tttttttttttactctacctaacaatcacgtctgaaaccctattgtcactcgttgggtcctcctagatatcatggcctggtagacaccaagagaacgcttttaaatatttcagaatcagcacagtagatctctgttctacaattttaaatagcccctgcacttttttacaacacatataataaactgacaagttggtaactagagtccattaataaaataggaatggtcacgttgaaaagtttggaagccaggcaaagcagagaatggctgaaaataaatgcttagcatgaaaagagataaagggaggggtgagggaagagtaagcaacaggcaatgaaagagacatgagagagaaagagaaagagagggaggaattggaggtgaggagttgggaaacgttatctatctttaaatattagatggg

SEQ ID NO: 374967 - DNA, 501 bp, Homo sapiens
ggtacaatatgtgtatatagttctatatcattatatcacataggtagattcctgtaaccaccaccaccagtcaagatacaaaactcttccaccaccaccattaagaacacccttaatagtcactgccccacaaccatccctatcccatcccttacacccactaactaatgttagtattttacttggtttataccttgctccaggctggacctgatttttggagactaaatacttaaattaatttgcctgtcattggtatcccagttatccagacagtcgtattataatatcatggagttagactttacaaaaataactgattcatgctccttttctataaaaaacagcaagtgatcttacctacctacgcagaaaaaaatataaagttttaacagtgcctgccttacaataaagcgtagtggtaagcgatgtccaaaaaaagacgataacattttgatatcaaaagtctaataaaatacaggttattttaacaccatcccc

SEQ ID NO: 374968 - DNA, 474 bp, Homo sapiens
gctcctctctgcagatggtagtcccaacatctctgaaggtctctgaagctctcggcagagcaggtagcttgtctctgctactgaccatcttttgcttagctgtggctgatcctggggcttttatgagcctcagaggagaggaagtgtgtgactattcattcatgagtgactaagaatgggcccggaaaaggcaccacatattcccactccagtctataggactggcagcctggcccccaggcttcatgccctccttgagcctgatgcccaggctcagccccaactttgctccaagattggagcaggtgccaagagcagggagaagccaggcaatatgagcaggaacttctgagcctgaaagggcaggaagtccttcccaggcccctaagagtgtagggatgtctcagtctgcagctgcaatttgggtggctacagctgtgcctgggagggcatggcttctgcccactcccagcc

SEQ ID NO: 374969 - DNA, 1305 bp, Homo sapiens
atgagggaaatcgtgctcacgcagaccgggcagtgcgggaaccagatcggggccaagttctgggaggtgatctctgatgaacatgccatcgactccgctggcacctaccacggggacagccacctgcagctggagcgcatcaacgtgcaccaccacgaggccagcggtggcaggtacgtgccccgcgctgtgctcgtggatctggagccgggcaccatggactctgtgcgctcggggcccttcgcggaggtcttcaggccagacaacttcatttcccgtcagtgtggggccggaaacaactgggccaagggacgctacaccgaaggcgcggagctgatggagtcagtgatggacgttgtcagaaaggaggctgagagctgtgactgcctgcagggtttccagctgacccactccctgggtggggggactgggtctgggatgggtacccttctgctcagtaagatccgggaggagtacccagacaggatcataaacacattcagcatcctgccctcgcccaaggtgtcggacaccgtggtggagccctacaacgccaccctctcagtccaccagctcatagaaaacgcagatgagaccttttgcatagataacgaagcgctatatgacatatgttccaggaccctaaaactgcccacacccacctatggtgacctgaaccacctggtgtctgctaccgtgagtggggtcaccacgtgcctgcgcttcccaggccagctgaatgctgacctgcggaagctggccgtgaacatggtcccgtttccccggctgcatttcttcatgcccggctttgccccactgaccagccagggcagccagcagtaccgggccttgactgtggctgagctcacccagcagatgtttgatgctaagaacatgatggctgcccgtgacccccgtcacggctgctacctaacggcggctgccattttcaggggtcgcatgcccatgagggaggtggatgaacagatgttcaacattcaagataagaacagcagctactttgctgactggctccccaacaacataaaaacagccgtctgtgacatcccaccctgggggctaaaaatgtcagtcaccttcactgggaacaacacagccgtccaggaactcaagcgggtctcagagcagtttacagcaacgttcaggcgcaaggccttcctccactggtacacgggcgagggcatggatgagatggaattcactgaggccgagagcaacatgaacgacttggtgtctgaatatcagcaatatcaggatgccacggccgagggagaaggagtatga

SEQ ID NO: 374970 - DNA, 689 bp, Homo sapiens
gggaaatgtaggggagcagccggactgagctgcccaagggggtcggcgccccaggcttcttggtggcatgctggggagcggggagggggcgattcttacccgaaggctgccgagctacaggcggcggtcggtccgggcgtctgctgtaatccactaggcgctgcccggctgcgctcactctcggacgcagagacccgctcatgttggtgaagaagccgcgccagaaccgcgcggctgcagtcacctcgagcaggccggctgctcctggcaggcggtgtcggcgccggcgggggactcggcgcccagggccccttccaggccctccctcgccgggctccccaccagctccggaggtggcggcgatgcggaccgagtgagcggcggtggggccaggccgggcgccgggcgggagccgaggccgcggcggactccgcaatcccgcagccggtgactggagcccacctctgcagagacaaaggaactgctctggtgaactccccctgaaagtaaatgtccttggctggcctccagcattcccctcatgggcatagccatgcagccttcagaaccttcctgaaagagatgcccaaggattcagcaaacacgggggaagcagaggacacaagaagcttggatgtgaaatagcacttccttctgtgttacagaataaaacaatattttaaattaca

SEQ ID NO: 374971 - DNA, 667 bp, Homo sapiens
gggaaatgtaggggagcagccggactgagctgcccaagggggtcggcgccccaggcttcttggtggcatgctggggagcggggagggggcgattcttacccgaaggctgccgagctacaggcggcggtcggtccgggcgtctgctgtaatccactaggcgctgcccggctgcgctcactctcggacgcagagacccgctcatgttggtgaagaagccgcgccagaaccgcgcggctgcagtcacctcgagcaggccggctgctcctggcaggcggtgtcggcgccggcgggggactcggcgcccagggccccttccaggccctccctcgccgggctccccaccagctccggaggtggcggcgatgcggaccgagtgagcggcggtggggccaggccgggcgccgggcgggagccgaggccgcggcggactccgcaatcccgcagccggtgactggagcccacctctgcagagacaaaggaactgctctggtgaactccccctgaaagtaaatgtccttggctggcctccagcattcccctcatgggcatagccatgcagccttcagaaccttcctgaaagagccctcggtcccgcagtcgggccccgtcgctgactctccagcttccgagccgcgggcggcgagtccagggcacacggagcggccgc

SEQ ID NO: 374972 - DNA, 927 bp, Homo sapiens
gggaaatgtaggggagcagccggactgagctgcccaagggggtcggcgccccaggcttcttggtggcatgctggggagcggggagggggcgattcttacccgaaggctgccgagctacaggcggcggtcggtccgggcgtctgctgtaatccactaggcgctgcccggctgcgctcactctcggacgcagagacccgctcatgttggtgaagaagccgcgccagaaccgcgcggctgcagtcacctcgagcaggccggctgctcctggcaggcggtgtcggcgccggcgggggactcggcgcccagggccccttccaggccctccctcgccgggctccccaccagctccggaggtggcggcgatgcggaccgagtgagcggcggtggggccaggccgggcgccgggcgggagccgaggccgcggcggactccgcaatcccgcagccggtgactggagcccacctctgcagagacaaaggaactgctctggtgaactccccctgaaagtaaatgtccttggctggcctccagcattcccctcatgggcatagccatgcagccttcagaaccttcctgaaagagatgcccaaggattcagcaaacacgggggaagcagaggacacaagaagcttggatgtgaaatagcacttccttctgtgttacagaataaaacaatattttaaattacacaagcagatggggcaagtttttgggccctcagaagcccagaagacttcacactagtatactggtatatacatgtggaattgagcaaataacttgtttaattccaaaattttctgagaaataatctcaatagtcaatttgcctcattatcctctccccatcttacccaaataaaagcagagctttatgaccctccctttcaacttggggaatgagggccgcaaagacactttgcactga

SEQ ID NO: 374973 - DNA, 296 bp, Homo sapiens
gccatttgttatcccttgaaaaagttctgatgaccttggatgtttttgattaaaggacttttgctgccatctgtcagcaaaagtcatattctttctagaaaaaagccaatgggccctaactttgctggagggaaccgcagcagcagccagggcccattaaaatgttctctctcctcccatgtccatccctagatgcccaaggattcagcaaacacgggggaagcagaggacacaagaagcttggatgtgaaatagcacttccttctgtgttacagaataaaacaatattttaaatt

SEQ ID NO: 374974 - DNA, 3907 bp, Homo sapiens
agcgcggaggaggcggcggtggagcagggggcggtttggttgcgcggtactagcggtgcccgccgaagggggaggaggcgaggagcgagccgtgcggccagagcgggaaagagactcgtctttgcgtccgagttctggagccgccgcaccccgactcctggggccgcggcagcggctgcgaggggacgggcgtccgctgtctcctgggttcccctcgtagcgacccgcgggatcggaaaaaaaggagaagatggaggaggagggtggcagcagcggcggcgccgcggggaccagcgcggacggcggcgacggaggagagcagctcctcactgtcaagcacgagctgcggactgctaatttgacaggacatgctgagaaggtgggaatagaaaattttgagctcctgaaggtcctaggaactggagcttatggaaaagtatttctagttcgtaaaataagtggccatgatactggaaagctgtatgccatgaaagttttgaaaaaggcaacaatcgttcaaaaggccaaaaccacagagcatacaaggacagaacgacaagtcctggaacacattaggcagtcgccatttttggtaacattacattatgctttccagacagaaaccaaacttcatctcattttagattatataaatggtggtgaactttttactcatctttctcaaagagagcgtttcacagagcatgaggtgcagatttatgttggagagattgtgcttgccctcgaacatctccacaagttggggattatatatcgtgatattaagcttgagaatattctacttgattctaatggccatgtggtgctgacagattttggtctgagtaaggagtttgtggctgatgaaactgaaagagcatattccttttgtggaactattgaatacatggcaccagatattgtcagagggggagattcaggacatgacaaggcagttgactggtggagtttgggtgttctaatgtatgaattactaactggagcatctcctttcactgttgatggagaaaaaaattcccaagctgagatatctaggagaatattaaaaagtgagcctccatatccccaagaaatgagtgctttagcgaaagacctaattcagcgtcttttgatgaaagatcccaagaagagattgggatgtggtccacgtgatgcagatgaaatcaaagaacatctcttctttcagaaaataaattgggatgatttagccgccaaaaaagtgcctgcaccatttaagccagtcattcgagatgaattagatgtgagtaactttgcagaagagttcacagaaatggatcccacttattctcccgcagccctgccccagagttctgagaagctgtttcagggctattcctttgttgctccttccatcctattcaagcgtaatgcagctgtcatagaccctcttcagtttcacatgggagttgaacgtcctggagtgacaaatgttgccaggagtgcaatgatgaaggactctccattctatcaacactatgacctagatttgaaggacaaacccctgggagaaggtagtttttcaatttgtcgaaagtgtgtgcataaaaaaagtaaccaagcttttgcagtcaaaataatcagcaaaaggatggaagccaatactcaaaaggaaataacagctctgaaactctgtgaaggacaccccaatattgtgaagttgcatgaagtttttcatgatcagcttcacacgtttctagtgatggaacttctgaatggaggagaactgtttgagcgcattaagaaaaagaagcacttcagtgagacggaagccagctacatcatgaggaagcttgtttcagctgtaagccacatgcatgatgttggagtggtgcacagggatctgaaacctgagaatttattgttcaccgatgaaaatgacaatttggaaattaaaataattgattttggatttgcacggctaaagccaccggataatcagcccctgaagactccatgcttcacccttcattatgccgccccagagctcttgaatcagaacggctacgatgagtcctgtgacctgtggagcttgggcgtcattttgtacacaatgttgtcaggacaggttcccttccaatctcatgaccgaagtttgacgtgtaccagcgcggtggaaatcatgaagaaaattaaaaagggagatttctcctttgaaggagaagcctggaagaatgtatcccaagaggctaaagatttgatccaaggacttctcacagtagatccaaacaaaaggcttaaaatgtctggcttgaggtacaatgaatggctacaagatggaagtcagctgtcctccaatcctctgatgactccggatattctaggatcttccggagctgccgtgcatacctgtgtgaaagcaaccttccacgcctttaacaaatacaagagagaggggttttgccttcagaatgttgataaggcccctttggctaagagaagaaaaatgaaaaagactagcaccagtaccgagacgcgcagcaggttccagtgagagttcccattcttcttcctctcattctcacggtaaaactacacccaccaagacactgcagcccagcaatcctgccgacagcaataacccggagaccctcttccagttctcggactcagtagcttaggcatggtaggagtgtatcagtgatccattgcacctttattccctcagcatatgcctgaggcgatcttttatgcttttaaaaatgtttcccgttggtctcattggaatctgcctcctaatgatttttttcaggaaaacctgtttggttatcctcattcaaaagcactggacagagaatgttactgtgaatagagcacatattactctttttagcaacctagcatgatgccaacaagactattcttgaaagagcaaaggttcctgtaaatttaattagggctagatttgagctgcttgtaagtcacaggttttccagatgtctgccaacaagaaatgactcatactgtgatgataccttttgctttgccttgtggacaatgtgggtttttgaaatttgcacccttcaaacaatgatttatcagagaaaggggtctgttttcaaaaaagattctgtaatgaattttatgtgtggcatatacttatttcttgagagaagattttaacttattgtttttattttatggttacatatgatgataacctgctattattaaactttttctaaaaagtgaaaaaaaaaaaaaaagatataagaactcaaggtcccatactctgtattcgggatccatctgagatgcatgctaagctatgtgtatgtttttaattttgcactgctctttcctggcaatttgttttaatggttattgcagaatattaaggtacatgtctctctgttttaagtaatattgcactttataaaaaagtatgaataaagcaaactattttataaagtgcactgtttaaagcatttgcactgtatttttgccatttattttcattttctactttaaatttgtcctcacattcctcttctactttgtatgcaacaagtagaatggggcatgttgtgtcatgtagtcagccacttatgcaccaatgtgaggaaaacctaaagggaaattaaactaaacactgtgcttcatatttgtacactgtgttgtactacagtgaggaatttcctcctgtagtcatatattatgtacataatattttagaatcatacctatgacttgtttggaaatttttctgttaaattttaaatccagaaagcatattttataaacttatgcagagcacttttattgctcaaaagttctgaattcatacagaaaacaagtactatgtgatgaaaacatttcattaaaagattgctgcatttaaaaatacaattaattcgttccctatgca

SEQ ID NO: 374975 - DNA, 4391 bp, Homo sapiens
agcgcggaggaggcggcggtggagcagggggcggtttggttgcgcggtactagcggtgcccgccgaagggggaggaggcgaggagcgagccgtgcggccagagcgggaaagagactcgtctttgcgtccgagttctggagccgccgcaccccgactcctggggccgcggcagcggctgcgaggggacgggcgtccgctgtctcctgggttcccctcgtagcgacccgcgggatcggaaaaaaaggagaagatggaggaggagggtggcagcagcggcggcgccgcggggaccagcgcggacggcggcgacggaggagagcagctcctcactgtcaagcacgagctgcggactgctaatttgacaggacatgctgagaaggtgggaatagaaaattttgagctcctgaaggtcctaggaactggagcttatggaaaagtatttctagttcgtaaaataagtggccatgatactggaaagctgtatgccatgaaagttttgaaaaaggcaacaatcgttcaaaaggccaaaaccacagagcatacaaggacagaacgacaagtcctggaacacattaggcagtcgccatttttggtaacattacattatgctttccagacagaaaccaaacttcatctcattttagattatataaatggtggtgaactttttactcatctttctcaaagagagcgtttcacagagcatgaggtgcagatttatgttggagagattgtgcttgccctcgaacatctccacaagttggggattatatatcgtgatattaagcttgagaatattctacttgattctaatggccatgtggtgctgacagattttggtctgagtaaggagtttgtggctgatgaaactgaaagagcatattccttttgtggaactattgaatacatggcaccagatattgtcagagggggagattcaggacatgacaaggcagttgactggtggagtttgggtgttctaatgtatgaattactaactggagcatctcctttcactgttgatggagaaaaaaattcccaagctgagatatctaggagaatattaaaaagtgagcctccatatccccaagaaatgagtgctttagcgaaagacctaattcagcgtcttttgatgaaagatcccaagaagagattgggatgtggtccacgtgatgcagatgaaatcaaagaacatctcttctttcagaaaataaattgggatgatttagccgccaaaaaagtgcctgcaccatttaagccagtcattcgagatgaattagatgtgagtaactttgcagaagagttcacagaaatggatcccacttattctcccgcagccctgccccagagttctgagaagctgtttcagggctattcctttgttgctccttccatcctattcaagcgtaatgcagctgtcatagaccctcttcagtttcacatgggagttgaacgtcctggagtgacaaatgttgccaggagtgcaatgatgaaggactctccattctatcaacactatgacctagatttgaaggacaaacccctgggagaaggtagtttttcaatttgtcgaaagtgtgtgcataaaaaaagtaaccaagcttttgcagtcaaaataatcagcaaaaggatggaagccaatactcaaaaggaaataacagctctgaaactctgtgaaggacaccccaatattgtgaagttgcatgaagtttttcatgatcagcttcacacgtttctagtgatggaacttctgaatggaggagaactgtttgagcgcattaagaaaaagaagcacttcagtgagacggaagccagctacatcatgaggaagcttgtttcagctgtaagccacatgcatgatgttggagtggtgcacagggatctgaaacctgagaatttattgttcaccgatgaaaatgacaatttggaaattaaaataattgattttggatttgcacggctaaagccaccggataatcagcccctgaagactccatgcttcacccttcattatgccgccccagagctcttgaatcagaacggctacgatgagtcctgtgacctgtggagcttgggcgtcattttgtacacaatgttgtcaggacaggttcccttccaatctcatgaccgaagtttgacgtgtaccagcgcggtggaaatcatgaagaaaattaaaaagggagatttctcctttgaaggagaagcctggaagaatgtatcccaagaggctaaagatttgatccaaggacttctcacagtagatccaaacaaaaggcttaaaatgtctggcttgaggtacaatgaatggctacaagatggaagtcagctgtcctccaatcctctgatgactccggatattctaggatcttccggagctgccgtgcatacctgtgtgaaagcaaccttccacgcctttaacaaatacaagagagaggggttttgccttcagaatgttgataaggcccctttggctaagagaagaaaaatgaaaaagactagcaccagtaccgagacgcgcagcaggttccagtgagagttcccattcttcttcctctcattctcacggtaaaactacacccaccaagacactgcagcccagcaatcctgccgacagcaataacccggagaccctcttccagttctcggactcagtagcttaggcatggtaggagtgtatcagtgatccattgcacctttattccctcagcatatgcctgaggcgatcttttatgcttttaaaaatgtttcccgttggtctcattggaatctgcctcctaatgatttttttcaggaaaacctgtttggttatcctcattcaaaagcactggacagagaatgttactgtgaatagagcacatattactctttttagcaacctagcatgatgccaacaagactattcttgaaagagcaaaggttcctgtaaatttaattagggctagatttgagctgcttgtaagtcacaggttttccagatgtctgccaacaagaaatgactcatactgtgatgataccttttgctttgccttgtggacaatgtgggtttttgaaatttgcacccttcaaacaatgatttatcagagaaaggggtctgttttcaaaaaagattctgtaatgaattttatgtgtggcatatacttatttcttgagagaagattttaacttattgtttttattttatggttacatatgatgataacctgctattattaaactttttctaaaaagtgaaaaaaaaaaaaaaagatataagaactcaaggtcccatactctgtattcgggatccatctgagatgcatgctaagctatgtgtatgtttttaattttgcactgctctttcctggcaatttgttttaatggttattgcagaatattaaggtacatgtctctctgttttaagtaatattgcactttataaaaaagtatgaataaagcaaactattttataaagtgcactgtttaaagcatttgcactgtatttttgccatttattttcattttctactttaaatttgtcctcacattcctcttctactttgtatgcaacaagtagaatggggcatgttgtgtcatgtagtcagccacttatgcaccaatgtgaggaaaacctaaagggaaattaaactaaacactgtgcttcatatttgtacactgtgttgtactacagtgaggaatttcctcctgtagtcatatattatgtacataatattttagaatcatacctatgacttgtttggaaatttttctgttaaattttaaatccagaaagcatattttataaacttatgcagagcacttttattgctcaaaagttctgaattcatacagaaaacaagtactatgtgatgaaaacatttcattaaaagattgctgcatttaaaaatacaattaattcgttccctatgcaaaaaaaaaaaaaaaaaaaaaagaagtgatagggtttgtgtgttatattttcttttaaagccatcatgtgaaatgtcaggactgagaaaagtgatttttttgctttgtttacaggaatcatgcttaaagagataatgcccaacatgtttattttatagtttttgttaatgataaccttttgagcattagtttggaatttggacatgatatttatttattcctttcttgaggttatagcagcattaatttcaaccagttatgaatactaaaaatattgcactctatgtaatagtagtatatttattactaaatcaatgtatatattaatagcacaggcaaaaaatggcaaatattaaaatattttcaaaatattatattatcctgttcacattttgtccacagtggttattgggaataatattttacactttttgctggcccaaatggctacataatattgagttaatgaaagttttctactccca

SEQ ID NO: 374976 - DNA, 2339 bp, Homo sapiens
agcgcggaggaggcggcggtggagcagggggcggtttggttgcgcggtactagcggtgcccgccgaagggggaggaggcgaggagcgagccgtgcggccagagcgggaaagagactcgtctttgcgtccgagttctggagccgccgcaccccgactcctggggccgcggcagcggctgcgaggggacgggcgtccgctgtctcctgggttcccctcgtagcgacccgcgggatcggaaaaaaaggagaagatggaggaggagggtggcagcagcggcggcgccgcggggaccagcgcggacggcggcgacggaggagagcagctcctcactgtcaagcacgagctgcggactgctaatttgacaggacatgctgagaaggtgggaatagaaaattttgagctcctgaaggtcctaggaactggagcttatggaaaagtatttctagttcgtaaaataagtggccatgatactggaaagctgtatgccatgaaagttttgaaaaaggcaacaatcgttcaaaaggccaaaaccacagagcatacaaggacagaacgacaagtcctggaacacattaggcagtcgccatttttggtaacattacattatgctttccagacagaaaccaaacttcatctcattttagattatataaatggtggtgaactttttactcatctttctcaaagagagcgtttcacagagcatgaggtgcagatttatgttggagagattgtgcttgccctcgaacatctccacaagttggggattatatatcgtgatattaagcttgagaatattctacttgattctaatggccatgtggtgctgacagattttggtctgagtaaggagtttgtggctgatgaaactgaaagagcatattccttttgtggaactattgaatacatggcaccagatattgtcagagggggagattcaggacatgacaaggcagttgactggtggagtttgggtgttctaatgtatgaattactaactggagcatctcctttcactgttgatggagaaaaaaattcccaagctgagatatctaggagaatattaaaaagtgagcctccatatccccaagaaatgagtgctttagcgaaagacctaattcagcgtcttttgatgaaagatcccaagaagagattgggatgtggtccacgtgatgcagatgaaatcaaagaacatctcttctttcagaaaataaattgggatgatttagccgccaaaaaagtgcctgcaccatttaagccagtcattcgagatgaattagatgtgagtaactttgcagaagagttcacagaaatggatcccacttattctcccgcagccctgccccagagttctgagaagctgtttcagggctattcctttgttgctccttccatcctattcaagcgtaatgcagctgtcatagaccctcttcagtttcacatgggagttgaacgtcctggagtgacaaatgttgccaggagtgcaatgatgaaggactctccattctatcaacactatgacctagatttgaaggacaaacccctgggagaaggtagtttttcaatttgtcgaaagtgtgtgcataaaaaaagtaaccaagcttttgcagtcaaaataatcagcaaaaggatggaagccaatactcaaaaggaaataacagctctgaaactctgtgaaggacaccccaatattgtgaagttgcatgaagtttttcatgatcagcttcacacgtttctagtgatggaacttctgaatggaggagaactgtttgagcgcattaagaaaaagaagcacttcagtgagacggaagccagctacatcatgaggaagcttgtttcagctgtaagccacatgcatgatgttggagtggtgcacagggatctgaaacctgaggtataaaatcactggatctcttaacgtaattcagtctagcaccattattaaagatctcccaaacatgggggaagtttctggggaggtttccttatttttttacttttcaaggctgttaaatagataattgaaaatacgtttctttgatgttttttcttttatatttcagtctaaaataaatttgtctttgtttattttttgccagctgatcatcttgaggttatatttgtaagtgtgagaaccttttatggaaaaaatactttatgcaacagttgtggactaaaaatagcaatggaaatttttatagcagaaaataatatctcttacatataattttagagggttttttttccaaatgatgtattttgaaaacttattttttacatttgtaatcaaattggttagctcatgaataaaaatgtatataattctattctaaatactt

SEQ ID NO: 374977 - DNA, 314 bp, Homo sapiens
ccaagaggctaaagatttgatccaaggtaagaatctaatgaaattttacattttatatgatgtgtagtgattgaagtagaatcatggccattacacatacattcatatgttaattactcgaggaatccatgtgtattctaaaaggcttccaggctactctcttcagccttgttttcttatcagaacattctctttagtaatggtatccacatttctaacatgagctagcacttgacttccactggcatctcagtcaagcacatctaaaacaaaccaatactttttgactgtccttccccccaaacacgctcctc

SEQ ID NO: 374978 - DNA, 318 bp, Homo sapiens
attgctatctgaatctagaactctatctacatgatactgtatgctaaattgtatatagcaatatattaaaatcagtgccttatggtgaatccaaagtgattaaaaggaaacactgcttttcatttatgaatgcatgtttaagaaagaaaaatgtatttcatttttagattatataaatggtggtgaactttttactcatctttctcaaagagagcgtttcacagagcatgaggtgcagatttatgttggagagattgtgcttgccctcgaacatctccacaaggtaagactcttcatttttcaggtttcttttctgaa

SEQ ID NO: 374979 - DNA, 542 bp, Homo sapiens
actcagaatgcgtcaagtctgcttgcattgggactttgtgttcagaattttaaatcttagacacagaaccagtaaaagcaatggggatagtttagattactgatggtcttcaggaatttccagtcaattgtttcgtattaggatgtagtactaacttcttcaaaagatttattagaattgtgactctcagaccgcctagctagtttgatataaacagagccctcagaatttttttcccatgaacttctccaccctgccaatagacttagatataaaggttttaagagctttgttcccttaaaacaacttggggctgcagttgccaatggaaagttgtcttctgctgtaagtcataactgctaggaaagcttcagtacttttaccttcacaggggttccctttttttcccccgccaggcctttaacaaatacaagagagaggggttttgccttcagaatgttgataaggcccctttggctaagagaagaaaaatgaaaaagactagcaccagtaccgagacgcgcagcaggttccagtgagag

SEQ ID NO: 374980 - DNA, 3230 bp, Homo sapiens
agcgcggaggaggcggcggtggagcagggggcggtttggttgcgcggtactagcggtgcccgccgaagggggaggaggcgaggagcgagccgtgcggccagagcgggaaagagactcgtctttgcgtccgagttctggagccgccgcaccccgactcctggggccgcggcagcggctgcgaggggacgggcgtccgctgtctcctgggttcccctcgtagcgacccgcgggatcggaaaaaaaggagaagatggaggaggagggtggcagcagcggcggcgccgcggggaccagcgcggacggcggcgacggaggagagcagctcctcactgtcaagcacgagctgcggactgctaatttgacaggacatgctgagaaggtgggaatagaaaattttgagctcctgaaggtcctaggaactggagcttatggaaaagtatttctagttcgtaaaataagtggccatgatactggaaagctgtatgccatgaaagttttgaaaaaggcaacaatcgttcaaaaggccaaaaccacagagcatacaaggacagaacgacaagtcctggaacacattaggcagtcgccatttttggtaacattacattatgctttccagacagaaaccaaacttcatctcattttagattatataaatggtggtgaactttttactcatctttctcaaagagagcgtttcacagagcatgaggtgcagatttatgttggagagattgtgcttgccctcgaacatctccacaagttggggattatatatcgtgatattaagcttgagaatattctacttgattctaatggccatgtggtgctgacagattttggtctgagtaaggagtttgtggctgatgaaactgaaagagcatattccttttgtggaactattgaatacatggcaccagatattgtcagagggggagattcaggacatgacaaggcagttgactggtggagtttgggtgttctaatgtatgaattactaactggagcatctcctttcactgttgatggagaaaaaaattcccaagctgagatatctaggagaatattaaaaagtgagcctccatatccccaagaaatgagtgctttagcgaaagacctaattcagcgtcttttgatgaaagatcccaagaagagattgggatgtggtccacgtgatgcagatgaaatcaaagaacatctcttctttcagaaaataaattgggatgatttagccgccaaaaaagtgcctgcaccatttaagccagtcattcgagatgaattagatgtgagtaactttgcagaagagttcacagaaatggatcccacttattctcccgcagccctgccccagagttctgagaagctgtttcagggctattcctttgttgctccttccatcctattcaagcgtaatgcagctgtcatagaccctcttcagtttcacatgggagttgaacgtcctggagtgacaaatgttgccaggagtgcaatgatgaaggactctccattctatcaacactatgacctagatttgaaggacaaacccctgggagaaggtagtttttcaatttgtcgaaagtgtgtgcataaaaaaagtaaccaagcttttgcagtcaaaataatcagcaaaaggatggaagccaatactcaaaaggaaataacagctctgaaactctgtgaaggacaccccaatattgtgaagttgcatgaagtttttcatgatcagcttcacacgtttctagtgatggaacttctgaatggaggagaactgtttgagcgcattaagaaaaagaagcacttcagtgagacggaagccagctacatcatgaggaagcttgtttcagctgtaagccacatgcatgatgttggagtggtgcacagggatctgaaacctgagaatttattgttcaccgatgaaaatgacaatttggaaattaaaataattgattttggatttgcacggctaaagccaccggataatcagcccctgaagactccatgcttcacccttcattatgccgccccagagctcttgaatcagaacggctacgatgagtcctgtgacctgtggagcttgggcgtcattttgtacacaatgttgtcaggacaggttcccttccaatctcatgaccgaagtttgacgtgtaccagcgcggtggaaatcatgaagaaaattaaaaagggagatttctcctttgaaggagaagcctggaagaatgtatcccaagaggctaaagatttgatccaaggacttctcacagtagatccaaacaaaaggcttaaaatgtctggcttgaggtacaatgaatggctacaagatggaagtcagctgtcctccaatcctctgatgactccggatattctaggatcttccggagctgccgtgcatacctgtgtgaaagcaaccttccacgcctttaacaaatacaagagagaggggttttgccttcagaatgttgataaggcccctttggctaagagaagaaaaatgaaaaagactagcaccagtaccgagacgcgcagcaggttccagtgagagttcccattcttcttcctctcattctcacggtaaaactacacccaccaagacactgcagcccagcaatcctgccgacagcaataacccggagaccctcttccagttctcggactcagtagcttaggcatggtaggagtgtatcagtgatccattgcacctttattccctcagcatatgcctgaggcgatcttttatgcttttaaaaatgtttcccgttggtctcattggaatctgcctcctaatgatttttttcaggaaaacctgtttggttatcctcattcaaaagcactggacagagaatgttactgtgaatagagcacatattactctttttagcaacctagcatgatgccaacaagactattcttgaaagagcaaaggttcctgtaaatttaattagggctagatttgagctgcttgtaagtcacaggttttccagatgtctgccaacaagaaatgactcatactgtgatgataccttttgctttgccttgtggacaatgtgggtttttgaaatttgcacccttcaaacaatgatttatcagagaaaggggtctgttttcaaaaaagattctgtaatgaattttatgtgtggcatatacttatttcttgagagaagattttaacttattgtttttattttatggttacatatgatgataacctgctattattaaactttttctaaaaagtg

SEQ ID NO: 374981 - DNA, 239 bp, Homo sapiens
gtaaactaagtcagtctcaaatgacacacatacaaatattgaaattatagtttggagagtaagtcagtgattgccaggagctaagggggtggagggaatgactaaagagatagcaaaaaggacggttttagggtgatggaactcttttgaatcctgattttggtagtagttacttcaatctgtacatgtgttaaaatccataggactgtatataacaaaaataaagtcaattttattgt

SEQ ID NO: 374982 - DNA, 378 bp, Homo sapiens
gaaatgacaccaaatgacaactcagatacaagaagaaactaaaagcaacagaaatggcaaatatgaaataacatgtgtacatacttttctcttaatatctttaaaagatggctgcttatagcagaactaataacaccgtatttgatgggtttgtaaagtgtgcagatgtaatatatgacaacaatggcactcaggactgggatcgtacatggatatatgctgttgcaaggtttcagtgttttctctgaactattatctaaatattaactctgaataaattgggtaagttcaagatgcatattgtaatctctacagcaaccactaaaaaatagttcaaacagatatagctaaaagcaatagaggaattaaaatgacatt

SEQ ID NO: 374983 - DNA, 1113 bp, Homo sapiens
  misc_feature (210)..(210): n is a, c, g, or t
  misc_feature (804)..(804): n is a, c, g, or t
atggggctctgggcgctgttgcctggctgggtttctgctacgctgctgctggcgctggccgctctgcccgcagccctggctgccaacagcagtggccgatggtggggtattgtgaacgtagcctcctccacgaacctgcttacagactccaagagtctgcaactggtactcgagcccagtctgcagctgttgagccgcaaacagcggcgnctgatacgccaaaatccggggatcctgcacagcgtgagtggggggctgcagagtgccgtgcgcgagtgcaagtggcagttccggaatcgccgctggaactgtcccactgctccagggccccacctcttcggcaagatcgtcaaccgaggctgtcgagaaacggcgtttatcttcgctatcacctccgccggggtcacccattcggtggcgcgctcctgctcagaaggttccatcgaatcctgcacgtgtgactaccggcggcgcggccccgggggccccgactggcactgggggggctgcagcgacaacattgacttcggccgcctcttcggccgggagttcgtggactccggggagaaggggcgggacctgcgcttcctcatgaaccttcacaacaacgaggcaggccgtacgaccgtattctccgagatgcgccaggagtgcaagtgccacgggatgtccggctcatgcacggtgcgcacgtgctggatgcggctgcccacgctgcgcgccgtgggcgatgtgctgcgcgaccgcttcgacggcgcctcgcgcgtcctgtacggcaaccgcggcagcaaccgcgcttcgcgngcggagctgctgcgcctggagccggaagacccggcccacaaaccgccctccccccacgacctcgtctacttcgagaaatcgcccaacttctgcacgtacagcggacgcctgggcacagcaggcacggcagggcgcgcctgtaacagctcgtcgcccgcgctggacggctgcgagctgctctgctgcggcaggggccaccgcacgcgcacgcagcgcgtcaccgagcgctgcaactgcaccttccactggtgctgccacgtcagctgccgcaactgcacgcacacgcgcgtactgcacgagtgtctgtga

SEQ ID NO: 374984 - DNA, 350 bp, Homo sapiens
  misc_feature (145)..(145): n is a, c, g, or t
ccccaatcaactcattcatcttttcgcattcatccgctcttgcacatctcagcctgaggcttggaaaagaactttttctaggctgggtgtctcagaggcaacagggaacatgaacaaaaaggtggcaaaagcataattcaatgtncgtgctggttttaaggtcatgcacacattggagcacgttctatgtgccaggtgccatccctcctgggtccaaaaatgactgaatacaaggctaatacatagaaatgggtagtgacaaaatctaatcctttgatcaccagagagtccatcaccagaacacagcaataaaatcttgcatgtgtagagtgccttagagttgccaaagc

SEQ ID NO: 374985 - DNA, 1648 bp, Homo sapiens
actccaccacgtcggtcccgccaaaggttgtcacgcgcggcgcactctgggaaaaccacgtggaggtgactaaaaaggaccctgccgcctgtaactttagttgtcttagctactgcctacaaaagatgcgccatcatggcacttatttttgtaattttcctccaccagcggccgagaagagagccgaagcctttgagaaaaatattcccagacggttgagtgtttctgggcacatcaggcattcattcgggccgcctgccctctagtgggggggtccttcactcctggcacctctggttacggacaacatacagaagccactgccaatgagctccgccgagtagcaccggggcagggctagcgcttaaaggagccgcgacccctttgcagaccagagggtgacccggatgatggcggccggcgcggccctagccctggccttgtggctactaatgccaccagtggaggtgggaggggcggggcccccgccaatccaggacggtgagttcacgttcctgttgccggcggggaggaagcagtgtttctaccagtccgcgccggccaacgcaagcctcgagaccgaataccaggtgatcggaggtgctggactggacgtggacttcacgctggagagccctcagggcgtgctgttggtcagcgagtcccgcaaggctgatggggtacacacggtggagccaacggaggccggggactacaagctgtgctttgacaactccttcagcaccatctccgagaagctggtgttctttgaactgatctttgacagcctccaggatgacgaggaggtcgaaggatgggcagaggctgtggagcccgaggagatgctggatgttaaaatggaggacatcaaggagtccattgagaccatgcggacccggctggagcgcagcatccagatgctcacgctactgcgggccttcgaggcacgtgaccgcaacctgcaagagggcaacttggagcgggtcaacttctggtcagctgtcaacgtggcggtgctgctgctggtggctgtgctgcaggtctgcacgctcaagcgcttcttccaggacaagcgcccggtgcccacgtagcccctgccatggaaggaagaacgggacaaaggaggggcagcagggtgtgtgcatatgagacttgggggtccctccccaattttagtttcctgccaaaacgggagtgtgcagtcagggcctgcggtctggccccatgagtctccttccgtcctcagcgggcagggaacacctctggcttgtagaagggacggctcagtggctgcaccgacggtcctggaaatctcacatggtgggcactgcagcgttggaacgtgagcctcggatttcctggcccctctactgtaaatgtgccttagcctaagcctcccatcctgtgttagcgttgcctggtgcggggcagggcctaacaaggaaacctgggccctccaagccaggttgaggtctggtaacagaatgccaggaagggggcctggaagaccacctgccccggcccctctcctgcaggggccccacacaggcatgagggatggcccggccaaagtctaggcagaagcctcctataacaaagggtggtgtggcctgggcattggagtcaataaattatggtcagaaaatca

SEQ ID NO: 374986 - DNA, 2166 bp, Homo sapiens
actccaccacgtcggtcccgccaaaggttgtcacgcgcggcgcactctgggaaaaccacgtggaggtgactaaaaaggaccctgccgcctgtaactttagttgtcttagctactgcctacaaaagatgcgccatcatggcacttatttttgtaattttcctccaccagcggccgagaagagagccgaagcctttgagaaaaatattcccagacggttgagtgtttctgggcacatcaggcattcattcgggccgcctgccctctagtgggggggtccttcactcctggcacctctggttacggacaacatacagaagccactgccaatgagctccgccgagtagcaccggggcagggctagcgcttaaaggagccgcgacccctttgcagaccagagggtgacccggatgatggcggccggcgcggccctagccctggccttgtggctactaatgccaccagtggaggtgggaggggcggggcccccgccaatccaggacggtgagttcacgttcctgttgccggcggggaggaagcagtgtttctaccagtccgcgccggccaacgcaagcctcgagaccgaataccaggtgatcggaggtgctggactggacgtggacttcacgctggagagccctcagggcgtgctgttggtcagcgagtcccgcaaggctgatggggtacacacggtggagccaacggaggccggggactacaagctgtgctttgacaactccttcagcaccatctccgagaagctggtgttctttgaactgatctttgacagcctccaggatgacgaggaggtcgaaggatgggcagaggctgtggagcccgaggagatgctggatgttaaaatggaggacatcaaggagtccattgagaccatgcggacccggctggagcgcagcatccagatgctcacgctactgcgggccttcgaggcacgtgaccgcaacctgcaagagggcaacttggagcgggtcaacttctggtcagctgtcaacgtggcggtgctgctgctggtggctgtgctgcaggtctgcacgctcaagcgcttcttccaggacaagcgcccggtgcccacgtagcccctgccatggaaggaagaacgggacaaaggaggggcagcagggtgtgtgcatatgagacttgggggtccctccccaattttagtttcctgccaaaacgggagtgtgcagtcagggcctgcggtctggccccatgagtctccttccgtcctcagcgggcagggaacacctctggcttgtagaagggacggctcagtggctgcaccgacggtcctggaaatctcacatggtgggcactgcagcgttggaacgtgagcctcggatttcctggcccctctactgtaaatgtgccttagcctaagcctcccatcctgtgttagcgttgcctggtgcggggcagggcctaacaaggaaacctgggccctccaagccaggttgaggtctggtaacagaatgccaggaagggggcctggaagaccacctgccccggcccctctcctgcaggggccccacacaggcatgagggatggcccggccaaagtctaggcagaagcctcctataacaaagggtggtgtggcctgggcattggagtcaataaattatggtcagaaaatcacaagagcctgctgattggggctcagggacaccagccaggacagaccggcccccgagggggcagccagacaggtgggaggggcctcccacgaagctcagaagaaaggtcgtgcgggagccgatggaggtggtcgcctggcacaagagaaaaatcagaaagcaaagtttaactgagccccagttgggccacgaggcttgggcttccccacgaggtgagagaagcagggcctgagggtaggaagggggtggagcgctggggtccccgcttcaccaggcagcagccaggcctgtgcacgtgggggtgtgcagggggtcagagaatatctgctcccactcctcacatgctaaggaaagtaaaagctctcccctgtatcgagtggcttcctctgaaaggtgacacccccgaaagcagagccctcagggagatgggaggcacttatgagtgcagggacttgggcatccttatgggaggcctgatggaggtggcacccatgtccccagcctgaacactaacacaag

SEQ ID NO: 374987 - DNA, 1559 bp, Homo sapiens
actccaccacgtcggtcccgccaaaggttgtcacgcgcggcgcactctgggaaaaccacgtggaggtgactaaaaaggaccctgccgcctgtaactttagttgtcttagctactgcctacaaaagatgcgccatcatggcacttatttttgtaattttcctccaccagcggccgagaagagagccgaagcctttgagaaaaatattcccagacggttgagtgtttctgggcacatcaggcattcattcgggccgcctgccctctagtgggggggtccttcactcctggcacctctggttacggacaacatacagaagccactgccaatgagctccgccgagtaccctggccttgtggctactaatgccaccagtggaggtgggaggggcggggcccccgccaatccaggacggtgagttcacgttcctgttgccggcggggaggaagcagtgtttctaccagtccgcgccggccaacgcaagcctcgagaccgaataccaggtgatcggaggtgctggactggacgtggacttcacgctggagagccctcagggcgtgctgttggtcagcgagtcccgcaaggctgatggggtacacacggtggagccaacggaggccggggactacaagctgtgctttgacaactccttcagcaccatctccgagaagctggtgttctttgaactgatctttgacagcctccaggatgacgaggaggtcgaaggatgggcagaggctgtggagcccgaggagatgctggatgttaaaatggaggacatcaaggagtccattgagaccatgcggacccggctggagcgcagcatccagatgctcacgctactgcgggccttcgaggcacgtgaccgcaacctgcaagagggcaacttggagcgggtcaacttctggtcagctgtcaacgtggcggtgctgctgctggtggctgtgctgcaggtctgcacgctcaagcgcttcttccaggacaagcgcccggtgcccacgtagcccctgccatggaaggaagaacgggacaaaggaggggcagcagggtgtgtgcatatgagacttgggggtccctccccaattttagtttcctgccaaaacgggagtgtgcagtcagggcctgcggtctggccccatgagtctccttccgtcctcagcgggcagggaacacctctggcttgtagaagggacggctcagtggctgcaccgacggtcctggaaatctcacatggtgggcactgcagcgttggaacgtgagcctcggatttcctggcccctctactgtaaatgtgccttagcctaagcctcccatcctgtgttagcgttgcctggtgcggggcagggcctaacaaggaaacctgggccctccaagccaggttgaggtctggtaacagaatgccaggaagggggcctggaagaccacctgccccggcccctctcctgcaggggccccacacaggcatgagggatggcccggccaaagtctaggcagaagcctcctataacaaagggtggtgtggcctgggcattggagtcaataaattatggtcagaaaatca

SEQ ID NO: 374988 - DNA, 1919 bp, Homo sapiens
actccaccacgtcggtcccgccaaaggttgtcacgcgcggcgcactctgggaaaaccacgtggaggtgactaaaaaggaccctgccgcctgtaactttagttgtcttagctactgcctacaaaagatgcgccatcatggcacttatttttgtaattttcctccaccagcggccgagaagagagccgaagcctttgagaaaaatattcccagacggttgagtgtttctgggcacatcaggcattcattcgggccgcctgccctctagtgggggggtccttcactcctggcacctctggttacggacaacatacagaagccactgccaatgagctccgccgagtagcaccggggcagggctagcgcttaaaggagccgcgacccctttgcagaccagagggtgacccggatgatggcggccggcgcggccctagccctggccttgtggctactaatgccaccagtggaggtgggaggggcggggcccccgccaatccaggacggtgagttcacgttcctgttgccggcggggaggaagcagtgtttctaccagtccgcgccggccaacgcaagcctcgagaccgaataccaggtgatcggaggtgctggactggacgtggacttcacgctggagagccctcagggcgtgctgttggtcagcgagtcccgcaaggctgatggggtacacacggtggagccaacggaggccggggactacaagctgtgctttgacaactccttcagcaccatctccgagaagctggtgttctttgaactgatctttgacagcctccaggatgacgaggaggtcgaaggatgggcagaggctgtggagcccgaggagatgctggatgttaaaatggaggacatcaaggagtccattgagaccatgcggacccggctggagcgcagcatccagatgctcacgctactgcgggccttcgaggcacgtgaccgcaacctgcaagagggcaacttggagcgggtcaacttctggtcagctgtcaacgtggcggtgctgctgctggtggctgtgctgcagcgggcagggaacacctctggcttgtagaagggacggctcagtggctgcaccgacggtcctggaaatctcacatggtgggcactgcagcgttggaacgtgagcctcggatttcctggcccctctactgtaaatgtgccttagcctaagcctcccatcctgtgttagcgttgcctggtgcggggcagggcctaacaaggaaacctgggccctccaagccaggttgaggtctggtaacagaatgccaggaagggggcctggaagaccacctgccccggcccctctcctgcaggggccccacacaggcatgagggatggcccggccaaagtctaggcagaagcctcctataacaaagggtggtgtggcctgggcattggagtcaataaattatggtcagaaaatcaaaaaaaaaaaaaaaaaaaaaaaaaaaaaaaaaaaaacaaaaaaaaaacaaaaaaaaaaaaaaaaaagaggggggggcgcgcccaaaaaaaatatcccccgcggggggccccaattgggcccgcccccgctttttttttaaaaagggggccccccaaaagggggcggttttaataaacgcagagccgcgggggcgccgcgtatcataaccacacgcccgccgggcggaggagaaaacaacgcggcagcagcgggacctccctggtgggaggaagaacccccaccacggggggcgagggacaaaacaatgtgcgggacatcaccccctcccatgagaaatagaaagcccccgcggggcggaccaaataaacccggcgagggcgacagcgtgcggtgtcaaccaccagcgcggatattaccagcgggctgcaaaaaaatgtgccccagggaagtggtctgagcaccaatttattcgcggc

SEQ ID NO: 374989 - DNA, 1272 bp, Homo sapiens
  misc_feature (21)..(21): n is a, c, g, or t
  misc_feature (26)..(26): n is a, c, g, or t
atagggctaggtacgaggctngtggngccggatgatggcggccggcgcggccctagccctggccttgtggctactaatgccaccagtggaggtgggaggggcggggcccccgccaatccaggacggtgagttcacgttcctgttgccggcggggaggaagcagtgtttctaccagtccgcgccggccaacgcaagcctcgagaccgaataccaggtgatcggaggtgctggactggacgtggacttcacgctggagagccctcagggcgtgctgttggtcagcgagtcccgcaaggctgatggggtacacacggtggagccaacggaggccggggactacaagctgtgctttgacaactccttcagcaccatctccgagaagctggtgttctttgaactgatctttgacagcctccaggatgacgaggaggtcgaaggatgggcagaggctgtggagcccgaggagatgctggatgttaaaatggaggacatcaaggagtccattgagaccatgcggacccggctggagcgcagcatccagatgctcacgctactgcgggccttcgaggcacgtgaccgcaacctgcaagagggcaacttggagcgggtcaacttctggtcagctgtcaacgtggcggtgctgctgctggtggctgtgctgcaggtctgcacgctcaagcgcttcttccaggacaagcgcccggtgcccacgtagcccctgccatggaaggaagaacgggacaaaggaggggcagcagggtgtgtgcatatgagacttgggggtccctccccaattttagtttcctgccaaaacgggagtgtgcagtcagggcctgcggtctggccccatgagtctccttccgtcctcagcgggcagggaacacctctggcttgtagaagggacggctcagtggctgcaccgacggtcctggaaatctcacatggtgggcactgcagcgttggaacgtgagcctcggatttcctggcccctctactgtaaatgtgccttagcctaagcctcccatcctgtgttagcgttgcctggtgcggggcagggcctaacaaggaaacctgggccctccaagccaggttgaggtctggtaacagaatgccaggaagggggcctggaagaccacctgccccggcccctctcctgcaggggccccacacaggcatgagggatggcccggccaaagtctaggcagaagcctcctataacaaagggtggtgtggcctgggcattggagtcaataaattatggtcagaaaatca

SEQ ID NO: 374990 - DNA, 2125 bp, Homo sapiens
actccaccacgtcggtcccgccaaaggttgtcacgcgcggcgcactctgggaaaaccacgtggaggtgactaaaaaggaccctgccgcctgtaactttagttgtcttagctactgcctacaaaagatgcgccatcatggcacttatttttgtaattttcctccaccagcggccgagaagagagccgaagcctttgagaaaaatattcccagacggttgagtgtttctgggcacatcaggcattcattcgggccgcctgccctctagtgggggggtccttcactcctggcacctctggttacggacaacatacagaagccactgccaatgagctccgccgagtagcaccggggcagggctagcgcttaaaggagccgcgacccctttgcagaccagagggtgacccggatgatggcggccggcgcggccctagccctggccttgtggctactaatgccaccagtggaggtgggaggggcggggcccccgccaatccaggacggtgagttcacgttcctgttgccggcggggaggaagcagtgtttctaccagtccgcgccggccaacgcaagcctcgagaccgaataccaggtgatcggaggtgctggactggacgtggacttcacgctggagagccctcagggcgtgctgttggtcagcgagtcccgcaaggctgatggggtacacacggtggagccaacggaggccggggactacaagctgtgctttgacaactccttcagcaccatctccgagaagctggtgttctttgaactgatctttgacagcctccaggatgacgaggaggtcgaaggatgggcagaggctgtggagcccgaggagatgctggatgttaaaatggaggacatcaaggagtccattgagaccatgcggacccggctggagcgcagcatccagatgctcacgctactgcgggccttcgaggcacgtgaccgcaacctgcaagagggcaacttggagcgggtcaacttctggtcagctgtcaacgtggcggtgctgctgctggtggctgtgctgcaggtctgcacgctcaagcgcttcttccaggacaagcgcccggtgcccacgtagcccctgccatggaaggaagaacgggacaaaggaggggcagcagggtgtgtgcatatgagacttgggggtccctccccaattttagtttcctgccaaaacgggagtgtgcagtcagggcctgcggtctggccccatgagtctccttccgtcctcagcgggcagggaacacctctggcttgtagaagggacggctcagtggctgcaccgacggtcctggaaatctcacatggtgggcactgcagcgttggaacgtgagcctcggatttcctggcccctctactgtaaatgtgccttagcctaagcctcccatcctgtgttagcgttgcctggtgcggggcagggcctaacaaggaaacctgggccctccaagccaggttgaggtctggtaacagaatgccaggaagggggcctggaagaccacctgccccggcccctctcctgcaggggccccacacaggcatgagggatggcccggccaaagtctaggcagaagcctcctataacaaagggtggtgtggcctgggcattggagtcaataaattatggtcagaaaatcaaaaaaaaaaaaaaaaaaaaaaaaaaaaaaaaaaaaacaaaaaaaaaacaaaaaaaaaaaaaaaaaagaggggggggcgcgcccaaaaaaaatatcccccgcggggggccccaattgggcccgcccccgctttttttttaaaaagggggccccccaaaagggggcggttttaataaacgcagagccgcgggggcgccgcgtatcataaccacacgcccgccgggcggaggagaaaacaacgcggcagcagcgggacctccctggtgggaggaagaacccccaccacggggggcgagggacaaaacaatgtgcgggacatcaccccctcccatgagaaatagaaagcccccgcggggcggaccaaataaacccggcgagggcgacagcgtgcggtgtcaaccaccagcgcggatattaccagcgggctgcaaaaaaatgtgccccagggaagtggtctgagcaccaatttattcgcggc

SEQ ID NO: 374991 - DNA, 1763 bp, Homo sapiens
actccaccacgtcggtcccgccaaaggttgtcacgcgcggcgcactctgggaaaaccacgtggaggtgactaaaaaggaccctgccgcctgtaactttagttgtcttagctactgcctacaaaagatgcgccatcatggcacttatttttgtaattttcctccaccagcggccgagaagagagccgaagcctttgagaaaaatattcccagacggttgagtgtttctgggcacatcaggcattcattcgggccgcctgccctctagtgggggggtccttcactcctggcacctctggttacggacaacatacagaagccactgccaatgagctccgccgagtagcaccggggcagggctagcgcttaaaggagccgcgacccctttgcagaccagagggtgacccggatgatggcggccggcgcggccctagccctggccttgtggctactaatgccaccagtggaggtgggaggggcggggcccccgccaatccaggacggtgagttcacgttcctgttgccggcggggaggaagcagtgtttctaccagtccgcgccggccaacgcaagcctcgagaccgaataccaggtgatcggaggtgctggactggacgtggacttcacgctggagagccctcagggcgtgctgttggtcagcgagtcccgcaaggctgatggggtacacacggtggagccaacggaggccggggactacaagctgtgctttgacaactccttcagcaccatctccgagaagctggtgttctttgaactgatctttgacagcctccaggatgacgaggaggtcgaaggatgggcagaggctgtggagcccgaggagatgctggatgttaaaatggaggacatcaaggtgtgtccaggctgcgctggggccactccttccagatctctaggattcacctggggtgccccccttgggctgacccagcctcccctccgtagttgtgccctccaactgaattatagagtccattgagaccatgcggacccggctggagcgcagcatccagatgctcacgctactgcgggccttcgaggcacgtgaccgcaacctgcaagagggcaacttggagcgggtcaacttctggtcagctgtcaacgtggcggtgctgctgctggtggctgtgctgcaggtctgcacgctcaagcgcttcttccaggacaagcgcccggtgcccacgtagcccctgccatggaaggaagaacgggacaaaggaggggcagcagggtgtgtgcatatgagacttgggggtccctccccaattttagtttcctgccaaaacgggagtgtgcagtcagggcctgcggtctggccccatgagtctccttccgtcctcagcgggcagggaacacctctggcttgtagaagggacggctcagtggctgcaccgacggtcctggaaatctcacatggtgggcactgcagcgttggaacgtgagcctcggatttcctggcccctctactgtaaatgtgccttagcctaagcctcccatcctgtgttagcgttgcctggtgcggggcagggcctaacaaggaaacctgggccctccaagccaggttgaggtctggtaacagaatgccaggaagggggcctggaagaccacctgccccggcccctctcctgcaggggccccacacaggcatgagggatggcccggccaaagtctaggcagaagcctcctataacaaagggtggtgtggcctgggcattggagtcaataaattatggtcagaaaatca

SEQ ID NO: 374992 - DNA, 338 bp, Homo sapiens
atacttatcactgcaaaaccaccagttttcagttcagttgggggactagacatgaggctcactgggcaaattaaagtaacatttcttggaagttgggatgaccttggatactcttaattaaacttttagaatgttttttcatttttctgagagcaccaacatttcactaattttcatttataaaagcttttagagttaatatagtggtagctgtttctggcaagtgttaagactaaaacttcgggtattttgtaattgtaaagaatcaagacctaatatgatttgatgttgactaggagagaaaattaacaggtagaggcctaagactttgttcatgg

SEQ ID NO: 374993 - DNA, 392 bp, Homo sapiens
gtttcccagactcctttgcttctgacttctgggagaatccagccaacgtgaggcattggtgggacacaggaatgtgggggagaaggaggaggaggccagagcatttctctctctctctagccctcccgcagtacatagctcctgcagagtagtccctctgggcccatctcttgcgaggtccacctcctcctccctttgtcctcctggtgagtgtttggctcctgtagtagtccattttcacatcgctataaagaactacctggtgcctgtaattccagcttgggagaatgaggcaggaaaatcgcttgaacctgggaggtggaggttgcattgagccaagattgcgccattgcactccagcctgagtgacagaatgagactccatcatttcc

SEQ ID NO: 374994 - DNA, 2153 bp, Homo sapiens
gagaagttagtggcgctgctgggacgggggaaaggagacgcttcttcctcttgctgctcttctcgttcccgagatcagcggcggcggtgaccgcgagtgggtcggcaccgtctccggctccgggtgcgaacaatgctgactgatagcggaggcggcggcacctcctttgaggaggacctggactctgtggctccgcgatccgccccagctggggcctcggagccgcctccgccgggaggggtcggtctggggatccgcaccgtgaggctctttggggaggccgggccagcgtcgggagtcggcagcagcggcggcggcggcagcggcagcggtacgggcggaggggacgcggcgctggatttcaagttggcggctgccgtgctgaggaccgggggtggaggtggtgcctctggcagtgacgaggacgaagtgtccgaggttgaatcatttattttggaccaagaagatctggataacccagtgcttaaaacaacatcagagatattcttatcaagtactgcagaaggagcagacttacgcactgtggatccagagacacaggcacgactagaagcattgctagaagcagcaggaattggcaaattgtcaactgctgatggtaaagcttttgcagatcctgaggtactccggagactgacatcctcagttagttgtgcactggatgaagctgctgctgcactgacacggatgaaagcagaaaacagccacaatgcaggacaagtggacactcgcagtctagcagaagcttgttcagatggggatgttaatgctgttcgtaaattgctagatgaaggcagaagtgtaaatgaacatacagaagaaggagaaagcctgctgtgtttggcttgttcagcagggtattatgaattagcacaagtattgcttgctatgcatgctaatgttgaagatcgagggaataaaggagacataactcccctgatggcagcttccagtggaggttacttagatattgtgaaattattacttcttcatgatgctgatgtcaactcccagtctgcaacaggaaacactgcgctaacttatgcatgtgctggaggatttgttgacattattaaagtgctccttaatgaaggtgcaaatatagaagatcataatgaaaatggacatactcccttaatggaagcagccagtgcaggtcatgtggaagttgcaagagttcttttagatcatggtgcaggcatcaacactcattctaatgaattcaaagaaagtgctctaacacttgcttgctacaaaggccatttggatatggttcgctttctacttgaagctggtgcagatcaagagcacaaaacagatgagatgcacactgccttaatggaggcctgcatggatggacatgtagaggtggcacgtttgcttttggatagtggtgctcaagtgaacatgcctgcagattcatttgaatctccattgacgctagctgcctgtggaggacatgttgaattggcagctctacttattgaaaggggagcaaatcttgaagaagttaatgatgaaggatacactcccttgatggaagctgcccgggaaggacatgaagaaatggtggcactactcttagcacaaggagcaaatataaatgcccagacagaagaaactcaagaaactgctcttactttggcttgctgtggaggattttctgaagttgcagactttcttattaaggcaggggctgatatagaacttggctgctccacacctctgatggaggcatctcaggagggacacctggaattggttaaatatttgctggcttctggcgctaatgtgcatgctacaacagcaacaggagacacagccttaacctatgcttgtgaaaatggacatacggatgttgcagatgttttacttcaagcaggggctgatttagacaagcaggaggacatgaagactattttggagggcatagatccggccaagcatcaggtgagggtggcctttgatgcttgtaagctactacgtaaagaatagatgttgtaggtaaccagaactctggatatctgaattccagccaagaagttccaggaccctgctgggtgacaaaggaaatcctcttcaattgaaaaagattatgaagtcccaataaaaagagatttgtattgctggta

SEQ ID NO: 374995 - DNA, 910 bp, Homo sapiens
gagaagttagtggcgctgctgggacgggggaaaggagacgcttcttcctcttgctgctcttctcgttcccgagatcagcggcggcggtgaccgcgagtgggtcggcaccgtctccggctccgggtgcgaacaatgctgactgatagcggaggcggcggcacctcctttgaggaggacctggactctgtggctccgcgatccgccccagctggggcctcggagccgcctccgccgggaggggtcggtctggggatccgcaccgtgaggctctttggggaggccgggccagcgtcgggagtcggcagcagcggcggcggcggcagcggcagcggtacgggcggaggggacgcggcgctggatttcaagttggcggctgccgtgctgaggaccgggggtggaggtggtgcctctggcagtgacgaggacgaagtgtccgaggttgaatcatttattttggaccaagaagatctggataacccagtgcttaaaacaacatcagagatattcttatcaagtactgcagaaggagcagacttacgcactgtggatccagagacacaggcacgactagaagcattgctagaagcagcaggaattggcaaattgtcaactgctgatggtaaagcttttgcagatcctgaggtactccggagactgacatcctcagttagttgtgcactggatgaagctgctgctgcactgacacggatgaaagcagaaaacagccacaatgcaggacaagtggacactcgcagtctagcagaagcttgttcagatggggatgttaatgctgttcgtaaattgctagatgaaggcagaagtgtaaatgaacatacagaagaaggagaaagcgaaccatatccaaatggcctttgtagcaagcaagtgttagagcactttctttggattc

SEQ ID NO: 374996 - DNA, 772 bp, Homo sapiens
gcacgagtaagagtctagatctagagaaaatacaaacattccatttctcaagttctttgaaggttcttgttttagttgaaaagtggaagccttaagtacatttataatgaggggaaaagctatgtaactatttatcttacagtattttcctccgtcctcccaacttctgatatgcccaaatctcttgatttcattattttctttggttagatatttttaaatgttgctctgtttttgtggctttgttttttgagacaaaggcatgaatttaaataattctgcagaaatatttctacatatattaagatttatattgaagttttattggtaaaaaaccataatatcacccccttaaaaaaatttatactctgctcatgacattacagtctctacagatgagaatctttttagttgaagatcctgagttaacaaagcccaccatctgaagtatcggtcacaaggtcttcatggccaaatgtgattttcgtttttggaataagatccgtgagttcttctttttcctttcgcaggacgacaagcaggaggacatgaagactattttggagggcatagatccggccaagcatcaggtgagggtggcctttgatgcttgtaagctactacgtaaagaatagatgttgtaggtaaccagaactctggatatctgaattccagccaagaagttccaggaccctgctgggtgacaaaggaaatcctcttcaattgaaaaagattatgaagtcccaataaaaagagatttgtattgctggta

SEQ ID NO: 374997 - DNA, 1167 bp, Homo sapiens
ataacgcttcccctataaacccgttcgtctgcaattcaaagtttttccctggcccgcccccctcttctataccaaaaaggctttccttgttttcaaagcccattgaaaggtgccttttcctgaggggtcgtccaaggcccaaacgatgagatgcccctccttaatggaggccgtatgatggacatgtagaggtggcacgtttgcttttggatagtggtgctcaagtgaacatgcctgcagattcatttgaatctccattgacgctagctgcctgtggaggacatgttgaattggcagctctacttattgaaaggggagcaaatcttgaagaagttaatgatgaaggatacactcccttgatggaagctgcccgggaaggacatgaagaaatggtggcactactcttagcacaaggagcaaatataaatgcccagacagaagaaactcaagaaactgctcttactttggcttgctgtggaggattttctgaagttgcagactttcttattaaggcaggggctgatatagaacttggctgctccacacctctgatggaggcatctcaggagggacacctggaattggttaaatatttgctggcttctggcgctaatgtgcatgctacaacagcaacaggagacacagccttaacctatgcttgtgaaaatggacatacggatgttgcagatgttttacttcaagcaggggctgatttagacaagcaggaggacatgaagactattttggagggcatagatccggccaagcatcaggtgagggtggcctttgatgcttgtaagctactacgtaaagaatagatgttgtaggtaaccagaactctggatatctgaattccagccaagaagttccaggaccctgctgggtgacaaaggaaatcctcttcaattgaaaaagattatgaagtcccaataaaaagagatttgtattgctggtagtttgtttccttagtcttctttctcagtgatattcctaaaaaaatctcttaggtgaaaatagattttcttattcaggtagttcttttacattctcctttattgggagagttagtataccgcagagagaaagtctcagtaataaagtcctttgcattcaactttgttcatcaaaaatctgaaactcagagtgatattaatatattggattgtt

SEQ ID NO: 374998 - DNA, 984 bp, Homo sapiens
gcacgagtaagagtctagatctagagaaaatacaaacattccatttctcaagttctttgaaggttcttgttttagttgaaaagtggaagccttaagtacatttataatgaggggaaaagctatgtaactatttatcttacagtattttcctccgtcctcccaacttctgatatgcccaaatctcttgatttcattattttctttggttagatatttttaaatgttgctctgtttttgtggctttgttttttgagacaaaggcatgaatttaaataattctgcagaaatatttctacatatattaagatttatattgaagttttattggtaaaaaaccataatatcacccccttaaaaaaatttatactctgctcatgacattacagtctctacagatgagaatctttttagttgaagatcctgagttaacaaagcccaccatctgaagtatcggtcacaaggtcttcatggccaaatgtgattttcgtttttggaataagatccgtgagttcttctttttcctttcgcaggacgacaagcaggaggacatgaagactattttggagggcatagatccggccaagcatcaggtgagggtggcctttgatgcttgtaagctactacgtaaagaatagatgttgtaggtaaccagaactctggatatctgaattccagccaagaagttccaggaccctgctgggtgacaaaggaaatcctcttcaattgaaaaagattatgaagtcccaataaaaagagatttgtattgctggtagtttgtttccttagtcttctttctcagtgatattcctaaaaaaatctcttaggtgaaaatagattttcttattcaggtagttcttttacattctcctttattgggagagttagtataccgcagagagaaagtctcagtaataaagtcctttgcattcaactttgttcatcaaaaatctgaaactcagagtgatattaatatattggattgtt

SEQ ID NO: 374999 - DNA, 1100 bp, Homo sapiens
ctattgttaatcatccttctagtacattcctacaaattctattctttttgtgttttctgttttggtttttcaaaatttcaaattaggtggcaggttcatatgtgtaataatctatataaaaataatattccatttaaatgttcatgcctcttgctgaaatgtgtgctttgcctagcttttattttgtgagagtgctttaaactgcttcctagagtttttcccagaattctctgatacatttcttaaaaacttatgtgtgacatacatagctgtaaatgttatagagaattagatttcttagttttgcttatttagaaaaaactatgcaagtattaccttttaaatcatccaagtagatacctgagaacattattggaaaataattattaaccaaaataaatgtgtagtatgattgttatttattatcatttctactaatacaaaatattgtaatgaaaacactatcattcattcttattaattaggaccttccctatcagttataatttttgggaggtatgcttttttgtctgagaattgtgacagcaatatatgttaagtacatcttagtcttttgacttctttctatatctttttccttttatagagttgctttgagtcgtctataaaaattaggaattgaagtttgtcattcaaaataaagaaatagagtagaacttaaaagcttagataatataagcaaaatttaatactcttatcctctaaattcttacctggattctctcttcattgtattttctacaacaaagtcactgtcttaacctgttgggagttcttctaaaaaattgaatagggctgggtgcagtggctcatgcctgtaatcccagcactttgggatgccgaggtgggtggatcacctgaggtcaggtgttaaagaccagccggactaacttggtgaaaccctgtctctaccaaatacaaaaagttagctgggtgtggtggcacatgcctgtaatcccagctacttgggaggctgaggcagaagaatcagttgaacccaggaggtggaggttgcagtgagcctagattgcgccattgcactccagcctgggcaacaagagcaaaaacgccatctcaaa

SEQ ID NO: 375000 - DNA, 483 bp, Homo sapiens
tgctcgaattcaagcttctaacgatgtacggggacaagcaggaggacatgaagactattttggagggcatagatccggccaagcatcaggtgagggtggcctttgatgcttgtaagctactacgtaaagaatagatgttgtaggtaaccagaactctggatatctgaattccagccaagaagttccaggaccctgctgggtgacaaaggaaatcctcttcaattgaaaaagattatgaagtcccaataaaaagagatttgtattgctggtagtttgtttccttagtcttctttctcagtgatattcctaaaaaaatctcttaggtgaaaatagattttcttattcaggtagttcttttacattctcctttattgggagagttagtataccgcagagagaaagtctcagtaataaagtcctttgcattcaactttgttcatcaaaaatctgaaactcagagtgatattaatatattggattgtt

SEQ ID NO: 375001 - DNA, 2365 bp, Homo sapiens
gagaagttagtggcgctgctgggacgggggaaaggagacgcttcttcctcttgctgctcttctcgttcccgagatcagcggcggcggtgaccgcgagtgggtcggcaccgtctccggctccgggtgcgaacaatgctgactgatagcggaggcggcggcacctcctttgaggaggacctggactctgtggctccgcgatccgccccagctggggcctcggagccgcctccgccgggaggggtcggtctggggatccgcaccgtgaggctctttggggaggccgggccagcgtcgggagtcggcagcagcggcggcggcggcagcggcagcggtacgggcggaggggacgcggcgctggatttcaagttggcggctgccgtgctgaggaccgggggtggaggtggtgcctctggcagtgacgaggacgaagtgtccgaggttgaatcatttattttggaccaagaagatctggataacccagtgcttaaaacaacatcagagatattcttatcaagtactgcagaaggagcagacttacgcactgtggatccagagacacaggcacgactagaagcattgctagaagcagcaggaattggcaaattgtcaactgctgatggtaaagcttttgcagatcctgaggtactccggagactgacatcctcagttagttgtgcactggatgaagctgctgctgcactgacacggatgaaagcagaaaacagccacaatgcaggacaagtggacactcgcagtctagcagaagcttgttcagatggggatgttaatgctgttcgtaaattgctagatgaaggcagaagtgtaaatgaacatacagaagaaggagaaagcctgctgtgtttggcttgttcagcagggtattatgaattagcacaagtattgcttgctatgcatgctaatgttgaagatcgagggaataaaggagacataactcccctgatggcagcttccagtggaggttacttagatattgtgaaattattacttcttcatgatgctgatgtcaactcccagtctgcaacaggaaacactgcgctaacttatgcatgtgctggaggatttgttgacattattaaagtgctccttaatgaaggtgcaaatatagaagatcataatgaaaatggacatactcccttaatggaagcagccagtgcaggtcatgtggaagttgcaagagttcttttagatcatggtgcaggcatcaacactcattctaatgaattcaaagaaagtgctctaacacttgcttgctacaaaggccatttggatatggttcgctttctacttgaagctggtgcagatcaagagcacaaaacagatgagatgcacactgccttaatggaggcctgcatggatggacatgtagaggtggcacgtttgcttttggatagtggtgctcaagtgaacatgcctgcagattcatttgaatctccattgacgctagctgcctgtggaggacatgttgaattggcagctctacttattgaaaggggagcaaatcttgaagaagttaatgatgaaggatacactcccttgatggaagctgcccgggaaggacatgaagaaatggtggcactactcttagcacaaggagcaaatataaatgcccagacagaagaaactcaagaaactgctcttactttggcttgctgtggaggattttctgaagttgcagactttcttattaaggcaggggctgatatagaacttggctgctccacacctctgatggaggcatctcaggagggacacctggaattggttaaatatttgctggcttctggcgctaatgtgcatgctacaacagcaacaggagacacagccttaacctatgcttgtgaaaatggacatacggatgttgcagatgttttacttcaagcaggggctgatttagacaagcaggaggacatgaagactattttggagggcatagatccggccaagcatcaggtgagggtggcctttgatgcttgtaagctactacgtaaagaatagatgttgtaggtaaccagaactctggatatctgaattccagccaagaagttccaggaccctgctgggtgacaaaggaaatcctcttcaattgaaaaagattatgaagtcccaataaaaagagatttgtattgctggtagtttgtttccttagtcttctttctcagtgatattcctaaaaaaatctcttaggtgaaaatagattttcttattcaggtagttcttttacattctcctttattgggagagttagtataccgcagagagaaagtctcagtaataaagtcctttgcattcaactttgttcatcaaaaatctgaaactcagagtgatattaatatattggattgtt

SEQ ID NO: 375002 - DNA, 2189 bp, Homo sapiens
gagaagttagtggcgctgctgggacgggggaaaggagacgcttcttcctcttgctgctcttctcgttcccgagatcagcggcggcggtgaccgcgagtgggtcggcaccgtctccggctccgggtgcgaacaatgctgactgatagcggaggcggcggcacctcctttgaggaggacctggactctgtggctccgcgatccgccccagctggggcctcggagccgcctccgccgggaggggtcggtctggggatccgcaccgtgaggctctttggggaggccgggccagcgtcgggagtcggcagcagcggcggcggcggcagcggcagcggtacgggcggaggggacgcggcgctggatttcaagttggcggctgccgtgctgaggaccgggggtggaggtggtgcctctggcagtgacgaggacgaagtgtccgaggttgaatcatttattttggaccaagaagatctggataacccagtgcttaaaacaacatcagagatattcttatcaagtactgcagaaggagcagacttacgcactgtggatccagagacacaggcacgactagaagcattgctagaagcagcaggaattggcaaattgtcaactgctgatggtaaagcttttgcagatcctgaggtactccggagactgacatcctcagttagttgtgcactggatgaagctgctgctgcactgacacggatgaaagcagaaaacagccacaatgcaggacaagtggacactcgcagtctagcagaagcttgttcagatggggatgttaatgctgttcgtaaattgctagatgaaggcagaagtgtaaatgaacatacagaagaaggagaaagcctgctgtgtttggcttgttcagcagggtattatgaattagcacaagtattgcttgctatgcatgctaatgttgaagatcgagggaataaaggagacataactcccctgatggcagcttccagtggaggttacttagatattgtgaaattattacttcttcatgatgctgatgtcaactcccagtctgcaacaggaaacactgcgctaacttatgcatgtgctggaggatttgttgacattattaaagtgctccttaatgaaggtgcaaatatagaagatcataatgaaaatggacatactcccttaatggaagcagccagtgcaggtcatgtggaagttgcaagagttcttttagatcatggtgcaggcatcaacactcattctaatgaattcaaagaaagtgctctaacacttgcttgctacaaaggccatttggatatggttcgctttctacttgaagctggtgcagatcaagagcacaaaacagatgagatgcacactgccttaatggaggcctgcatggatggacatgtagaggtggcacgtttgcttttggatagtggtgctcaagtgaacatgcctgcagattcatttgaatctccattgacgctagctgcctgtggaggacatgttgaattggcagctctacttattgaaaggggagcaaatcttgaagaagttaatgatgaaggatacactcccttgatggaagctgcccgggaaggacatgaagaaatggtggcactactcttagcacaaggagcaaatataaatgcccagacagaagaaactcaagaaactgctcttactttggcttgctgtggaggattttctgaagttgcagactttcttattaaggcaggggctgatatagaacttggctgctccacacctctgatggaggcatctcaggagggacacctggaattggttaaatatttgctggcttctggcgctaatgtgcatgctacaacagcaacaggagacacagccttaacctatgcttgtgaaaatggacatacggatgttgcagatgttttacttcaagcaggggctgatttagaacatgaatctgaaggtggaagaacacctttgatgaaagctgcaagagctggtcatttgtgcactgtgcagtttcttattagcaaaggtgccaatgttaacagggctacagccaataatgatcatacagtagtgtcgctggcatgtgcaggaggccacctggcagttgttgagcttctcttggctcatggggctgaccctactcatcgactcaaggatggttcaacaatgctcattgaagctgcaaagggtggccatactaatgtagtttctta

SEQ ID NO: 375003 - DNA, 1445 bp, Homo sapiens
gagcgatctagaggatcccctgatgcaggacaagtggacactcgcagtctagcagaagcttgttcagatggggatgttaatgctgttcgtaaattgctagatgaaggcagaagtgtaaatgaacatacagaagaaggagaaagcctgctgtgtttggcttgttcagcagggtattatgaattagcacaagtattgcttgctatgcatgctaatgttgaagatcgagggaataaaggagacataactcccctgatggcagcttccagtggaggttacttagatattgtgaaattattacttcttcatgatgctgatgtcaactcccagtctgcaacaggaaacactgcgctaacttatgcatgtgctggaggatttgttgacattattaaagtgctccttaatgaaggtgcaaatatagaagatcataatgaaaatggacatactcccttaatggaagcagccagtgcaggtcatgtggaagttgcaagagttcttttagatcatggtgcaggcatcaacactcattctaatgaattcaaagaaagtgctctaacacttgcttgctacaaaggccatttggatatggttcgctttctacttgaagctggtgcagatcaagagcacaaaacagatgagatgcacactgccttaatggaggcctgcatggatggacatgtagaggtggcacgtttgcttttggatagtggtgctcaagtgaacatgcctgcagattcatttgaatctccattgacgctagctgcctgtggaggacatgttgaattggcagctctacttattgaaaggggagcaaatcttgaagaagttaatgatgaaggatacactcccttgatggaagctgcccgggaaggacatgaagaaatggtggcactactcttagcacaaggagcaaatataaatgcccagacagaagaaactcaagaaactgctcttactttggcttgctgtggaggattttctgaagttgcagactttcttattaaggcaggggctgatatagaacttggctgctccacacctctgatggaggcatctcaggagggacacctggaattggttaaatatttgctggcttctggcgctaatgtgcatgctacaacagcaacaggagacacagccttaacctatgcttgtgaaaatggacatacggatgttgcagatgttttacttcaagcaggggctgatttagacaagcaggaggacatgaagactattttggagggcatagatccggccaagcatcaggtgagggtggcctttgatgcttgtaagctactacgtaaagaatagatgttgtaggtaaccagaactctggatatctgaattccagccaagaagttccaggaccctgctgggtgacaaaggaaatcctcttcaattgaaaaagattatgaagtcccaataaaaagagatttgtattgctggta

SEQ ID NO: 375004 - DNA, 300 bp, Homo sapiens
cggcagcggtacgggcggaggggacgcggcgctggatttcaagttggcggctgccgtgctgaggaccgggggtggaggtggtgcctctggcagtgacgaggacgaagtgtccgaggtaaggctccgggaccctcgcctcccacacattgtgaggcgtgaattctctttgggtaggctctgggccggggccatcctcccgcttccctggtggagcccttctgtgacagcggtcggctccatggcggcggtggccgcggtgagggcctagtgagccctcggcttactctttagctcgagcgg

SEQ ID NO: 375005 - DNA, 729 bp, Homo sapiens
atctaatacaattttacagttcacaaagtaaatgtatgcttttttgtttgctaggcgctaatgtgcatgctacaacagcaacaggagacacagccttaacctatgcttgtgaaaatggacatacggatgttgcagatgttttacttcaagcaggggctgatttagtaagatatttttaatttcaaatatttttgcgttaatgttaatatccatttatacttaacatttagaaaacactaaagatcaatggtttgcgtactttgtatacagtaacttaaaaaagcttggctacctgttctagttgttgtatgtattaaatgtatttgaaaatacttagtgttgaacagggcatactgtttcttttcctaggtaaaactactagtttgtttcttcctttcactccacccccatttgacattcctgtgctttttaaactgccatctgttagatatatcataaattcaatgatgtgttcacagaatagagtaacaagtcaagtcactttgagtgatttattattattttaattgacacatgataattgaacatattaatggggtacagagtgatatttcaatacatgtatataatgtgtaattatcaaatcagagtaattagtacatccatcatcattttgaatgatttctgttgtttctctgattagacatttcaaaacaaagctactattgttaatcatccttctagtacattcctacaaattctattctt

SEQ ID NO: 375006 - DNA, 2114 bp, Homo sapiens
gagaagttagtggcgctgctgggacgggggaaaggagacgcttcttcctcttgctgctcttctcgttcccgagatcagcggcggcggtgaccgcgagtgggtcggcaccgtctccggctccgggtgcgaacaatgctgactgatagcggaggcggcggcacctcctttgaggaggacctggactctgtggctccgcgatccgccccagctggggcctcggagccgcctccgccgggaggggtcggtctggggatccgcaccgtgaggctctttggggaggccgggccagcgtcgggagtcggcagcagcggcggcggcggcagcggcagcggtacgggcggaggggacgcggcgctggatttcaagttggcggctgccgtgctgaggaccgggggtggaggtggtgcctctggcagtgacgaggacgaagtgtccgaggttgaatcatttattttggaccaagaagatctggataacccagtgcttaaaacaacatcagagatattcttatcaagtactgcagaaggagcagacttacgcactgtggatccagagacacaggcacgactagaagcattgctagaagcagcagcagatcctgaggtactccggagactgacatcctcagttagttgtgcactggatgaagctgctgctgcactgacacggatgaaagcagaaaacagccacaatgcaggacaagtggacactcgcagtctagcagaagcttgttcagatggggatgttaatgctgttcgtaaattgctagatgaaggcagaagtgtaaatgaacatacagaagaaggagaaagcctgctgtgtttggcttgttcagcagggtattatgaattagcacaagtattgcttgctatgcatgctaatgttgaagatcgagggaataaaggagacataactcccctgatggcagcttccagtggaggttacttagatattgtgaaattattacttcttcatgatgctgatgtcaactcccagtctgcaacaggaaacactgcgctaacttatgcatgtgctggaggatttgttgacattattaaagtgctccttaatgaaggtgcaaatatagaagatcataatgaaaatggacatactcccttaatggaagcagccagtgcaggtcatgtggaagttgcaagagttcttttagatcatggtgcaggcatcaacactcattctaatgaattcaaagaaagtgctctaacacttgcttgctacaaaggccatttggatatggttcgctttctacttgaagctggtgcagatcaagagcacaaaacagatgagatgcacactgccttaatggaggcctgcatggatggacatgtagaggtggcacgtttgcttttggatagtggtgctcaagtgaacatgcctgcagattcatttgaatctccattgacgctagctgcctgtggaggacatgttgaattggcagctctacttattgaaaggggagcaaatcttgaagaagttaatgatgaaggatacactcccttgatggaagctgcccgggaaggacatgaagaaatggtggcactactcttagcacaaggagcaaatataaatgcccagacagaagaaactcaagaaactgctcttactttggcttgctgtggaggattttctgaagttgcagactttcttattaaggcaggggctgatatagaacttggctgctccacacctctgatggaggcatctcaggagggacacctggaattggttaaatatttgctggcttctggcgctaatgtgcatgctacaacagcaacaggagacacagccttaacctatgcttgtgaaaatggacatacggatgttgcagatgttttacttcaagcaggggctgatttagacaagcaggaggacatgaagactattttggagggcatagatccggccaagcatcaggtgagggtggcctttgatgcttgtaagctactacgtaaagaatagatgttgtaggtaaccagaactctggatatctgaattccagccaagaagttccaggaccctgctgggtgacaaaggaaatcctcttcaattgaaaaagattatgaagtcccaataaaaagagatttgtattgctggta

SEQ ID NO: 375007 - DNA, 794 bp, Homo sapiens
  misc_feature (786)..(786): n is a, c, g, or t
gagaagttagtggcgctgctgggacgggggaaaggagacgcttcttcctcttgctgctcttctcgttcccgagatcagcggcggcggtgaccgcgagtgggtcggcaccgtctccggctccgggtgcgaacaatgctgactgatagcggaggcggcggcacctcctttgaggaggacctggactctgtggctccgcgatccgccccagctggggcctcggagccgcctccgccgggaggggtcggtctggggatccgcaccgtgaggctctttggggaggccgggccagcgtcgggagtcggcagcagcggcggcggcggcagcggcagcggtacgggcggaggggacgcggcgctggatttcaagttggcggctgccgtgctgaggaccgggggtggaggtggtgcctctggcagtgacgaggacgaagtgtccgaggttgaatcatttattttggaccaagaagatctggataacccagtgcttaaaacaacatcagagatattcttatcaagtactgcagaaggagcagacttacgcactgtggatccagagacacaggcacgactagaagcattgctagaagcagcaggaattggcaaattgtcaactgctgatggtaaagcttttgcagatcctgaggtactccggagactgacatcctcagttagttgtgcactggatgaagctgctgctgcactgacacggatgaaagcagaaaacagccacaatgcaggacaagtggacacgcgcaggcgagcagaagcgggggcagagggggagggnaaggcggg

SEQ ID NO: 375008 - DNA, 2187 bp, Homo sapiens
gagaagttagtggcgctgctgggacgggggaaaggagacgcttcttcctcttgctgctcttctcgttcccgagatcagcggcggcggtgaccgcgagtgggtcggcaccgtctccggctccgggtgcgaacaatgctgactgatagcggaggcggcggcacctcctttgaggaggacctggactctgtggctccgcgatccgccccagctggggcctcggagccgcctccgccgggaggggtcggtctggggatccgcaccgtgaggctctttggggaggccgggccagcgtcgggagtcggcagcagcggcggcggcggcagcggcagcggtacgggcggaggggacgcggcgctggatttcaagttggcggctgccgtgctgaggaccgggggtggaggtggtgcctctggcagtgacgaggacgaagtgtccgagtgtgcctctggcagtgacgaggacgaagtgtccggttgaatcatttattttggaccaagaagatctggataacccagtgcttaaaacaacatcagagatattcttatcaagtactgcagaaggagcagacttacgcactgtggatccagagacacaggcacgactagaagcattgctagaagcagcaggaattggcaaattgtcaactgctgatggtaaagcttttgcagatcctgaggtactccggagactgacatcctcagttagttgtgcactggatgaagctgctgctgcactgacacggatgaaagcagaaaacagccacaatgcaggacaagtggacactcgcagtctagcagaagcttgttcagatggggatgttaatgctgttcgtaaattgctagatgaaggcagaagtgtaaatgaacatacagaagaaggagaaagcctgctgtgtttggcttgttcagcagggtattatgaattagcacaagtattgcttgctatgcatgctaatgttgaagatcgagggaataaaggagacataactcccctgatggcagcttccagtggaggttacttagatattgtgaaattattacttcttcatgatgctgatgtcaactcccagtctgcaacaggaaacactgcgctaacttatgcatgtgctggaggatttgttgacattattaaagtgctccttaatgaaggtgcaaatatagaagatcataatgaaaatggacatactcccttaatggaagcagccagtgcaggtcatgtggaagttgcaagagttcttttagatcatggtgcaggcatcaacactcattctaatgaattcaaagaaagtgctctaacacttgcttgctacaaaggccatttggatatggttcgctttctacttgaagctggtgcagatcaagagcacaaaacagatgagatgcacactgccttaatggaggcctgcatggatggacatgtagaggtggcacgtttgcttttggatagtggtgctcaagtgaacatgcctgcagattcatttgaatctccattgacgctagctgcctgtggaggacatgttgaattggcagctctacttattgaaaggggagcaaatcttgaagaagttaatgatgaaggatacactcccttgatggaagctgcccgggaaggacatgaagaaatggtggcactactcttagcacaaggagcaaatataaatgcccagacagaagaaactcaagaaactgctcttactttggcttgctgtggaggattttctgaagttgcagactttcttattaaggcaggggctgatatagaacttggctgctccacacctctgatggaggcatctcaggagggacacctggaattggttaaatatttgctggcttctggcgctaatgtgcatgctacaacagcaacaggagacacagccttaacctatgcttgtgaaaatggacatacggatgttgcagatgttttacttcaagcaggggctgatttagacaagcaggaggacatgaagactattttggagggcatagatccggccaagcatcaggtgagggtggcctttgatgcttgtaagctactacgtaaagaatagatgttgtaggtaaccagaactctggatatctgaattccagccaagaagttccaggaccctgctgggtgacaaaggaaatcctcttcaattgaaaaagattatgaagtcccaataaaaagagatttgtattgctggta

SEQ ID NO: 375009 - DNA, 1245 bp, Homo sapiens
gagaagttagtggcgctgctgggacgggggaaaggagacgcttcttcctcttgctgctcttctcgttcccgagatcagcggcggcggtgaccgcgagtgggtcggcaccgtctccggctccgggtgcgaacaatgctgactgatagcggaggcggcggcacctcctttgaggaggacctggactctgtggctccgcgatccgccccagctggggcctcggagccgcctccgccgggaggggtcggtctggggatccgcaccgtgaggctctttggggaggccgggccagcgtcgggagtcggcagcagcggcggcggcggcagcggcagcggtacgggcggaggggacgcggcgctggatttcaagttggcggctgccgtgctgaggaccgggggtggaggtggtgcctctggcagtgacgaggacgaagtgtccgaggttgaatcatttattttggaccaagaagatctggataacccagtgcttaaaacaacatcagagatattcttatcaagtactgcagaaggagcagacttacgcactgtggatccagagacacaggcacgactagaagcattgctagaagcagcaggaattggcaaattgtcaactgctgatggtaaagcttttgcagatcctgaggtactccggagactgacatcctcagttagttgtgcactggatgaagctgctgctgcactgacacggatgaaagcagaaaacagccacaatgcaggacaagtggacactcgcagtctagcagaagcttgttcagatggggatgttaatgctgttcgtaaattgctagatgaaggcagaagtgtaaatgaacatacagaagaaggagaaagcctgctgtgtttggcttgttcagcagggtattatgaattagcacaagtattgcttgctatgcatgctaatgttgaagatcgagggaataaaggagacataactcccctgatggcagcttccagtggaggttacttagatattgtgaaattattacttcttcatgatgctgatgtcaactcccagtctgcaacaggaaacactgcgctaacttatgcatgtgctggaggatttgttgacattattaaagtgctccttaatgaaggtgcaaatatagaagatcataatgaaaatggacatactcccttaatggaagcagccagtgcaggtcatgtggaagttgcaagagttcttttagatcatggtgcaggcatcagccgttgcaggaccggctac

SEQ ID NO: 375010 - DNA, 963 bp, Homo sapiens
caatattgatgaacttttgataaggctcagatgagcatgataatatatatgctgtctatgctgaatcttctaatcttgtcttttttcttcctttttccaatctcttgctttcttctctcccacttaaaaaaatctcaaaacaaaaaatttctctccttctttctttacttctgaaaatctgcaggatggacatgtagaggtggcacgtttgcttttggatagtggtgctcaagtgaacatgcctgcagattcatttgaatctccattgacgctagctgcctgtggaggacatgttgaattggcagctctacttattgaaaggggagcaaatcttgaagaagttaatgatgaaggatacactcccttgatggaagctgcccgggaaggacatgaagaaatggtggcactactcttagcacaaggagcaaatataaatgcccagacagaagaaactcaagaaactgctcttactttggcttgctgtggaggattttctgaagttgcagactttcttattaaggcaggggctgatatagaacttggctgctccacacctctgatggaggcatctcaggagggacacctggaattggttaaatatttgctggcttctggcgctaatgtgcatgctacaacagcaacaggagacacagccttaacctatgcttgtgaaaatggacatacggatgttgcagatgttttacttcaagcaggggctgatttagacaagcaggaggacatgaagactattttggagggcatagatccggccaagcatcaggtgagggtggcctttgatgcttgtaagctactacgtaaagaatagatgttgtaggtaaccagaactctggatatctgaattccagccaagaagttccaggaccctgctgggtgacaaaggaaatcctcttcaattgaaaaagattatgaagtcccaataaaaagagatttgtattgctggta

SEQ ID NO: 375011 - DNA, 1809 bp, Homo sapiens
tagcagagcaatcaccaccaagcctggaataactgcaagggctctgctgacatcttcctgaggtgccaaggaaatgaggatggaggaaggaatgaatgttctccatgactttgggatccagtcaacacattacctccaggtgaattaccaagactcccaggactggttcatcttggtgtccgtgatcgcagacctcaggaatgccttctacgtcctcttccccatctggttccatcttcaggaagctgtgggcattaaactcctttgggtagctgtgattggagactggctcaacctcgtctttaagtggattctctttggacagcgtccatactggtgggttttggatactgactactacagcaacacttccgtgcccctgataaagcagttccctgtaacctgtgagactggaccagggagcccctctggccatgccatgggcacagcaggtgtatactacgtgatggtcacatctactctttccatctttcagggaaagataaagccgacctacagatttcggtgcttgaatgtcattttgtggttgggattctgggctgtgcagctgaatgtctgtctgtcacgaatctaccttgctgctcattttcctcatcaagttgttgctggagtcctgtcaggcattgctgttacagaaactttcagccacatccacagcatctataatgccagcctcaagaaatattttctcattaccttcttcctgttcagcttcgccatcggattttatctgctgctcaagggactgggtgtagacctcctgtggactctggagaaagcccagaggtggtgcgagcagccagaatgggtccacattgacaccacaccctttgccagcctcctcaagaacctgggcacgctctttggcctggggctggctctcaactccagcatgtacagggagagctgcaaggggaaactcagcaagtggctcccattccgcctcagctctattgtagcctccctcgtcctcctgcacgtctttgactccttgaaacccccatcccaagtcgagctggtcttctacgtcttgtccttctgcaagagtgcggtagtgcccctggcatccgtcagtgtcatcccctactgcctcgcccaggtcctgggccagccgcacaagaagtcgttgtaagagatgtggagtcttcggtgtttaaagtcaacaaccatgccagggattgaggaggactactatttgaagcaatgggcactggtatttggagcaagtgacatgccatccattctgccgtcgtggaattaaatcacggatggcagattggagggtcgcctggcttattcccatgtgtgactccagcctgccctcagcacagactctttcagatggaggtgccatatcacgtacaccatatgcaagtttcccgccaggaggtcctcctctctctacttgaatactctcacaagtagggagctcactcccactggaacagcccattttatctttgaatggtcttctgccagcccattttgaggccagaggtgctgtcagctcaggtggtcctcttttacaatcctaatcatattgggtaatgtttttgaaaagctaatgaagctattgagaaagactaatatgccttgggtgcgactgggcgtgctcggagctcgcagacgctcggaggcatggcggctgcggagccggcggtccttgcgctccccacagcggcgccgtgggcgcggaggcgccgtcgggcacagtccctgtgctcttctggttctcagtcttcgcgcgaccctcgtcggtgccacacggggcgggctacgagctgctcc

SEQ ID NO: 375012 - DNA, 1754 bp, Homo sapiens
tagcagagcaatcaccaccaagcctggaataactgcaagggctctgctgacatcttcctgaggtgccaaggaaatgaggatggaggaaggaatgaatgttctccatgactttgggatccagtcaacacattacctccaggtgaattaccaagactcccaggactggttcatcttggtgtccgtgatcgcagacctcaggaatgccttctacgtcctcttccccatctggttccatcttcaggaagctgtgggcattaaactcctttgggtagctgtgattggagactggctcaacctcgtctttaagtggattctctttggacagcgtccatactggtgggttttggatactgactactacagcaacacttccgtgcccctgataaagcagttccctgtaacctgtgagactggaccagggagcccctctggccatgccatgggcacagcaggtgtatactacgtgatggtcacatctactctttccatctttcagggaaagataaagccgacctacagatttcgccacctaccccccaaaaaaagctgaagcctatttatttgaaagtccttgtttttgctactaattatatagtataccatacattatcattcaaaacaaccatcctgctcataacatctttgaaaagaaaaatatatatgtgcagtattttattaaagcaacattttatttaagaataaagtcttgttaattactatattttagatgcaatgtgatctgaagtttctaattctggcccaactaaatttctagctctgtttccctaaacaaataatttggtttctctgtgcctgcattttccctttggagaaggtgctctctcttgagttgaccgagagtcccattagggatagggagacttaaatgcatccacaggggcacaggcagagttgagcacataaacggaggcccaccagaccacaagtcagcatgagttgctctatggcatcaaattgcaacttgagagtagatgggcagggtcactatcaaattaagcaatcagggcacacaagttgcagtaacacaacaagactaggccagctctggaatccagtaactcagtgtcagcaaggttttgggttatagttcaagaaagtctaaacagagccagtcacagcaccaaggaatgctcaagggagctattgcaggtttctctgctaagagatttatttcatcctgggtgcagggttcgacctccaaaggcctcaaatcatcaccgtatcaatggatttcctgagggtaagctccgctatttcacacctgaactccggagtctgtatattcagggaagattgcattcttctactggatttgggctctcagagggcgttgtgggaaccaggcccctcacagaatcaaatggtcccaaccagggagaaagaaaatagtcttttttttttttttaatagagatgggggtctcactatgctgcccaggctggtcttgaactcctgggttcaagtgatcctcctgcctcagcctcccaaagtgctgggattacagtgtgagccactgcgcttggccagaaatggttttgatctgtctgaactgaaccctactgcttaggcatagccccatccttgataatctatttgctcccaaggaccaagtccaagatccttacaagaaaggtctgccagaaagtaaatactgcccccactccctgaagtttatgaggatgataagaaaacataacagataaagacaaacccccgctaactttatgccagat

SEQ ID NO: 375013 - DNA, 1471 bp, Homo sapiens
atgtttgctttcatcataacagcttgttatcaaggatgaatttctccctgaaattaatggaggcacagactggaaagtttaaagtggctttaagaggttattttatttagtcctctgtcttaatagaagcaaattattatctctgctcccaaggtgctaggattacaggcatgagccaccgcaccgggccctccttgcctgtttttcaatctcatctgatatgcagagtatttctgccccacccacctaccccccaaaaaaagctgaagcctatttatttgaaagtccttgtttttgctactaattatatagtataccatacattatcattcaaaacaaccatcctgctcataacatctttgaaaagaaaaatatatatgtgcagtattttattaaagcaacattttatttaagaataaagtcttgttaattactatattttagatgcaatgtgatctgaagtttctaattctggcccaactaaatttctagctctgtttccctaaacaaataatttggtttctctgtgcctgcattttccctttggagaaggtgctctctcttgagttgaccgagagtcccattagggatagggagacttaaatgcatccacaggggcacaggcagagttgagcacataaacggaggcccaccagaccacaagtcagcatgagttgctctatggcatcaaattgcaacttgagagtagatgggcagggtcactatcaaattaagcaatcagggcacacaagttgcagtaacacaacaagactaggccagctctggaatccagtaactcagtgtcagcaaggttttgggttatagttcaagaaagtctaaacagagccagtcacagcaccaaggaatgctcaagggagctattgcaggtttctctgctaagagatttatttcatcctgggtgcagggttcgacctccaaaggcctcaaatcatcaccgtatcaatggatttcctgagggtaagctccgctatttcacacctgaactccggagtctgtatattcagggaagattgcattcttctactggatttgggctctcagagggcgttgtgggaaccaggcccctcacagaatcaaatggtcccaaccagggagaaagaaaatagtcttttttttttttttaatagagatgggggtctcactatgctgcccaggctggtcttgaactcctgggttcaagtgatcctcctgcctcagcctcccaaagtgctgggattacagtgtgagccactgcgcttggccagaaatggttttgatctgtctgaactgaaccctactgcttaggcatagccccatccttgataatctatttgctcccaaggaccaagtccaagatccttacaagaaaggtctgccagaaagtaaatactgcccccactccctgaagtttatgaggatgataagaaaacataacagataaagacaaacccccgctaactttatgccagat

SEQ ID NO: 375014 - DNA, 635 bp, Homo sapiens
tgcaatgtgatctgaagtttctaattctggcccaactaaatttctagctctgtttccctaaacaaataatttggtttctctgtgcctgcattttccctttggagaaggtgctctctcttgagttgaccgagagtcccattagggatagggagacttaaatgcatccacaggggcacaggcagagttgagcacataaacggaggcccacaatcagcatagaaccagaaagattcagagttggccaagaatgaacattggctaccagaccacaagtcagcatgagttgctctatggcatcaaattgcaacttgagagtagatgggcagggtcactatcaaattaagcaatcagggcacacaagttgcagtaacacaacaagactaggccagctctggaatccagtaactcagtgtcagcaaggttttgggttatagttcaagaaagtctaaacagagccagtcacagcaccaaggaatgctcaagggagctattgcaggtttctctgctaagagatttatttcatcctgggtgcagggttcgacctccaaaggcctcaaatcatcaccgtatcaatggatttcctgagggtaagctccgctatttcacacctgaactccggagtctgtatattcagg

SEQ ID NO: 375015 - DNA, 4110 bp, Homo sapiens
tagcagagcaatcaccaccaagcctggaataactgcaagggctctgctgacatcttcctgaggtgccaaggaaatgaggatggaggaaggaatgaatgttctccatgactttgggatccagtcaacacattacctccaggtgaattaccaagactcccaggactggttcatcttggtgtccgtgatcgcagacctcaggaatgccttctacgtcctcttccccatctggttccatcttcaggaagctgtgggcattaaactcctttgggtagctgtgattggagactggctcaacctcgtctttaagtggattctctttggacagcgtccatactggtgggttttggatactgactactacagcaacacttccgtgcccctgataaagcagttccctgtaacctgtgagactggaccagggagcccctctggccatgccatgggcacagcaggtgtatactacgtgatggtcacatctactctttccatctttcagggaaagataaagccgacctacagatttcggtgcttgaatgtcattttgtggttgggattctgggctgtgcagctgaatgtctgtctgtcacgaatctaccttgctgctcattttcctcatcaagttgttgctggagtcctgtcaggcattgctgttacagaaactttcagccacatccacagcatctataatgccagcctcaagaaatattttctcattaccttcttcctgttcagcttcgccatcggattttatctgctgctcaagggactgggtgtagacctcctgtggactctggagaaagcccagaggtggtgcgagcagccagaatgggtccacattgacaccacaccctttgccagcctcctcaagaacctgggcacgctctttggcctggggctggctctcaactccagcatgtacagggagagctgcaaggggaaactcagcaagtggctcccattccgcctcagctctattgtagcctccctcgtcctcctgcacgtctttgactccttgaaacccccatcccaagtcgagctggtcttctacgtcttgtccttctgcaagagtgcggtagtgcccctggcatccgtcagtgtcatcccctactgcctcgcccaggtcctgggccagccgcacaagaagtcgttgtaagagatgtggagtcttcggtgtttaaagtcaacaaccatgccagggattgaggaggactactatttgaagcaatgggcactggtatttggagcaagtgacatgccatccattctgccgtcgtggaattaaatcacggatggcagattggagggtcgcctggcttattcccatgtgtgactccagcctgccctcagcacagactctttcagatggaggtgccatatcacgtacaccatatgcaagtttcccgccaggaggtcctcctctctctacttgaatactctcacaagtagggagctcactcccactggaacagcccattttatctttgaatggtcttctgccagcccattttgaggccagaggtgctgtcagctcaggtggtcctcttttacaatcctaatcatattgggtaatgtttttgaaaagctaatgaagctattgagaaagacctgttgctagaagttgggttgttctggattttcccctgaagacttacttattcttccgtcacatatacaaaagcaagacttccaggtagggccagctcacaagcccaggctggagatcctaactgagaattttctacctgtgttcattcttaccgagaaaaggagaaaggagctctgaatctgataggaaaagaaggctgcctaaggaggagtttttagtatgtggcgtatcatgcaagtgctatgccaagccatgtctaaatggctttaattatatagtaatgcactctcagtaatgggggaccagcttaagtataattaatagatggttagtggggtaattctgcttctagtattttttttactgtgcatacatgttcatcgtatttccttggatttctgaatggctgcagtgacccagatattgcactaggtcaaaacattcaggtatagctgacatctcctctatcacattacatcatcctccttataagcccagctctgctttttccagattcttccactggctccacatccaccccactggatcttcagaaggctagagggcgactctggtggtgcttttgtatgtttcaattaggctctgaaatcttgggcaaaatgacaaggggagggccaggattcctctctcaggtcactccagtgttacttttaattcctagagggtaaatatgactcctttctctatcccaagccaaccaagagcacattcttaaaggaaaagtcaacatcttctctctttttttttttttttgagacagggtctcactatgttgcccaggctgctcttgaattcctgggctcaagcagtcctcccaccctaccacagcgtcccgcgtagctggcactacaggtgcaagccactatgtccagctagccaactcctccttgcctgcttttctttttttttctttttttgagacggcgcacctatcacccaggctggagtggagtggcacgatcttggctcactgcaacctcttcctcctggttcaagcgattctcatgtctcagcctcctcagtagctaggactaccggcgtgcaccaccatgccaggctaatttttatatttttagaattttagaagagatgggatttcatcatgttggccaggctggtctcgaactcctgacctcaagtgatccacctgccttggcctcccaaggtgctaggattacaggcatgagccaccgcaccgggccctccttgcctgtttttcaatctcatctgatatgcagagtatttctgccccacccacctaccccccaaaaaaagctgaagcctatttatttgaaagtccttgtttttgctactaattatatagtataccatacattatcattcaaaacaaccatcctgctcataacatctttgaaaagaaaaatatatatgtgcagtattttattaaagcaacattttatttaagaataaagtcttgttaattactatattttagatgcaatgtgatctgaagtttctaattctggcccaactaaatttctagctctgtttccctaaacaaataatttggtttctctgtgcctgcattttccctttggagaaggtgctctctcttgagttgaccgagagtcccattagggatagggagacttaaatgcatccacaggggcacaggcagagttgagcacataaacggaggcccaccagaccacaagtcagcatgagttgctctatggcatcaaattgcaacttgagagtagatgggcagggtcactatcaaattaagcaatcagggcacacaagttgcagtaacacaacaagactaggccagctctggaatccagtaactcagtgtcagcaaggttttgggttatagttcaagaaagtctaaacagagccagtcacagcaccaaggaatgctcaagggagctattgcaggtttctctgctaagagatttatttcatcctgggtgcagggttcgacctccaaaggcctcaaatcatcaccgtatcaatggatttcctgagggtaagctccgctatttcacacctgaactccggagtctgtatattcagggaagattgcattcttctactggatttgggctctcagagggcgttgtgggaaccaggcccctcacagaatcaaatggtcccaaccagggagaaagaaaatagtcttttttttttttttaatagagatgggggtctcactatgctgcccaggctggtcttgaactcctgggttcaagtgatcctcctgcctcagcctcccaaagtgctgggattacagtgtgagccactgcgcttggccagaaatggttttgatctgtctgaactgaaccctactgcttaggcatagccccatccttgataatctatttgctcccaaggaccaagtccaagatccttacaagaaaggtctgccagaaagtaaatactgcccccactccctgaagtttatgaggatgataagaaaacataacagataaagacaaacccccgctaactttatgccagat

SEQ ID NO: 375016 - DNA, 195 bp, Homo sapiens
tgggggcactgcttgcttgtaatgcataacttgacgggagacagacatgtgagaagagaactgtgatcccaaatgataagtggatgccaagcattcttgagaggaaggaggtgggcatggaatattagaagtagcttcatagtggccaggtgcggtggagcatgcctataatgccagcactttgggaggccgagg

SEQ ID NO: 375017 - DNA, 167 bp, Homo sapiens
gaacaagagaagcctggttcttcggctctttcttgcccttctaataaataccttctctgattaaggcagctgcagtcaatgccttttttttgcaaccaaccctcaacccctgacagatgtatcttttaattgcattaattcatcctacaggtttttgctaacagcag

SEQ ID NO: 375018 - DNA, 441 bp, Homo sapiens
ttttaatttttccctaattctgtaattggtattccggttgctcgtgggagccggaagtctggaattcagataactaaggtgtttctgtagttgtctgaattgttaggcatttgtaaaatataaaacagaaacttgttcaagcacaaccacatgctccaaacctaaatatgccagagagattttcgcaatagtcatctcttgtgttaagagtcactccattacaggaaaaagattcagaacgatttccatacaagaatcctcgtttttgtagggaagtttcccaagagccagggccagctgtgctccattattaggttaatgcttgatttgtaccttatttttatttttcatttctgaattgaaataaaagttatgtaacctaaattaagacttggcatagcttgcagtccaattcctaccctcatatgagatgcaaggttt

SEQ ID NO: 375019 - DNA, 387 bp, Homo sapiens
tagatggacatatccttatatcacttagtagaaatggaagttcggaattaggaaatttgcccagcatcacatggctcattatgtctacaagatatatgcagtgttgtcaagatgtcagttcttcccatcttgatctataggtttatccctacttaatttgtaggttcaatgcattcccaatcaaaatccccgcaagttattttgtggatatcagcaaactgattataaagtttatatggagagacgggagacccagaatagccaacacaatattgaagaacaaagtcagagaactgacactacccagcttcaagacttactctgaaactacactaatccataaagtgtggtattggtgaaagtatagacagatcgatcaatgaatca

SEQ ID NO: 375020 - DNA, 437 bp, Homo sapiens
agtcgagcagacaggctccgtgagatgtctcatgaccagtaggcggtggagcatcagcgtttctattcttgccagtcagttgtcctgccgcactcttagcatggagccctttgctcttgtgaaaaaaaaatgagggattaaagttcagtcttttttggccaggcgcggtggctcacgcctgtaatcccagcactctgggaggctgaggcaggcagatcacgaggtcgggagatcaagaccatcctggctaacacggtgaaatcccgtctctactaaaaatgcaaaaaaattagccaggcgtggtggcgggcacgtgtagtcccagctactgggagtctgaggcaggaaaatggcgtgaacccaggaggcagagcttgcagtgagctgagatcacgccactgcactccagcctgggcgacagagcaagactccatctc

SEQ ID NO: 375021 - DNA, 485 bp, Homo sapiens
gttcgatacatccctagacgagatcctggaactgaaaagcagcagaagggggcgtccaaggcccaaaacaaaaggcaagccttgcccagaaaggcctagctggagaagccaggggacacatgtgggcctggccacgggctccgatcctggctccatgacccgcctggcaggggagtgggggacggtgagaacagcagagcagatctcaaggaggcatcgaacctcgatgctcactcgtctgctggccctgctcctcgtgggcctctcctgctcgtgtggacctctctgcctggccaaaatggtgaaaccacgtctttactaaaaaacacaaaaattagctgggcgtggtggcgggtgcccataatcccagctactcaggaggctgaggcagggagaattgcttgaacctgggaagcggaggttgcagtgagccgagattgcaccactgcactccagcctggcaacagagtgagactcagtctcag

SEQ ID NO: 375022 - DNA, 560 bp, Homo sapiens
gtttggagaggttttttttaccccctcttcctacctgccgaaaacctttcagacacactggagatagttaagcttccctgatttcttgtgtttccgggagcgttttaaggttaatagtgcgtgccacttacactagagcttcacagagaagcagtctctcgaggttggttacttgctgttggaatctgcagtctgcctttctgctgcacggatgcgaatttagaaggttttgcggtatgacggaggggaaggcgtagcatagcagagggcaaaactcagcagtatgactgggtcaagtctcgtaacccatgagcctagctcccttgtctctgaatggcattccggacaacagggtttgctgggtgcttgcggtgtatcggcacgcactaggcacttagccgggggcgggggagttgttctggtgagggagacatggatatgttcctgcctcatcaaagtgaagtcatttaacaggcatggtggccacccgcgcgcagctcagtgctgggccccagggacacagaaataaagagaacacagttcccattctccttcctgga

SEQ ID NO: 375023 - DNA, 295 bp, Homo sapiens
taacagaatagttgaagtgggaaaaccatttgagaagaccatatttactgtgactatcaattgtgtttccttagaaacaaacccctcagaggaagaaaaaaagtaacatttattactgtttagtaaatattaggtgacatatttaatgaaatcatcagtttgggtcaataattcataagaagaggttgagattagaaataaaagcattttcctttattcaaattttttatgtttactgttatatattagataaatcttagcaattttcacttttacgtaagcacaagatgtttag

SEQ ID NO: 375024 - DNA, 373 bp, Homo sapiens
ggaggctcgaatccacagctacaggaggacggggctcccactagctccatggagtgtgcagccccggtggcacctccctgctgctgctgacatgatggcatcagccactgccatcaacaggtgggatccagcaccttcccctggagagcaggcagtgctgcccaggaaggcatcctcctctttacctgaaagaatatttctgtaactgtgataaaacacacatgaaatacatatgaactttaccatcttagccgttgataaaacacacatgaaatacatatgaactttaccgtcttagctgttgataaaacacacatgaaatacatatgaactttaccatcttagccgttgatgaaacacatgaaatacatat

SEQ ID NO: 375025 - DNA, 414 bp, Homo sapiens
gcgaagggggtgatgttgaagactgctggagactaaactgtgtgtgttggaggaaagggggaaagctcagctctccctatttctcctccaactatttggtaagactcggtgatagaaaaacatctcctatacgaatggccttggtatgaacagccgcttgggatgacaggccactatcccactaccccttgagtctttctgagctgctcacctggtgccagagaactggcagataagtttctgcagctttgctcactgccatgaggggggctagacatcacactttgggtgaggggtaaacaaatccagagattgtagggcaacataagttaccaactggcagttgcacccatgactgtctttcctgaggcgctgagtagtgatttagccagatgacagaaatacctttcgagt

SEQ ID NO: 375026 - DNA, 331 bp, Homo sapiens
caccttcgagatagaataaatacagcacccttctctaccaagttaggaaaggaagaagtgttaccaattagttgtatggggactgccaaagcacgccattctgaagatgagcagaaactggctcattccatttggcacctagcacactaactgcaccagttaataggccacgcttttctccagagccattggctgaagagttcaaataaaaagtattgagaataggctatccaaaacagtaggctcagatgctatcacacaaagcactttatccttaagttcaatttttctaaattgtagttggctgctttggcttaataaaaaccttcca

SEQ ID NO: 375027 - DNA, 491 bp, Homo sapiens
cattttctattttagtcctgtgagatactaatttggatttcattgtgcccattgagcggcttttgttctttggctgtgagtttaattatttagttatttatgagtgcatctgggcataagtgccacagttttatttcggtgacaaatttatggtcagtgaattttagtaattaatgaataaattatttctcctccataaatgcccctgcaatttctgattttcataacaattcataatacttaagaaaaattctttattagttgaaaaagccaatgctaatggaatcaggaaaaggagatttcaaattgctttaattaactgtattaattagtatccaatatgtgtaagatattgaattggctttggttgtctctcttagcatttagttgcctaaaatctgtttaagatatgaatatactgtgttaaaataaattctaattcttttgtgaagtaaatggcaagaataaaaggatctcctttataatcttta

SEQ ID NO: 375028 - DNA, 1245 bp, Homo sapiens
gggagatggagagcagggtggaggcaggcggcttgcggcgcgcaagtctcctcttccccggccggctcccggctgcgagctctgccagctcagaatttgcaaagaatctgcggtttggccacccacggcagcttcagcttaaccaaagaatgagccccaggcaaagttacccccaggcaagaggcgatgggtggaggaggaggtacatgcagcgggcagccgggcccatagccagcctccttccgccgtgcagccccctccccaggggccagagccggccgaagactgggggtagggacggagtcgggggacgggatttttttccagagcaacaggtaggctggtgaggaggcctccggcccagggagaggcgctgagaaggctgcgggtgaacgggagggtcgagggcacacgtgagtgacagcaccttgcactgaaggggacagggcttcctcgagctctgccctgtcccctccacctgtccggagttcggcccgggagcaccccaccccgcagagggcgccactcccggcttcctggagacgcaggaagccctgggggcgcagccatcccacagcgcggccgaggtgggactgggggtcccgcagcgaccgcttttctttggtgggtctgcacgcacctatccgggcaggcggggaaaggggccgggcggccacctatctcctgaggcccgcaaagaccgcccgctctcctccaggtctggccagctactaagacgatcctccgcccgaggctgacggaagtgcttcgccgaggcccgcgccatgctctcctcctcagaaagcgtgaaagaaaaccctaacccaaagcatgagggagtggggattgagcggccgctggcccgcccccgaaggccattgattggaggagactggacacagcgccggaagttttccttgagtcacatgattggctgggagaaacagaagctccgcccgaccgcagcgcagattggtgccaggcccggccggtcccccagtctcgtgattggcggggcacagcagacgcccctgggctgcagcatgattggtcgcgggttgctggtcctgggtcccgggccggagccccggtgcccgatagatgggccggaagggtcgcggcgaggcccggctcagttgccccggtagacttcgatcttgctggccttggccagcatgtcgatgatgtgggcctcgaagtccgcgtcgtgcacgccagtcttccggaactcgcccgcgtaccggt

SEQ ID NO: 375029 - DNA, 425 bp, Homo sapiens
gaaaagaaattgtctctaggtgggattatgggatttgtttgaatcattcttttgcatgtttctattttctgacgtttctgtaagagtatcagttgcttttggcacaagataaaaacaaagaataaaagaaaggataaggccaggtgcagtggcttatgcctgtaatcccaggactttgggaggccaaggcaggtggatcatttgaggtcaggagttcaagaccagcctgggcacagggacatggtgagaccctgtctctactaaatatacaaaaattagtcaggcctggtggctcatgcctgtaatcctagctacttgggaggctgaggcaggagaatcgcttgaacccaagaggtgaaagttgcagtgagctgagatcacaccactgcactctagcctggacaacagagagagactctgtctca

SEQ ID NO: 375030 - DNA, 374 bp, Homo sapiens
caatgtctctttggaggcagacctttatttggagaagaacataaataacttaaagccagatatggaaagtctctgtttgttcatttttaaattagccatatcccttctctacattgcaaggttgggtaatgtttgctcattaactctgtatctgcttgcagagcttgtcagtcaatttcatgtagttgtcagctcgcaggcagggctccctgccagccacaacagagtcccatttaccctcaatgcagcagacctatggtactccactgcaggtactctgggaactgacagtggactgacagcaaatgtctggcatggtagaagtagagtgggcacttacagagtctgggcttgagagggaaaagatggtttag

SEQ ID NO: 375031 - DNA, 801 bp, Homo sapiens
cctgtaatcccaacactttgggaggccaaggagagtgaattgcttgagcccgagtttgagaccagcctgggtaacatggtgaaactgtttctgcaaaagaaaagaaattagctaggtggggtggtgcatacctatagtcccagctacttgggaggctgaagtgggagaatcacttgagcccaggaggccgaggctgcagtgagctatgattgtgccactgcacttcagcctgggtgacagagcgagaccctctcaaaaataataataaataagtcacatgaacaaatacgtcaacagacctcttcagcgttggcttatcttagagcccactgtggacctcaagccctcgcagaaacaacggcaggtacagccatgcagagtgctgtttcacactgtgaggaaaacgagggctggcggtgctggtgagtttcaggagagggttgtttttatgcactgtgtttgttttctcattgcagggtataaagatggctgtgaccacatcggggagcaccgagatgatgaaagagaactggcccctgggagccccattgcctctgtctccttcggtgcctgcagagactttgtcttccggcataaggattcccgtgggaaaagcccctccaggagggtggcggtggtcaggctgccgctggcccacgggagcttactaatgatgaaccacccgaccaacacgcactggtaccacagtcttcccgtgagaaagaaggttctggctccacgggtgaatctgacttttcgtaaaattttgcttactaaaaaataaaaacatttttaacagtt

SEQ ID NO: 375032 - DNA, 1185 bp, Homo sapiens
gggcgcgtctttcccaccacgaggccaccaggtgactgcgggattccgatctgcgccggagctgcgatgctagagcactcttgccacccccaccccacggacgtgttgcagtgatatcagaattttgcgtgcggtttacccgtgtttaacctctttgcgtctcgcttctgaatcgtatccacttgagcatcactagactgatctattttaacactggtggggggcagcgaggacatggttttaaactttaaaatgaaaatgtgaaactaggaatgttgctgtgagaccccttggacaaacagatttttgcactggggatagaacttgagcaatttctgtcttggcctcgccactgacgtcccttctttcctgtggggacaggatggacagattcctggtgaaaggggctcaagggggccttttgaggaagcaggaggagcaagagccaactggagaagagccagctgtgttgggaggagacaaagaaagcacaaggaagaggcccaggagagaggccccagggaatggaggccactcagcaggccctagctggcggcacattcgggctgagggcctggactgcagttacacagtcctgtttggcaaagctgaggcagatgagattttccaagagttggagaaagaagtagaatattttacaggagcactggccagagtccaggtattcgggaagtggcacagtgtgcccaggaagcaggcaacgtatggcgacgctgggctgacctacacattttcaggcctcacgctgtctccaaagccctggatcccagttctagagcgcatccgggatcacgtctctggggtgactggacagaccttcaactttgtgctcatcaacaggtataaagatggctgtgaccacatcggggagcaccgagatgatgaaagagaactggcccctgggagccccattgcctctgtctccttcggtgcctgcagagactttgtcttccggcataaggattcccgtgggaaaagcccctccaggagggtggcggtggtcaggctgccgctggcccacgggagcttactaatgatgaaccacccgaccaacacgcactggtaccacagtcttcccgtgagaaagaaggttctggctccacgggtgaatctgacttttcgtaaaattttgcttactaaaaaataaaaacatttttaacagtt

SEQ ID NO: 375033 - DNA, 1206 bp, Homo sapiens
ctctctctctctctctctctctctctctctctctctctctctcctcgtgccggtgactgcgggattccgatctgcgccggagctgcgatgctagagcactcttgccacccccaccccacggacgtgttgcagtgatatcagaattttgcgtgcggtttacccgtgtttaacctctttgcgtctcgcttctgaatcgtatccacttgagcatcactagactgatctattttaacactggtggggggcagcgaggacatggttttaaactttaaaatgaaaatgtgaaactaggaatgttgctgtgagaccccttggacaaacagatttttgcactggggatagaacttgagcaatttctgtcttggcctcgccactgacgtcccttctttcctgtggggacaggatggacagattcctggtgaaaggggctcaagggggccttttgaggaagcaggaggagcaagagccaactggagaagagccagctgtgttgggaggagacaaagaaagcacaaggaagaggcccaggagagaggccccagggaatggaggccactcagcaggccctagctggcggcacattcgggctgagggcctggactgcagttacacagtcctgtttggcaaagctgaggcagatgagattttccaagagttggagaaagaagtagaatattttacaggagcactggccagagtccaggtattcgggaagtggcacagtgtgcccaggaagcaggcaacgtatggcgacgctgggctgacctacacattttcaggcctcacgctgtctccaaagccctggatcccagttctagagcgcatccgggatcacgtctctggggtgactggacagaccttcaactttgtgctcatcaacaggtataaagatggctgtgaccacatcggggagcaccgagatgatgaaagagaactggcccctgggagccccattgcctctgtctccttcggtgcctgcagagactttgtcttccggcataaggattcccgtgggaaaagcccctccaggagggtggcggtggtcaggctgccgctggcccacgggagcttactaatgatgaaccacccgaccaacacgcactggtaccacagtcttcccgtgagaaagaaggttctggctccacgggtgaatctgacttttcgtaaaattttgcttactaaaaaataaaaacatttttaacagtt

SEQ ID NO: 375034 - DNA, 1515 bp, Homo sapiens
ctctctctctctctctctctctctctctctctctctctctctcctcgtgccggtgactgcgggattccgatctgcgccggagctgcgatgctagagcactcttgccacccccaccccacggacgtgttgcagtgatatcagaattttgcgtgcggtttacccgtgtttaacctctttgcgtctcgcttctgaatcgtatccacttgagcatcactagactgatctattttaacactggtggggggcagcgaggtcagttatgggtccttcctccttaaaggggtggacagttgactttgggcaaacctcttcgcctctgtgggcaacagtttccccttctgcaaaatgagggtttggattgtagtttctaagtttagctgtggcgtgcgaattcccaggaggtagttctttaaaaattcaggtgctcaggcgtggagtgcagacctctgggtttttgcaagctagccagctgattctgatgcacaggtggacgtgggagaccctggatcagattgtccctagggtcccttccggctttaacatcttctgtttcctttctaggacatggttttaaactttaaaatgaaaatgtgaaactaggaatgttgctgtgagaccccttggacaaacagatttttgcactggggatagaacttgagcaatttctgtcttggcctcgccactgacgtcccttctttcctgtggggacaggatggacagattcctggtgaaaggggctcaagggggccttttgaggaagcaggaggagcaagagccaactggagaagagccagctgtgttgggaggagacaaagaaagcacaaggaagaggcccaggagagaggccccagggaatggaggccactcagcaggccctagctggcggcacattcgggctgagggcctggactgcagttacacagtcctgtttggcaaagctgaggcagatgagattttccaagagttggagaaagaagtagaatattttacaggagcactggccagagtccaggtattcgggaagtggcacagtgtgcccaggaagcaggcaacgtatggcgacgctgggctgacctacacattttcaggcctcacgctgtctccaaagccctggatcccagttctagagcgcatccgggatcacgtctctggggtgactggacagaccttcaactttgtgctcatcaacaggtataaagatggctgtgaccacatcggggagcaccgagatgatgaaagagaactggcccctgggagccccattgcctctgtctccttcggtgcctgcagagactttgtcttccggcataaggattcccgtgggaaaagcccctccaggagggtggcggtggtcaggctgccgctggcccacgggagcttactaatgatgaaccacccgaccaacacgcactggtaccacagtcttcccgtgagaaagaaggttctggctccacgggtgaatctgacttttcgtaaaattttgcttactaaaaaataaaaacatttttaacagtt

SEQ ID NO: 375035 - DNA, 979 bp, Homo sapiens
ggccacgaccgtatgcggcaccaatgacatggttttaaactttaaaatgaaaatgtgaaactaggaatgttgctgtgagaccccttggacaaacagatttttgcactggggatagaacttgagcaatttctgtcttggcctcgccactgacgtcccttctttcctgtggggacaggatggacagattcctggtgaaaggggctcaagggggccttttgaggaagcaggaggagcaagagccaactggagaagagccagctgtgttgggaggagacaaagaaagcacaaggaagaggcccaggagagaggccccagggaatggaggccactcagcaggccctagctggcggcacattcgggctgagggcctggactgcagttacacagtcctgtttggcaaagctgaggcagatgagattttccaagagttggagaaagaagtagaatattttacaggagcactggccagagtccaggtattcgggaagtggcacagtgtgcccaggaagcaggcaacgtatggcgacgctgggctgacctacacattttcaggcctcacgctgtctccaaagccctggatcccagttctagagcgcatccgggatcacgtctctggggtgactggacagaccttcaactttgtgctcatcaacaggtataaagatggctgtgaccacatcggggagcaccgagatgatgaaagagaactggcccctgggagccccattgcctctgtctccttcggtgcctgcagagactttgtcttccggcataaggattcccgtgggaaaagcccctccaggagggtggcggtggtcaggctgccgctggcccacgggagcttactaatgatgaaccacccgaccaacacgcactggtaccacagtcttcccgtgagaaagaaggttctggctccacgggtgaatctgacttttcgtaaaattttgcttactaaaaaataaaaacatttttaacagtt

SEQ ID NO: 375036 - DNA, 1057 bp, Homo sapiens
ctctctctctctctctctctctctctctctctctctctctctcctcgtgccggtgactgcgggattccgatctgcgccggagctgcgatgctagagcactcttgccacccccaccccacggacgtgttgcagtgatatcagaattttgcgtgcggtttacccgtgtttaacctctttgcgtctcgcttctgaatcgtatccacttgagcatcactagactgatctattttaacactggtggggggcagcgagggatggacagattcctggtgaaaggggctcaagggggccttttgaggaagcaggaggagcaagagccaactggagaagagccagctgtgttgggaggagacaaagaaagcacaaggaagaggcccaggagagaggccccagggaatggaggccactcagcaggccctagctggcggcacattcgggctgagggcctggactgcagttacacagtcctgtttggcaaagctgaggcagatgagattttccaagagttggagaaagaagtagaatattttacaggagcactggccagagtccaggtattcgggaagtggcacagtgtgcccaggaagcaggcaacgtatggcgacgctgggctgacctacacattttcaggcctcacgctgtctccaaagccctggatcccagttctagagcgcatccgggatcacgtctctggggtgactggacagaccttcaactttgtgctcatcaacaggtataaagatggctgtgaccacatcggggagcaccgagatgatgaaagagaactggcccctgggagccccattgcctctgtctccttcggtgcctgcagagactttgtcttccggcataaggattcccgtgggaaaagcccctccaggagggtggcggtggtcaggctgccgctggcccacgggagcttactaatgatgaaccacccgaccaacacgcactggtaccacagtcttcccgtgagaaagaaggttctggctccacgggtgaatctgacttttcgtaaaattttgcttactaaaaaataaaaacatttttaacagtt

SEQ ID NO: 375037 - DNA, 847 bp, Homo sapiens
ctgcgggtgactcagaggatccccgagggtgaccttcgggcgggatggacagattcctggtgaaaggggctcaagggggccttttgaggaagcaggaggagcaagagccaactggagaagagccagctgtgttgggaggagacaaagaaagcacaaggaagaggcccaggagagaggccccagggaatggaggccactcagcaggccctagctggcggcacattcgggctgagggcctggactgcagttacacagtcctgtttggcaaagctgaggcagatgagattttccaagagttggagaaagaagtagaatattttacaggagcactggccagagtccaggtattcgggaagtggcacagtgtgcccaggaagcaggcaacgtatggcgacgctgggctgacctacacattttcaggcctcacgctgtctccaaagccctggatcccagttctagagcgcatccgggatcacgtctctggggtgactggacagaccttcaactttgtgctcatcaacaggtataaagatggctgtgaccacatcggggagcaccgagatgatgaaagagaactggcccctgggagccccattgcctctgtctccttcggtgcctgcagagactttgtcttccggcataaggattcccgtgggaaaagcccctccaggagggtggcggtggtcaggctgccgctggcccacgggagcttactaatgatgaaccacccgaccaacacgcactggtaccacagtcttcccgtgagaaagaaggttctggctccacgggtgaatctgacttttcgtaaaattttgcttactaaaaaataaaaacatttttaacagtt

SEQ ID NO: 375038 - DNA, 1147 bp, Homo sapiens
gggcgcgtctttcccaccacgaggccaccaggtgactgcgggattccgatctgcgccggagctgcgatgctagagcactcttgccacccccaccccacggacgtgttgcagtgatatcagaattttgcgtgcggtttacccgtgtttaacctctttgcgtctcgcttctgaatcgtatccacttgagcatcactagactgatctattttaacactggtggggggcagcgaggacatggttttaaactttaaaatgaaaatgtgaaactaggaatgttgctgtgagaccccttggacaaacagatttttgcactggggatagaacttgagcaatttctgtcttggcctcgccactgacgtcccttctttcctgtggggacaggatggacagattcctggtgaaaggggctcaagggggccttttgaggaagcaggaggagcaagagccaactggagaagagccagctgtgttgggaggagacaaagaaagcacaaggaagaggcccaggagagaggccccagggaatggaggccactcagcaggccctagctggcggcacattcgggctgagggcctggactgcagttacacagtcctgtttggcaaagctgaggcagatgagattttccaagagttggagaaagaagtagaatattttacaggagcactggccagagtccaggtattcgggaagtggcacagtgtgcccaggaagcaggcaacgtatggcgacgctgggctgacctacacattttcaggcctcacgctgtctccaaagccctggatcccagttctagagcgcatccgggatcacgtctctggggtataaagatggctgtgaccacatcggggagcaccgagatgatgaaagagaactggcccctgggagccccattgcctctgtctccttcggtgcctgcagagactttgtcttccggcataaggattcccgtgggaaaagcccctccaggagggtggcggtggtcaggctgccgctggcccacgggagcttactaatgatgaaccacccgaccaacacgcactggtaccacagtcttcccgtgagaaagaaggttctggctccacgggtgaatctgacttttcgtaaaattttgcttactaaaaaataaaaacatttttaacagtt

SEQ ID NO: 375039 - DNA, 986 bp, Homo sapiens
gggcgcgtctttcccaccacgaggccaccaggtgactgcgggattccgatctgcgccggagctgcgatgctagagcactcttgccacccccaccccacggacgtgttgcagtgatatcagaattttgcgtgcggtttacccgtgtttaacctctttgcgtctcgcttctgaatcgtatccacttgagcatcactagactgatctattttaacactggtggggggcagcgaggacatggttttaaactttaaaatgaaaatgtgaaactaggaatgttgctgtgagaccccttggacaaacagatttttgcactggggatagaacttgagcaatttctgtcttggcctcgccactgacgtcccttctttcctgtggggacaggatggacagattcctggtgaaaggggctcaagggggccttttgaggaagcaggaggagcaagagccaactggagaagagccagctgtgttgggaggagacaaagaaagcacaaggaagaggcccaggagagaggccccagggaatggaggccactcagcaggccctagctggcggcacattcgggctgagggcctggactgcagttacacagtcctgtttggcaaagctgaggcagatgagattttccaagagttggagaaagaagtagaatattttacaggtataaagatggctgtgaccacatcggggagcaccgagatgatgaaagagaactggcccctgggagccccattgcctctgtctccttcggtgcctgcagagactttgtcttccggcataaggattcccgtgggaaaagcccctccaggagggtggcggtggtcaggctgccgctggcccacgggagcttactaatgatgaaccacccgaccaacacgcactggtaccacagtcttcccgtgagaaagaaggttctggctccacgggtgaatctgacttttcgtaaaattttgcttactaaaaaataaaaacatttttaacagtt

SEQ ID NO: 375040 - DNA, 904 bp, Homo sapiens
ctctctctctctctctctctctctctctctctctctctctctcctcgtgccggtgactgcgggattccgatctgcgccggagctgcgatgctagagcactcttgccacccccaccccacggacgtgttgcagtgatatcagaattttgcgacatggttttaaactttaaaatgaaaatgtgaaactaggaatgttgctgtgagaccccttggacaaacagatttttgcactggggatagaacttgagcaatttctgtcttggcctcgccactgacgtcccttctttcctgtggggacaggatggacagattcctggtgaaaggggctcaagggggccttttgaggaagcaggaggagcaagagccaactggagaagagccagctgtgttgggaggagacaaagaaagcacaaggaagaggcccaggagagaggccccagggaatggaggccactcagcaggccctagctggcggcacattcgggctgagggcctggactgcagttacacagtcctgtttggcaaagctgaggcagatgagattttccaagagttggagaaagaagtagaatattttacaggtataaagatggctgtgaccacatcggggagcaccgagatgatgaaagagaactggcccctgggagccccattgcctctgtctccttcggtgcctgcagagactttgtcttccggcataaggattcccgtgggaaaagcccctccaggagggtggcggtggtcaggctgccgctggcccacgggagcttactaatgatgaaccacccgaccaacacgcactggtaccacagtcttcccgtgagaaagaaggttctggctccacgggtgaatctgacttttcgtaaaattttgcttactaaaaaataaaaacatttttaacagtt

SEQ ID NO: 375041 - DNA, 1191 bp, Homo sapiens
ctctctctctctctctctctctctctctctctctctctctctcctcgtgccggtgactgcgggattccgatctgcgccggagctgcgatgctagagcactcttgccacccccaccccacggacgtgttgcagtgatatcagaattttgcgtgcggtttacccgtgtttaacctctttgcgtctcgcttctgaatcgtatccacttgagcatcactagactgatctattttaacactggtggggggcagcgaggtcagttatgggtccttcctccttaaaggggtggacagttgactttgggcaaacctcttcgcctctgtgggcaacagtttccccttctgcaaaatgagggtttggattgtagtttctaagtttagctgtggcgtgcgaattcccaggaggtagttctttaaaaattcaggtgctcaggcgtggagtgcagacctctgggtttttgcaagctagccagctgattctgatgcacaggtggacgtgggagaccctggatcagattgtccctagggtcccttccggctttaacatcttctgtttcctttctaggacatggttttaaactttaaaatgaaaatgtgaaactaggaatgttgctgtgagaccccttggacaaacagatttttgcactggggatagaacttgagcaatttctgtcttggcctcgccactgacgtcccttctttcctgtggggacaggatggacagattcctggtgaaaggggctcaagggggccttttgaggaagcaggaggagcaagagccaactggagaagagccagctgtgttgggaggagacaaagaaagcacaaggaagaggcccaggagagaggccccagggaatggaggccactcagcaggccctagctggcggcacattcgggctgagggcctggactgcagttacacagtcctgtttggcaaagctgaggcagatgagattttccaagagttggactttgtcttccggcataaggattcccgtgggaaaagcccctccaggagggtggcggtggtcaggctgccgctggcccacgggagcttactaatgatgaaccacccgaccaacacgcactggtaccacagtcttcccgtgagaaagaaggttctggctccacgggtgaatctgacttttcgtaaaattttgcttactaaaaaataaaaacatttttaacagtt

SEQ ID NO: 375042 - DNA, 1018 bp, Homo sapiens
ctctctctctctctctctctctctctctctctctctctctctcctcgtgccggtgactgcgggattccgatctgcgccggagctgcgatgctagagcactcttgccacccccaccccacggacgtgttgcagtgatatcagaattttgcgtgcggtttacccgtgtttaacctctttgcgtctcgcttctgaatcgtatccacttgagcatcactagactgatctattttaacactggtggggggcagcgaggtcagttatgggtccttcctccttaaaggggtggacagttgactttgggcaaacctcttcgcctctgtgggcaacagtttccccttctgcaaaatgagggtttggattgtagtttctaagtttagctgtggcgtgcgaattcccaggaggtagttctttaaaaattcaggtgctcaggcgtggagtgcagacctctgggtttttgcaagctagccagctgattctgatgcacaggtggacgtgggagaccctggatcagattgtccctagggtcccttccggctttaacatcttctgtttcctttctaggacatggttttaaactttaaaatgaaaatgtgaaactaggaatgttgctgtgagaccccttggacaaacagatttttgcactggggatagaacttgagcaatttctgtcttggcctcgccactgacgtcccttctttcctgtggggacaggatggacagattcctggtgaaaggggctcaagggggccttttgaggaagcaggaggagcaagagccaactggagaagagccagctctttgtcttccggcataaggattcccgtgggaaaagcccctccaggagggtggcggtggtcaggctgccgctggcccacgggagcttactaatgatgaaccacccgaccaacacgcactggtaccacagtcttcccgtgagaaagaaggttctggctccacgggtgaatctgacttttcgtaaaattttgcttactaaaaaataaaaacatttttaacagtt

SEQ ID NO: 375043 - DNA, 688 bp, Homo sapiens
gggcgcgtctttcccaccacgaggccaccaggtgactgcgggattccgatctgcgccggagctgcgatgctagagcactcttgccacccccaccccacggacgtgttgcagtgatatcagaattttgcgtgcggtttacccgtgtttaacctctttgcgtctcgcttctgaatcgtatccacttgagcatcactagactgatctattttaacactggtggggggcagcgaggacatggttttaaactttaaaatgaaaatgtgaaactaggaatgttgctgtgagaccccttggacaaacagatttttgcactggggatagaacttgagcaatttctgtcttggcctcgccactgacgtcccttctttcctgtggggacaggatggacagattcctggtgaaaggggctcaagggggccttttgaggaagcaggaggagcaagagccaactggagaagagccagctctttgtcttccggcataaggattcccgtgggaaaagcccctccaggagggtggcggtggtcaggctgccgctggcccacgggagcttactaatgatgaaccacccgaccaacacgcactggtaccacagtcttcccgtgagaaagaaggttctggctccacgggtgaatctgacttttcgtaaaattttgcttactaaaaaataaaaacatttttaacagtt

SEQ ID NO: 375044 - DNA, 587 bp, Homo sapiens
ctctctctctctctctctctctctctctctctctctctctctcctcgtgccggtgactgcgggattccgatctgcgccggagctgcgatgctagagcactcttgccacccccaccccacggacgtgttgcagtgatatcagaattttgcgtgcggtttacccgtgtttaacctctttgcgtctcgcttctgaatcgtatccacttgagcatcactagactgatctattttaacactggtggggggcagcgagggatggacagattcctggtgaaaggggctcaagggggccttttgaggaagcaggaggagcaagagccaactggagaagagccagctctctgtctccttcggtgcctgcagagactttgtcttccggcataaggattcccgtgggaaaagcccctccaggagggtggcggtggtcaggctgccgctggcccacgggagcttactaatgatgaaccacccgaccaacacgcactggtaccacagtcttcccgtgagaaagaaggttctggctccacgggtgaatctgacttttcgtaaaattttgcttactaaaaaataaaaacatttttaacagtt

SEQ ID NO: 375045 - DNA, 1316 bp, Homo sapiens
ctctctctctctctctctctctctctctctctctctctctctcctcgtgccggtgactgcgggattccgatctgcgccggagctgcgatgctagagcactcttgccacccccaccccacggacgtgttgcagtgatatcagaattttgcgtgcggtttacccgtgtttaacctctttgcgtctcgcttctgaatcgtatccacttgagcatcactagactgatctattttaacactggtggggggcagcgaggtcagttatgggtccttcctccttaaaggggtggacagttgactttgggcaaacctcttcgcctctgtgggcaacagtttccccttctgcaaaatgagggtttggattgtagtttctaagtttagctgtggcgtgcgaattcccaggaggtagttctttaaaaattcaggtgctcaggcgtggagtgcagacctctgggtttttgcaagctagccagctgattctgatgcacaggtggacgtgggagaccctggatcagattgtccctagggtcccttccggctttaacatcttctgtttcctttctaggacatggttttaaactttaaaatgaaaatgtgaaactaggaatgttgctgtgagaccccttggacaaacagatttttgcactggggatagaacttgagcaatttctgtcttggcctcgccactgacgtcccttctttcctgtggggacaggatggacagattcctggtgaaaggggctcaagggggccttttgaggaagcaggaggagcaagagccaactggagaagagccagctgtgttgggaggagacaaagaaagcacaaggaagaggcccaggagagaggccccagggaatggaggccactcagcaggccctagctggcggcacattcgggctgagggcctggactgcagttacacagtcctgtttggcaaagctgaggcagatgagattttccaagagttggagaaagaagtagaatattttacaggtataaagatggctgtgaccacatcggggagcaccgagatgatgaaagagaactggcccctgggagccccattgcctctgtctccttcggtgcctgcagagactttgtcttccggcataaggattcccgtgggaaaagcccctccaggagggtggcggtggtcaggctgccgctggcccacgggagcttactaatgatgaaccacccgaccaacacgcactggtaccacagtcttcccgtgagaaagaaggttctggctccacgggtgaatctgacttttcgtaaaattttgcttactaaaaaataaaaacatttttaacagtt

SEQ ID NO: 375046 - DNA, 858 bp, Homo sapiens
ctctctctctctctctctctctctctctctctctctctctctcctcgtgccggtgactgcgggattccgatctgcgccggagctgcgatgctagagcactcttgccacccccaccccacggacgtgttgcagtgatatcagaattttgcgtgcggtttacccgtgtttaacctctttgcgtctcgcttctgaatcgtatccacttgagcatcactagactgatctattttaacactggtggggggcagcgagggatggacagattcctggtgaaaggggctcaagggggccttttgaggaagcaggaggagcaagagccaactggagaagagccagctgtgttgggaggagacaaagaaagcacaaggaagaggcccaggagagaggccccagggaatggaggccactcagcaggccctagctggcggcacattcgggctgagggcctggactgcagttacacagtcctgtttggcaaagctgaggcagatgagattttccaagagttggagaaagaagtagaatattttacaggtataaagatggctgtgaccacatcggggagcaccgagatgatgaaagagaactggcccctgggagccccattgcctctgtctccttcggtgcctgcagagactttgtcttccggcataaggattcccgtgggaaaagcccctccaggagggtggcggtggtcaggctgccgctggcccacgggagcttactaatgatgaaccacccgaccaacacgcactggtaccacagtcttcccgtgagaaagaaggttctggctccacgggtgaatctgacttttcgtaaaattttgcttactaaaaaataaaaacatttttaacagtt

SEQ ID NO: 375047 - DNA, 460 bp, Homo sapiens
tatgctccctccctccccttaccttggaacccaggccagtggcccatctccattcatgcacaatctgttttgagtctcagccatgggttccccagaatgggtaagcaaggagccttgtgtgggcagtggtcggctacccctggatgggcccttactgccccgtgtgtattttctaggcattcctagccgagtgtgacacagtggagcagaacatctgccaggagactgagcggctgcagtctacaaactttgccctggccgagtgaggtgtagcagaaaaaggctgtgctgccctgaagaatggcgccaccagctctgccgtctctggagcggaatttacctgatttcttcagggctgctgggggcaactggccatttgccaattttcctactctcacactggttctcaatgaaaaatagtgtctttgtgattttgagtaaagctcctatctgttttctc

SEQ ID NO: 375048 - DNA, 1675 bp, Homo sapiens
ggtggggcctggaggcaactaacgcggcatagggcgagggcggggccggcaggccggggcggggctgggaagtagtcgggcggggttgtgagacgccgcgctcagcttccatcgctgggcggtcaacaagtgcgggcctggctcagcgcgggggggcgcggagaccgcgaggcgaccgggagcggctgggttcccggctgcgcgcccttcggccaggccgggagccgcgccagtcggagcccccggcccagcgtggtccgcctccctctcggcgtccacctgcccggagtactgccagcgggcatgaccgacccaccaggggcgccgccgccggcgctcgcaggccgcggatgaagaagaaaacccggcgccgctcgacccggagcgaggagttgacccggagcgaggagttgaccctgagtgaggaagcgacctggagtgaagaggcgacccagagtgaggaggcgacccagggcgaagagatgaatcggagccaggaggtgacccgggacgaggagtcgacccggagcgaggaggtgaccagggaggaaatggcggcagctgggctcaccgtgactgtcacccacagcaatgagaagcacgaccttcatgttacctcccagcagggcagcagtgaaccagttgtccaagacctggcccaggttgttgaagaggtcataggggttccacagtcttttcagaaactcatatttaagggaaaatctctgaaggaaatggaaacaccgttgtcagcacttggaatacaagatggttgccgggtcatgttaattgggaaaaagaacagtccacaggaagaggttgaactaaagaagttgaaacatttggagaagtctgtggagaagatagctgaccagctggaagagttgaataaagagcttactggaatccagcagggttttctgcccaaggatttgcaagctgaagctctctgcaaacttgataggagagtaaaagccacaatagagcagtttatgaagatcttggaggagattgacacactgatcctgccagaaaatttcaaagacagtagattgaaaaggaaaggcttggtaaaaaaggttcaggcattcctagccgagtgtgacacagtggagcagaacatctgccaggagactgagcggctgcagtctacaaactttgccctggccgagtgaggtgtagcagaaaaaggctgtgctgccctgaagaatggcgccaccagctctgccgtctctggagcggaatttacctgatttcttcagggctgctgggggcaactggccatttgccaattttcctactctcacactggttctcaatgaaaaatagtgtctttgtgattttgagtaaagctcctatctgttttctccttctgtctctgtggttgtactgtccagcaatccaccttttctggagagggccacctctgcccaaattttcccagctgtttggacctctgggtgctttctttgggctggtgagagctctaatttgccttgggccagtttcaggtttataggccccctcagtcttcagatacatgagggcttctttgctcttgtgatcgtgtagtcccatagctgtaaaaccagaatcaccaggaggttgcacctagtcaggaatattgggaatggcctagaacaaggtgtttggcacataagtagaccacttatcc

SEQ ID NO: 375049 - DNA, 1950 bp, Homo sapiens
ggtggggcctggaggcaactaacgcggcatagggcgagggcggggccggcaggccggggcggggctgggaagtagtcgggcggggttgtgagacgccgcgctcagcttccatcgctgggcggtcaacaagtgcgggcctggctcagcgcgggggggcgcggagaccgcgaggcgaccgggagcggctgggttcccggctgcgcgcccttcggccaggccgggagccgcgccagtcggagcccccggcccagcgtggtccgcctccctctcggcgtccacctgcccggagtactgccagcgggcatgaccgacccaccaggggcgccgccgccggcgctcgcaggccgcggatgaagaagaaaacccggcgccgctcgacccggagcgaggagttgacccggagcgaggagttgaccctgagtgaggaagcgacctggagtgaagaggcgacccagagtgaggaggcgacccagggcgaagagatgaatcggagccaggaggtgacccgggacgaggagtcgacccggagcgaggaggtgaccagggaggaaatggcggcagctgggctcaccgtgactgtcacccacagcaatgagaagcacgaccttcatgttacctcccagcagggcagcagtgaaccagttgtccaagacctggcccaggttgttgaagaggtcataggggttccacagtcttttcagaaactcatatttaagggaaaatctctgaaggaaatggaaacaccgttgtcagcacttggaatacaagatggttgccgggtcatgttaattgggaaaaagaacagtccacaggaagaggttgaactaaagaagttgaaacatttggagaagtctgtggagaagatagctgaccagctggaagagttgaataaagagcttactggaatccagcagggttttctgcccaaggatttgcaagctgaagctctctgcaaacttgataggagagtaaaagccacaatagagcagtttatgaagatcttggaggagattgacacactgatcctgccagaaaatttcaaagacagtagattgaaaaggaaaggcttggtaaaaaaggttcaggcattcctagccgagtgtgacacagtggagcagaacatctgccaggagactgagcggctgcagtctacaaactttgccctggccgagtgaggtgtagcagaaaaaggctgtgctgccctgaagaatggcgccaccagctctgccgtctctggagcggaatttacctgatttcttcagggctgctgggggcaactggccatttgccaattttcctactctcacactggttctcaatgaaaaatagtgtctttgtgattttgagtaaagctcctatctgttttctcaaaaaaaaaaaaaaaaaaaaaaaaaaaaaaaaaaaaaaaaaaaaaaaaaaaaaaaaaaaaaaaaaaaaaaaaaaaaagagggggggggggcggcaaaagtaccccccgggggggcgccattggcccgcccccccgaagtattatagcaacagaaaggggggcgccccataatagggaggcgcggtactaataataacagtcgaagacgaggccgacgcgcacacatacaacaacacgagagcagagacgagaaacaacaagcgacaggaggacatactataggtagcaagacacaacaccatatagcacgcggggggggcaacaccaataaggagggaggcgaccacacacacccaggagaaggatagataccagaccccgctcagaggcgagaaaaaataaacacacgactcacgcagggctaggaaggggggagaaaaaccaaccgctcgcgtcagaaatagagcggccggagagagcagacgacatactcacggagcaccagcaggggagcatgtataacaggagaaaacgaatatactacacacggggcgggcagcttcggtatcaacaacgggaag

SEQ ID NO: 375050 - DNA, 1116 bp, Homo sapiens
ggtggggcctggaggcaactaacgcggcatagggcgagggcggggccggcaggccggggcggggctgggaagtagtcgggcggggttgtgagacgccgcgctcagcttccatcgctgggcggtcaacaagtgcgggcctggctcagcgcgggggggcgcggagaccgcgaggcgaccgggagcggctgggttcccggctgcgcgcccttcggccaggccgggagccgcgccagtcggagcccccggcccagcgtggtccgcctccctctcggcgtccacctgcccggagtactgccagcgggcatgaccgacccaccaggggcgccgccgccggcgctcgcaggccgcggatgaagaagaaaacccggcgccgctcgacccggagcgaggagttgacccggagcgaggagttgaccctgagtgaggaagcgacctggagtgaagaggcgacccagagtgaggaggcgacccagggcgaagagatgaatcggagccaggaggtgacccgggacgaggagtcgacccggagcgaggaggtgaccagggaggaaatggcggcagctgggctcaccgtgactgtcacccacagcaatgagaagcacgaccttcatgttacctcccagcagggcagcagtgaaccagttgtccaagacctggcccaggttgttgaagaggtcataggggttccacagtcttttcagaaactcatatttaagggaaaatctctgaaggaaatggaaacaccgttgtcagcacttggaatacaagatggttgccgggtcatgttaattgggaaaaagaacagtccacaggaagaggttgaactaaagaagttgaaacatttggagaagtctgtggagaagatagctgaccagctggaagagttgaataaagagcttactggaatccagcagggttttctgcccaaggatttgcaagctgaagctctctgcaaacttgataggagagtaaaagccacaatagagcagtttatgaagatcttggaggagattgacacactgaactggccatttgccaattttcctactctcacactggttctcaatgaaaaatagtgtctttgtgattttgagtaaagctcctatctgttttctc

SEQ ID NO: 375051 - DNA, 1327 bp, Homo sapiens
ggtggggcctggaggcaactaacgcggcatagggcgagggcggggccggcaggccggggcggggctgggaagtagtcgggcggggttgtgagacgccgcgctcagcttccatcgctgggcggtcaacaagtgcgggcctggctcagcgcgggggggcgcggagaccgcgaggcgaccgggagcggctgggttcccggctgcgcgcccttcggccaggccgggagccgcgccagtcggagcccccggcccagcgtggtccgcctccctctcggcgtccacctgcccggagtactgccagcgggcatgaccgacccaccaggggcgccgccgccggcgctcgcaggccgcggatgaagaagaaaacccggcgccgctcgacccggagcgaggagttgacccggagcgaggagttgaccctgagtgaggaagcgacctggagtgaagaggcgacccagagtgaggaggcgacccagggcgaagagatgaatcggagccaggaggtgacccgggacgaggagtcgacccggagcgaggaggtgaccagggaggaaatggcggcagctgggctcaccgtgactgtcacccacagcaatgagaagcacgaccttcatgttacctcccagcagggcagcagtgaaccagttgtccaagacctggcccaggttgttgaagaggtcataggggttccacagtcttttcagaaactcatatttaagggaaaatctctgaaggaaatggaaacaccgttgtcagcacttggaatacaagatggttgccgggtcatgttaattgggaaaaagaacagtccacaggaagaggttgaactaaagaagttgaaacatttggagaagtctgtggagaagatagctgaccagctggaagagttgaataaagagcttactggaatccagcagagatggggtttcaccatgttggccagactggtctcaaactcctgacctcaagtgatctgcccgcctcggcctcccaaagtgctgggattacaggcatgagccactgcgcccggcctatatgtttgtgttttaattacagaatacatggctgactgtacaaaagttttaagtacatgtataggcactaatatggaaaataaaaattacccatggggcaccaactcagagatgacgattaccaaagcctgaaatatatttttcatcttaaaaaaatttgatataatgttatttacactttataaactattcttttattggataaaaaattaaacattttcctgtgatggtatttttcaaagctcgcatgcatttcatcttgtataaatgtattatttacctagccaactctgtat

SEQ ID NO: 375052 - DNA, 1218 bp, Homo sapiens
ctttgactgtccttggacgtaaatcttttttgaccattcctggtttttttggtagaataaattctttgagttggaattgctgggtgatgtttaaagctcttgctacgtgttgtgaaatctgtgtctgtagctcgtggctgtgataaacatcctcagagatccctgctatccaactcttgtcaccagctaactggtcattaggccaagctgtgtgagtgaaccattagacaatttgataaaaataagcactgctgccattctttagcatgcgtctgtgccacaagttagtgacacatgtacatatattccctttacctcacagtaaccatctagggtgtgggcatcataatcttcatttttaaaatgagggtactgaggcatgaataggctaaataatttgctcaagatcacaagttagtaaatggcagtcagttttcaggcgtaggctttgaagactctaaacctgtgcttttaacatctgcctcttcttgtgactgggggcttcactggagccaagcctcaggaggcatttgcagccacagtgggtcatgcgaggtagagcagactgcaacctgatagaattcttggactggcccacggccagcctttttaatttttccaagagttaaagttgtggatctgagatgtggcctggcctgccagggctatggtgggctcagtgtgattgcatcattagtattgtggcatggagtcttccgtcagcctcagagaacccttgcaataatgcattatttccccgcagggttttctgcccaaggatttgcaagctgaagctctctgcaaacttgataggagagtaaaagccacaatagagcagtttatgaagatcttggaggagattgacacactgatcctgccagaaaatttcaaagacagtagattgaaaaggaaaggcttggtaaaaaaggttcaggcattcctagccgagtgtgacacagtggagcagaacatctgccaggagactgagcggctgcagtctacaaactttgccctggccgagtgaggtgtagcagaaaaaggctgtgctgccctgaagaatggcgccaccagctctgccgtctctggagcggaatttacctgatttcttcagggctgctgggggcaactggccatttgccaattttcctactctcacactggttctcaatgaaaaatagtgtctttgtgattttgagtaaagctcctatctgttttctc

SEQ ID NO: 375053 - DNA, 776 bp, Homo sapiens
gccattgaaaatcattaactcttttgcagatgatagtaatgatatctctagcctgatgcttcattcttgaaggtgaactgcactgtgtacttctgttggccagggtgggtgtaaagaagcagcagcaggcacttttcctgtcacaatgagcccatggtgtggccagggcagagtatccatacataggaaacaataaaagaacaaagtctgtgttaaagatcagttcctatggcccagacattgagaacacagggagcttttatagggacaagagccatggaaaggccatacaggatacagacccagggaaagggttcctgaaaatggatatcacatttacattggtgacctgtgacctgttttgtgtactgtgggtgtttcttatgtgctctcatgtcattttcactgaggattatttgttacatgtttactatttactaacttgtattatcaacttactcttccatagatcctgccagaaaatttcaaagacagtagattgaaaaggaaaggcttggtaaaaaaggttcaggtgagttgtgtaatagtgcacgacaaggtgtaatatgttaatgtgtaggtatgtgtgtttatctgttcaaaatcaggtagtgtaggagcgtggtgtgtggtatgggcttgttttggttatatttatcagcaggaaccccaaacgtcagagaagagccacctgtgtccctgtaattatatttgaatttaaactatttagggagggaactcactggagagcaggtagggctgacacattacacaat

SEQ ID NO: 375054 - DNA, 450 bp, Homo sapiens
gagtgcagtggtgcaatctcagtggctccctgtagcctctgcctgccaggttcaagtgattctgcctcagcctcccgagtagctgggattacaggtgccgcctgccaccacatctgtctgatttttttgtatttttaatagagatggggtttcaccatgttggccagactggtctcaaactcctgacctcaagtgatctgcccgcctcggcctcccaaagtgctgggattacaggcatgagccactgcgcccggcctatatgtttgtgttttaattacagaatacatggctgactgtacaaaagttttaagtacatgtataggcactaatatggaaaataaaaattacccatggggcaccaactcagagatgacgattaccaaagcctgaaatatatttttcatcttaaaaaaatttgatataatgttatttacactttataaactattc

SEQ ID NO: 375055 - DNA, 405 bp, Homo sapiens
ccgatgaagatgccgttttcgccgatgaagaagccgttttcgggagattgacacactgatcctgccagaaaatttcaaagacagtagattgaaaaggaaaggcttggtaaaaaaggttcaggcattcctagccgagtgtgacacagtggagcagaacatctgccaggagactgagcggctgcagtctacaaactttgccctggccgagtgaggtgtagcagaaaaaggctgtgctgccctgaagaatggcgccaccagctctgccgtctctggagcggaatttacctgatttcttcagggctgctgggggcaactggccatttgccaattttcctactctcacactggttctcaatgaaaaatagtgtctttgtgattttgagtaaagctcctatctgttttctc

SEQ ID NO: 375056 - DNA, 1369 bp, Homo sapiens
ggtggggcctggaggcaactaacgcggcatagggcgagggcggggccggcaggccggggcggggctgggaagtagtcgggcggggttgtgagacgccgcgctcagcttccatcgctgggcggtcaacaagtgcgggcctggctcagcgcgggggggcgcggagaccgcgaggcgaccgggagcggctgggttcccggctgcgcgcccttcggccaggccgggagccgcgccagtcggagcccccggcccagcgtggtccgcctccctctcggcgtccacctgcccggagtactgccagcgggcatgaccgacccaccaggggcgccgccgccggcgctcgcaggccgcggatgaagaagaaaacccggcgccgctcgacccggagcgaggagttgacccggagcgaggagttgaccctgagtgaggaagcgacctggagtgaagaggcgacccagagtgaggaggcgacccagggcgaagagatgaatcggagccaggaggtgacccgggacgaggagtcgacccggagcgaggaggtgaccagggaggaaatggcggcagctgggctcaccgtgactgtcacccacagcaatgagaagcacgaccttcatgttacctcccagcagggcagcagtgaaccagttgtccaagacctggcccaggttgttgaagaggtcataggggttccacagtcttttcagaaactcatatttaagggaaaatctctgaaggaaatggaaacaccgttgtcagcacttggaatacaagatggttgccgggtcatgttaattgggaaaaagaacagtccacaggaagaggttgaactaaagaagttgaaacatttggagaagtctgtggagaagatagctgaccagctggaagagttgaataaagagcttactggaatccagcagggttttctgcccaaggatttgcaagctgaagctctctgcaaacttgataggagagtaaaagccacaatagagcagtttatgaagatcttggaggagattgacacactgatcctgccagaaaatttcaaagacagtagattgaaaaggaaaggcttggtaaaaaaggttcaggcattcctagccgagtgtgacacagtggagcagaacatctgccaggagactgagcggctgcagtctacaaactttgccctggccgagtgaggtgtagcagaaaaaggctgtgctgccctgaagaatggcgccaccagctctgccgtctctggagcggaatttacctgatttcttcagggctgctgggggcaactggccatttgccaattttcctactctcacactggttctcaatgaaaaatagtgtctttgtgattttgagtaaagctcctatctgttttctc

SEQ ID NO: 375057 - DNA, 1415 bp, Homo sapiens
  misc_feature (1381)..(1381): n is a, c, g, or t
ggtggggcctggaggcaactaacgcggcatagggcgagggcggggccggcaggccggggcggggctgggaagtagtcgggcggggttgtgagacgccgcgctcagcttccatcgctgggcggtcaacaagtgcgggcctggctcagcgcgggggggcgcggagaccgcgaggcgaccgggagcggctgggttcccggctgcgcgcccttcggccaggccgggagccgcgccagtcggagcccccggcccagcgtggtccgcctccctctcggcgtccacctgcccggagtactgccagcgggcatgaccgacccaccaggggcgccgccgccggcgctcgcaggccgcggatgaagaagaaaacccggcgccgctcgacccggagcgaggagttgacccggagcgaggagttgaccctgagtgaggaagcgacctggagtgaagaggcgacccagagtgaggaggcgacccagggcgaagagatgaatcggagccaggaggtgacccgggacgaggagtcgacccggagcgaggaggtgaccagggaggaaatggcggcagctgggctcaccgtgactgtcacccacagcaatgagaagcacgaccttcatgttacctcccagcagggcagcagtgaaccagttgtccaagacctggcccaggttgttgaagaggtcataggggttccacagtcttttcagaaactcatatttaagggaaaatctctgaaggaaatggaaacaccgttgtcagcacttggaatacaagatggttgccgggtcatgttaattgggaaaaagaacagtccacaggaagaggttgaactaaagaagttgaaacatttggagaagtctgtggagaagatagctgaccagctggaagagttgaataaagagcttactggaatccagcagggttttctgcccaaggatttgcaagctgaagctctctgcaaacttgataggagagtaaaagccacaatagagcagtttatgaagatcttggaggagattgacacactgatcctgccagaaaatttcaaagacagtagattgaaaaggaaaggcttggtaaaaaaggttcaggcattcctagccgagtgtgacacagtggagcagaacatctgccaggagactgagcggctgcagtctacaaactttgccctggccgagtgaggtgtagcagaaaaaggctgtgctgccctgaagaatggcgccaccagctctgccgtctctggagcggaatttacctgatttcttcagggctgctgggggcaactggccatttgccaattttcctactctcacactggttctcaatgaaaaatagtgtctttgtgattttgagtaaagctcctatctgttttctcaaaaaaaaaaanaaagggggcgggctcggaatcctaagaacaggta

SEQ ID NO: 375058 - DNA, 1549 bp, Homo sapiens
ggtggggcctggaggcaactaacgcggcatagggcgagggcggggccggcaggccggggcggggctgggaagtagtcgggcggggttgtgagacgccgcgctcagcttccatcgctgggcggtcaacaagtgcgggcctggctcagcgcgggggggcgcggagaccgcgaggcgaccgggagcggctgggttcccggctgcgcgcccttcggccaggccgggagccgcgccagtcggagcccccggcccagcgtggtccgcctccctctcggcgtccacctgcccggagtactgccagcgggcatgaccgacccaccaggggcgccgccgccggcgctcgcaggccgcggatgaagaagaaaacccggcgccgctcgacccggagcgaggagttgacccggagcgaggagttgaccctgagtgaggaagcgacctggagtgaagaggcgacccagagtgaggaggcgacccagggcgaagagatgaatcggagccaggaggtgacccgggacgaggagtcgacccggagcgaggaggtgaccagggaggaaatggcggcagctgggctcaccgtgactgtcacccacagcaatgagaagcacgaccttcatgttacctcccagcagggcagcagtgaaccagttgtccaagacctggcccaggttgttgaagaggtcataggggttccacagtcttttcagaaactcatatttaagggaaaatctctgaaggaaatggaaacaccgttgtcagcacttggaatacaagatggttgccgggtcatgttaattgggaaaaagaacagtccacaggaagaggttgaactaaagaagttgaaacatttggagaagtctgtggagaagatagctgaccagctggaagagttgaataaagagcttactggaatccagcagggttttctgcccaaggatttgcaagctgaagctctctgcaaacttgataggagagtaaaagccacaatagagcagtttatgaagatcttggaggagattgacacactgatcctgccagaaaatttcaaagacagtagattgaaaaggaaaggcttggtaaaaaaggttcaggatcaaagaagacaggcatgaggctaccttctcaggagctgtagtgtaccattcagggacctggcacagtccatccagacatcctgctgagcgtcgcccacatatgcagtctcggacctatgtcctacctgttcatgcagttgtccatatccagtgggatgtcctaggggctcaactgtccacaaacatcactgccccccacagaactggtacagacccccaaaccacccatctcagcccatgaaaccactggccacccaagcccacaaatcagaaaccagtatgctgcctccttcccctcagcctttacatacagtcacataccaagcctgtcaattccactcccaatgtacctcctaaccatgagtctttgattagcatgatctttctctaagctaggacaacatcctgatgttccttatatttcctcaaatacaaactttcacatctatccagaaattgca

SEQ ID NO: 375059 - DNA, 855 bp, Homo sapiens
ggtggggcctggaggcaactaacgcggcatagggcgagggcggggccggcaggccggggcggggctgggaagtagtcgggcggggttgtgagacgccgcgctcagcttccatcgctgggcggtcaacaagtgcgggcctggctcagcgcgggggggcgcggagaccgcgaggcgaccgggagcggctgggttcccggctgcgcgcccttcggccaggccgggagccgcgccagtcggagcccccggcccagcgtggtccgcctccctctcggcgtccacctgcccggagtactgccagcgggcatgaccgacccaccaggggcgccgccgccggcgctcgcaggccgcggatgaagaagaaaacccggcgccgctcgacccggagcgaggagttgacccggagcgaggagttgaccctgagtgaggaagcgacctggagtgaagaggcgacccagagtgaggaggcgacccagggcgaagagatgaatcggagccaggaggtgacccgggacgaggagtcgacccggagcgaggaggtgaccagggaggaaatggcggcagctgggctcaccgtgactgtcacccacagcaatgagaagcacgaccttcatgttacctcccagcagggcagcagtgaaccagttgtccaagacctggcccaggttgttgaagaggtcataggggttccacagtcttttcagaaactcatatttaaggttcttcaacagatatttattgaggacctgctaggtattggacactctcaaacacctggacaggtgtcagatttgaagtcttatgatgatggcagaaatctcaccattttcgatgaagctcatgggcagtcttccctcg

SEQ ID NO: 375060 - DNA, 301 bp, Homo sapiens
ttttttttttcagcttgcagttgaggtggtttttatatttgtaaataaatggttagattttaagtaagaagtactacatcataaccttagcttggtctctgagctcacacagcctgctaggatgtcatgtctggtccttgaaggcccctgtcctagatgccctggctcaggcttagccctgaggctttgactttacccgactggttggctatgagtcccacgtgtgccccgacccactcatgcagtgacagctccccagtggcggccggccccatcctgtaggctcttggctcactgtccc

SEQ ID NO: 375061 - DNA, 196 bp, Homo sapiens
aaagaggcagaatggaatacacaagaactgtggaacaattacaaaacgtgcaacatttacataatgcaaacatcagaaggataagagagaaacagaaaaaatatttcaagtaataatggctggggactttccaaaactaacgaaaggcaccaaaccacagatgtagggagctcagtgaatacgaagcaggataaat

SEQ ID NO: 375062 - DNA, 1890 bp, Homo sapiens
  misc_feature (23)..(23): n is a, c, g, or t
agcgggttgatgacgtcagcgtncgaattccatggcggcgcggcggcgacggagcaccggcggcggcagggcgagagcattaaatgaaagcaaaagagttaataatggcaacacggctccagaagactcttcccctgccaagaaaactcgtagatgccagagacaggagtcgaaaaagatgcctgtggctggaggaaaagctaataaggacaggacagaagacaagcaagatggtatgccaggaaggtcatgggccagcaaaagggtctctgaatctgtgaaggccttgctgttaaagggcaaagctcctgtggacccagagtgtacagccaaggtggggaaggctcatgtgtattgtgaaggaaatgatgtctatgatgtcatgctaaatcagaccaatctccagttcaacaacaacaagtactatctgattcagctattagaagatgatgcccagaggaacttcagtgtttggatgagatggggccgagttgggaaaatgggacagcacagcctggtggcttgttcaggcaatctcaacaaggccaaggaaatctttcagaagaaattccttgacaaaacgaaaaacaattgggaagatcgagaaaagtttgagaaggtgcctggaaaatatgatatgctacagatggactatgccaccaatactcaggatgaagaggaaacaaagaaagaggaatctcttaaatctcccttgaagccagagtcacagctagatcttcgggtacaggagttaataaagttgatctgtaatgttcaggccatggaagaaatgatgatggaaatgaagtataataccaagaaagccccacttgggaagctgacagtggcacaaatcaaggcaggttaccagtctcttaagaagattgaggattgtattcgggctggccagcatggacgagctctcatggaagcatgcaatgaattctacaccaggattccgcatgactttggactccgtactcctccactaatccggacacagaaggaactgtcagaaaaaatacaattactagaggctttgggagacattgaaattgctattaagctggtgaaaacagagctacaaagcccagaacacccattggaccaacactatagaaacctacattgtgccttgcgcccccttgaccatgaaagttatgagttcaaagtgatttcccagtacctacaatctacccatgctcccacacacagcgactataccatgaccttgctggatttgtttgaagtggagaaggatggtgagaaagaagccttcagagaggaccttcataacaggatgcttctatggcatggttccaggatgagtaactgggtgggaatcttgagccatgggcttcgaattgccccacctgaagctcccatcacaggttacatgtttgggaaaggaatctactttgctgacatgtcttccaagagtgccaattactgctttgcctctcgcctaaagaatacaggactgctgctcttatcagaggtagctctaggtcagtgtaatgaactactagaggccaatcctaaggccgaaggattgcttcaaggtaaacatagcaccaaggggctgggcaagatggctcccagttctgcccacttcgtcaccctgaatgggagtacagtgccattaggaccagcaagtgacacaggaattctgaatccagatggttataccctcaactacaatgaatatattgtatataaccccaaccaggtccgtatgcggtaccttttaaaggttcagtttaatttccttcagctgtggtgaatgttgatattaaataaaccagagatctgatcttcaagcaagaaaataagcagtgttgtacttgtgaattttgtgatattttatgtaataaaaactgtacaggtcta

SEQ ID NO: 375063 - DNA, 465 bp, Homo sapiens
  misc_feature (33)..(33): n is a, c, g, or t
  misc_feature (48)..(48): n is a, c, g, or t
gggaacccttgggcctttgggtccttttctttntttattcccaaaagnaaggggggtataagggggcccccttgtagctctaggtcagtgtaatgaactactagaggccaatcctaaggccgaaggattgcttcaaggtaaacatagcaccaaggggctgggcaagatggctcccagttctgcccacttcgtcaccctgaatgggagtacagtgccattaggaccagcaagtgacacaggaattctgaatccagatggttataccctcaactacaatgaatatattgtatataaccccaaccaggtccgtatgcggtaccttttaaaggttcagtttaatttccttcagctgtggtgaatgttgatattaaataaaccagagatctgatcttcaagcaagaaaataagcagtgttgtacttgtgaattttgtgatattttatgtaataaaaactgtacaggtcta

SEQ ID NO: 375064 - DNA, 1851 bp, Homo sapiens
  misc_feature (23)..(23): n is a, c, g, or t
agcgggttgatgacgtcagcgtncgaattccatggcggcgcggcggcgacggagcaccggcggcggcagggcgagagcattaaatgaaagcaaaagagttaataatggcaacacggctccagaagactcttcccctgccaagaaaactcgtagatgccagagacaggagtcgaaaaagatgcctgtggctggaggaaaagctaataaggacaggacagaagacaagcaagatgaatctgtgaaggccttgctgttaaagggcaaagctcctgtggacccagagtgtacagccaaggtggggaaggctcatgtgtattgtgaaggaaatgatgtctatgatgtcatgctaaatcagaccaatctccagttcaacaacaacaagtactatctgattcagctattagaagatgatgcccagaggaacttcagtgtttggatgagatggggccgagttgggaaaatgggacagcacagcctggtggcttgttcaggcaatctcaacaaggccaaggaaatctttcagaagaaattccttgacaaaacgaaaaacaattgggaagatcgagaaaagtttgagaaggtgcctggaaaatatgatatgctacagatggactatgccaccaatactcaggatgaagaggaaacaaagaaagaggaatctcttaaatctcccttgaagccagagtcacagctagatcttcgggtacaggagttaataaagttgatctgtaatgttcaggccatggaagaaatgatgatggaaatgaagtataataccaagaaagccccacttgggaagctgacagtggcacaaatcaaggcaggttaccagtctcttaagaagattgaggattgtattcgggctggccagcatggacgagctctcatggaagcatgcaatgaattctacaccaggattccgcatgactttggactccgtactcctccactaatccggacacagaaggaactgtcagaaaaaatacaattactagaggctttgggagacattgaaattgctattaagctggtgaaaacagagctacaaagcccagaacacccattggaccaacactatagaaacctacattgtgccttgcgcccccttgaccatgaaagttatgagttcaaagtgatttcccagtacctacaatctacccatgctcccacacacagcgactataccatgaccttgctggatttgtttgaagtggagaaggatggtgagaaagaagccttcagagaggaccttcataacaggatgcttctatggcatggttccaggatgagtaactgggtgggaatcttgagccatgggcttcgaattgccccacctgaagctcccatcacaggttacatgtttgggaaaggaatctactttgctgacatgtcttccaagagtgccaattactgctttgcctctcgcctaaagaatacaggactgctgctcttatcagaggtagctctaggtcagtgtaatgaactactagaggccaatcctaaggccgaaggattgcttcaaggtaaacatagcaccaaggggctgggcaagatggctcccagttctgcccacttcgtcaccctgaatgggagtacagtgccattaggaccagcaagtgacacaggaattctgaatccagatggttataccctcaactacaatgaatatattgtatataaccccaaccaggtccgtatgcggtaccttttaaaggttcagtttaatttccttcagctgtggtgaatgttgatattaaataaaccagagatctgatcttcaagcaagaaaataagcagtgttgtacttgtgaattttgtgatattttatgtaataaaaactgtacaggtcta

SEQ ID NO: 375065 - DNA, 894 bp, Homo sapiens
cagtgtcctcccacattgattctatatctcatcttctcaggctttgggagacattgaaattgctattaagctggtgaaaacagagctacaaagcccagaacacccattggaccaacactatagaaacctacattgtgccttgcgcccccttgaccatgaaagttatgagttcaaagtgatttcccagtacctacaatctacccatgctcccacacacagcgactataccatgaccttgctggatttgtttgaagtggagaaggatggtgagaaagaagccttcagagaggaccttcataacaggatgcttctatggcatggttccaggatgagtaactgggtgggaatcttgagccatgggcttcgaattgccccacctgaagctcccatcacaggttacatgtttgggaaaggaatctactttgctgacatgtcttccaagagtgccaattactgctttgcctctcgcctaaagaatacaggactgctgctcttatcagaggtagctctaggtcagtgtaatgaactactagaggccaatcctaaggccgaaggattgcttcaaggtaaacatagcaccaaggggctgggcaagatggctcccagttctgcccacttcgtcaccctgaatgggagtacagtgccattaggaccagcaagtgacacaggaattctgaatccagatggttataccctcaactacaatgaatatattgtatataaccccaaccaggtccgtatgcggtaccttttaaaggttcagtttaatttccttcagctgtggtgaatgttgatattaaataaaccagagatctgatcttcaagcaagaaaataagcagtgttgtacttgtgaattttgtgatattttatgtaataaaaactgtacaggtcta

SEQ ID NO: 375066 - DNA, 2006 bp, Homo sapiens
  misc_feature (23)..(23): n is a, c, g, or t
agcgggttgatgacgtcagcgtncgaattccatggcggcgcggcggcgacggagcaccggcggcggcagggcgagagcattaaatgaaagcaaaagagttaataatggcaacacggctccagaagactcttcccctgccaagaaaactcgtagatgccagagacaggagtcgaaaaagatgcctgtggctggaggaaaagctaataaggacaggacagaagacaagcaagatgaatctgtgaaggccttgctgttaaagggcaaagctcctgtggacccagagtgtacagccaaggtggggaaggctcatgtgtattgtgaaggaaatgatgtctatgatgtcatgctaaatcagaccaatctccagttcaacaacaacaagtactatctgattcagctattagaagatgatgcccagaggaacttcagtgtttggatgagatggggccgagttgggaaaatgggacagcacagcctggtggcttgttcaggcaatctcaacaaggccaaggaaatctttcagaagaaattccttgacaaaacgaaaaacaattgggaagatcgagaaaagtttgagaaggtgcctggaaaatatgatatgctacagatggactatgccaccaatactcaggatgaagaggaaacaaagaaagaggaatctcttaaatctcccttgaagccagagtcacagctagatcttcgggtacaggagttaataaagttgatctgtaatgttcaggccatggaagaaatgatgatggaaatgaagtataataccaagaaagccccacttgggaagctgacagtggcacaaatcaaggcaggttaccagtctcttaagaagattgaggattgtattcgggctggccagcatggacgagctctcatggaagcatgcaatgaattctacaccaggattccgcatgactttggactccgtactcctccactaatccggacacagaaggaactgtcagaaaaaatacaattactagaggctttgggagacattgaaattgctattaagctggtgaaaacagagctacaaagcccagaacacccattggaccaacactatagaaacctacattgtgccttgcgcccccttgaccatgaaagttatgagttcaaagtgatttcccagtacctacaatctacccatgctcccacacacagcgactataccatgaccttgctggatttgtttgaagtggagaaggatggtgagaaagaagccttcagagaggaccttcataacaggtctgagtctagctttgcgtttggaaagacactccttgcccgaaagtacagctgtagaacttataagagggagtcagaggaaggtgttggcttttttatgcttatggcctatctgtgcagaacaacagagtacaataatattggcttttccttaggatgcttctatggcatggttccaggatgagtaactgggtgggaatcttgagccatgggcttcgaattgccccacctgaagctcccatcacaggttacatgtttgggaaaggaatctactttgctgacatgtcttccaagagtgccaattactgctttgcctctcgcctaaagaatacaggactgctgctcttatcagaggtagctctaggtcagtgtaatgaactactagaggccaatcctaaggccgaaggattgcttcaaggtaaacatagcaccaaggggctgggcaagatggctcccagttctgcccacttcgtcaccctgaatgggagtacagtgccattaggaccagcaagtgacacaggaattctgaatccagatggttataccctcaactacaatgaatatattgtatataaccccaaccaggtccgtatgcggtaccttttaaaggttcagtttaatttccttcagctgtggtgaatgttgatattaaataaaccagagatctgatcttcaagcaagaaaataagcagtgttgtacttgtgaattttgtgatattttatgtaataaaaactgtacaggtcta

SEQ ID NO: 375067 - DNA, 911 bp, Homo sapiens
  misc_feature (23)..(23): n is a, c, g, or t
agcgggttgatgacgtcagcgtncgaattccatggcggcgcggcggcgacggagcaccggcggcggcagggcgagagcattaaatgaaagcaaaagagttaataatggcaacacggctccagaagactcttcccctgccaagaaaactcgtagatgccagagacaggagtcgaaaaagatgcctgtggctggaggaaaagctaataaggacaggacagaagacaagcaagatggtatgccaggaaggtcatgggccagcaaaagggtctctgaatctgtgaaggccttgctgttaaagggcaaagctcctgtggacccagagtgtacagccaaggtggggaaggctcatgtgtattgtgaaggaaatgatgtctatgatgtcatgctaaatcagaccaatctccagttcaacaacaacaagtactatctgattcagctattagaagatgatgcccagaggaacttcagtgtttggatgagatggggccgagttgggaaaatgggacagcacagcctggtggcttgttcaggcaatctcaacaaggccaaggaaatctttcagaagaaattccttgacaaaacgaaaaacaattgggaagatcgagaaaagtttgagaaggtgcctggaaaatatgatatgctacagatggactatgccaccaatactcaggatgaagaggaaacaaagaaagaggaatctcttaaatctcccttgaagccagagtcacagctagatcttcgggtacaggagttaataaagttgatctgtaatgttcaggccatggaagaaatgatgatggaaatgaagtataataccaagaaagccccacttgggcaattgaaggaacagactaaaaatcgtgtcctggaaggaaactacaggtactaccaggggattttccagtctgagg

SEQ ID NO: 375068 - DNA, 193 bp, Homo sapiens
ctgttactcttagggaactatcttatgtgtggcatttcctttgcagttgggaaaatgggacagcacagcctggtggcttgttcaggcaatctcaacaaggccaaggaaatctttcagaagaagtgagtgctgaaaagtgactacaaaaaaatataccctcctcttcttagatgtatattctctaaaaaatttt

SEQ ID NO: 375069 - DNA, 222 bp, Homo sapiens
tatggcctatctgtgcagaacaacagagtacaataatattggcttttccttaggatgcttctatggcatggttccaggatgagtaactgggtgggaatcttgagccatgggcttcgaattgccccacctgaagctcccatcacaggttacatggtgagtgaaattgaactctgggaggagcacaggggaaagggatacagtaatgttctcagtgcttttttt

SEQ ID NO: 375070 - DNA, 400 bp, Homo sapiens
cccacttcgtcaccctgtaagtactcagaaccaggaggactagaagactccttttggccagataagactacgttctctattgcagcttctgaaccagagactgatgttgacacactttttttccatttggcaggaatgggagtacagtgccattaggaccagcaagtgacacaggaattctgaatccagatggttataccctcaactacaatgaatatattgtatataaccccaaccaggtccgtatgcggtaccttttaaaggttcagtttaatttccttcagctgtggtgaatgttgatattaaataaaccagagatctgatcttcaagcaagaaaataagcagtgttgtacttgtgaattttgtgatattttatgtaataaaaactgtacaggtcta

SEQ ID NO: 375071 - DNA, 2007 bp, Homo sapiens
  misc_feature (23)..(23): n is a, c, g, or t
agcgggttgatgacgtcagcgtncgaattccatggcggcgcggcggcgacggagcaccggcggcggcagggcgagagcattaaatgaaagcaaaagagttaataatggcaacacggctccagaagactcttcccctgccaagaaaactcgtagatgccagagacaggagtcgaaaaagatgcctgtggctggaggaaaagctaataaggacaggacagaagacaagcaagatggtatgccaggaaggtcatgggccagcaaaagggtctctgaatctgtgaaggccttgctgttaaagggcaaagctcctgtggacccagagtgtacagccaaggtggggaaggctcatgtgtattgtgaaggaaatgatgtctatgatgtcatgctaaatcagaccaatctccagttcaacaacaacaagtactatctgattcagctattagaagatgatgcccagaggaacttcagtgtttggatgagatggggccgagttgggaaaatgggacagcacagcctggtggcttgttcaggcaatctcaacaaggccaaggaaatctttcagaagaaattccttgacaaaacgaaaaacaattgggaagatcgagaaaagtttgagaaggtgcctggaaaatatgatatgctacagatggactatgccaccaatactcaggatgaagaggaaacaaagaaagaggaatctcttaaatctcccttgaagccagagtcacagctagatcttcgggtacaggagttaataaagttgatctgtaatgttcaggccatggaagaaatgatgatggaaatgaagtataataccaagaaagccccacttgggaagctgacagtggcacaaatcaaggcaggttaccagtctcttaagaagattgaggattgtattcgggctggccagcatggacgagctctcatggaagcatgcaatgaattctacaccaggattccgcatgactttggactccgtactcctccactaatccggacacagaaggaactgtcagaaaaaatacaattactagaggctttgggagacattgaaattgctattaagctggtgaaaacagagctacaaagcccagaacacccattggaccaacactatagaaacctacattgtgccttgcgcccccttgaccatgaaagttatgagttcaaagtgatttcccagtacctacaatctacccatgctcccacacacagcgactataccatgaccttgctggatttgtttgaagtggagaaggatggtgagaaagaagccttcagagaggaccttcataacaggatgcttctatggcatggttccaggatgagtaactgggtgggaatcttgagccatgggcttcgaattgccccacctgaagctcccatcacaggttacatgtttgggaaaggaatctactttgctgacatgtcttccaagagtgccaattactgctttgcctctcgcctaaagaatacaggactgctgctcttatcagaggtagctctaggtcagtgtaatgaactactagaggccaatcctaaggccgaaggattgcttcaaggtaaacatagcaccaaggggctgggcaagatggctcccagttctgcccacttcgtcaccctgtaagtactcagaaccaggaggactagaagactccttttggccagataagactacgttctctattgcagcttctgaaccagagactgatgttgacacactttttttccatttggcaggaatgggagtacagtgccattaggaccagcaagtgacacaggaattctgaatccagatggttataccctcaactacaatgaatatattgtatataaccccaaccaggtccgtatgcggtaccttttaaaggttcagtttaatttccttcagctgtggtgaatgttgatattaaataaaccagagatctgatcttcaagcaagaaaataagcagtgttgtacttgtgaattttgtgatattttatgtaataaaaactgtacaggtcta

SEQ ID NO: 375072 - DNA, 1224 bp, Homo sapiens
ctgtgtttgtgccacggcactcagcctgggcaacaggagtgagaccccatcttaaaaacaggaaaaaaaaaagttgaaagatgaaagtcttttttagggaaggatgttaagtacagttcactagatgggatcctagtttggagtctgatctctgggtgggcctgcagggaagctgacagtggcacaaatcaaggcaggttaccagtctcttaagaagattgaggattgtattcgggctggccagcatggacgagctctcatggaagcatgcaatgaattctacaccaggattccgcatgactttggactccgtactcctccactaatccggacacagaaggaactgtcagaaaaaatacaattactagaggctttgggagacattgaaattgctattaagctggtgaaaacagagctacaaagcccagaacacccattggaccaacactatagaaacctacattgtgccttgcgcccccttgaccatgaaagttatgagttcaaagtgatttcccagtacctacaatctacccatgctcccacacacagcgactataccatgaccttgctggatttgtttgaagtggagaaggatggtgagaaagaagccttcagagaggaccttcataacaggatgcttctatggcatggttccaggatgagtaactgggtgggaatcttgagccatgggcttcgaattgccccacctgaagctcccatcacaggttacatgtttgggaaaggaatctactttgctgacatgtcttccaagagtgccaattactgctttgcctctcgcctaaagaatacaggactgctgctcttatcagaggtagctctaggtcagtgtaatgaactactagaggccaatcctaaggccgaaggattgcttcaaggtaaacatagcaccaaggggctgggcaagatggctcccagttctgcccacttcgtcaccctgaatgggagtacagtgccattaggaccagcaagtgacacaggaattctgaatccagatggttataccctcaactacaatgaatatattgtatataaccccaaccaggtccgtatgcggtaccttttaaaggttcagtttaatttccttcagctgtggtgaatgttgatattaaataaaccagagatctgatcttcaagcaagaaaataagcagtgttgtacttgtgaattttgtgatattttatgtaataaaaactgtacaggtcta

SEQ ID NO: 375073 - DNA, 2214 bp, Homo sapiens
  misc_feature (23)..(23): n is a, c, g, or t
agcgggttgatgacgtcagcgtncgaattccatggcggcgcggcggcgacggagcaccggcggcggcagggcgagagcattaaatgaaagcaaaagagttaataatggcaacacggctccagaagactcttcccctgccaagaaaactcgtagatgccagagacaggagtcgaaaaagatgcctgtggctggaggaaaagctaataaggacaggacagaagacaagcaagatgaatctgtgaaggccttgctgttaaagggcaaagctcctgtggacccagagtgtacagccaaggtggggaaggctcatgtgtattgtgaaggaaatgatgtctatgatgtcatgctaaatcagaccaatctccagttcaacaacaacaagtactatctgattcagctattagaagatgatgcccagaggaacttcagtgtttggatgagatggggccgagttgggaaaatgggacagcacagcctggtggcttgttcaggcaatctcaacaaggccaaggaaatctttcagaagaaattccttgacaaaacgaaaaacaattgggaagatcgagaaaagtttgagaaggtgcctggaaaatatgatatgctacagatggactatgccaccaatactcaggatgaagaggaaacaaagaaagaggaatctcttaaatctcccttgaagccagagtcacagctagatcttcgggtacaggagttaataaagttgatctgtaatgttcaggccatggaagaaatgatgatggaaatgaagtataataccaagaaagccccacttgggaagctgacagtggcacaaatcaaggcaggttaccagtctcttaagaagattgaggattgtattcgggctggccagcatggacgagctctcatggaagcatgcaatgaattctacaccaggattccgcatgactttggactccgtactcctccactaatccggacacagaaggaactgtcagaaaaaatacaattactagaggctttgggagacattgaaattgctattaagctggtgaaaacagagctacaaagcccagaacacccattggaccaacactatagaaacctacattgtgccttgcgcccccttgaccatgaaagttatgagttcaaagtgatttcccagtacctacaatctacccatgctcccacacacagcgactataccatgaccttgctggatttgtttgaagtggagaaggatggtgagaaagaagccttcagagaggaccttcataacaggatgcttctatggcatggttccaggatgagtaactgggtgggaatcttgagccatgggcttcgaattgccccacctgaagctcccatcacaggttacatgtttgggaaaggaatctactttgctgacatgtcttccaagagtgccaattactgctttgcctctcgcctaaagaatacaggactgctgctcttatcagaggtgagacaggagtatgtctgtgatctctagtttattaattccagtttttttccgatgagaaaagtttgaccccagaaccaagaggtttacctgggatagcttgagagaggaccaagtacaatttctagtacattggattcctctgctggagtaggggaaaaaagtactgatgggattttctgtttggctttggagccatctaattcttagtaggatatgggaattcaaaggttttttgctttgcaggtagctctaggtcagtgtaatgaactactagaggccaatcctaaggccgaaggattgcttcaaggtaaacatagcaccaaggggctgggcaagatggctcccagttctgcccacttcgtcaccctgtaagtactcagaaccaggaggactagaagactccttttggccagataagactacgttctctattgcagcttctgaaccagagactgatgttgacacactttttttccatttggcaggaatgggagtacagtgccattaggaccagcaagtgacacaggaattctgaatccagatggttataccctcaactacaatgaatatattgtatataaccccaaccaggtccgtatgcggtaccttttaaaggttcagtttaatttccttcagctgtggtgaatgttgatattaaataaaccagagatctgatcttcaagcaagaaaataagcagtgttgtacttgtgaattttgtgatattttatgtaataaaaactgtacaggtcta

SEQ ID NO: 375074 - DNA, 765 bp, Homo sapiens
  misc_feature (23)..(23): n is a, c, g, or t
agcgggttgatgacgtcagcgtncgaattccatggcggcgcggcggcgacggagcaccggcggcggcagggcgagagcattaaatgaaagcaaaagagttaataatggcaacacggctccagaagactcttcccctgccaagaaaactcgtagatgccagagacaggagtcgaaaaagatgcctgtggctggaggaaaagctaataaggacaggacagaagacaagcaagatgaatctgtgaaggccttgctgttaaagggcaaagctcctgtggacccagagtgtacagccaaggtggggaaggctcatgtgtattgtgaaggaaatgatgtctatgatgtcatgctaaatcagaccaatctccagttcaacaacaacaagtactatctgattcagctattagaagatgatgcccagaggaacttcagtgtttggatgagatggggccgagttgggaaaatgggacagcacagcctggtggcttgttcaggcaatctcaacaaggccaaggaaatctttcagaagaaggagcctaaaatggaatgttgtgaactcacacattgaataagtgaataggacaggattaacctgcacaagagattaggaaggaagcagtcatggaggtgagtggagatacaagagagtgctgtgtaatgaaattcctaggataatagtagtatcaaaggtgggagtactcagcgatggacaaatcatgctagggtaaatacatattgacgaggtgctgagtgttccgccgattaatt

SEQ ID NO: 375075 - DNA, 418 bp, Homo sapiens
agtctacatcagcctttttgtcttatttttcacaggtgatttcccagtacctacaatctacccatgctcccacacacagcgactataccatgaccttgctggatttgtttgaagtggagaaggatggtgagaaagaagccttcagagaggaccttcataacaggtctgagtctagctttgcgtttggaaagacactccttgcccgaaagtacagctgtagaacttataagagggagtcagaggaaggtgttggcttttttatgcttatggcctatctgtgcagaacaacagagtacaataatattggcttttccttaggatgcttctatggcatggttccaggatgagtaactgggtgggaatcttgagccatgggcttcgaattgccccacctgaagctcccatcacaggttacatg

SEQ ID NO: 375076 - DNA, 224 bp, Homo sapiens
tcctacatgtatttccaggacagaatatattatctctgccctgctgggccctttgtttttgaagtcagagtattggatgatttttatgggtaggacagagcaaaccaacacttacttcaaaatgctgaatgtagattaaaagatattcatttccattagaaataaagcaagatcgtatgcatatgtcctaccagttaaaggattctgtatcttaaagcctcaaa

SEQ ID NO: 375077 - DNA, 395 bp, Homo sapiens
gacttctaggaggtcctgtctgaggtagaatcagaaatggcttccctccattctaccagaaactgggaatgtgctggagattcaaagcacatcccaatgccactcctcatatactcaccactcttccctaaatcagctccagcgctgagtagggttaaggccttccctcacggcctggattgataggtttcccagtggaagtgtatatcttagagtcagtttaccctcctgtcacaccctggaaacttacaattttctgcctagcttatggtgtaagctgcatcctgccgtttctttcacatggtctgtggcttatttcaattttcctgttaaattcctgtgttgcttcttgaaagaaagttcacagtgtgagtctctacatgccattttgtctt

SEQ ID NO: 375078 - DNA, 508 bp, Homo sapiens
caggaacttttcccacaacttctccagccttattttcatattagctcttgaatgctcttgattttgatgccagccagtcttcttccacccaggggtagcaggctcagctttgccctagagtgtaaagtgaacattcagaaaaggagccaggttttcccatgactgttatggaatcttaacattgtatttgaagcacgattaggaagtgctgggcttgtaacaatcacagccagggttcatacgtccagattgttctttttaagtgcatcagctgaactaattgcttatattccagtgataccgccagtgttctgcattcttttaaatgaacttcatcgcaatcaccttataaccccttccccactcccactgctgagcacagtgtcttccaccaaatgggtggttcaaaaaagttggttgttagcactttgggaggctgaggtgggcagatcatgaggtcaggagatcaagaccatcctggctaacatggtgaaaccccgtctctact

SEQ ID NO: 375079 - DNA, 205 bp, Homo sapiens
cattttccttctcttgaatgaactgttttaaatagtgagccaggtgcccaaagccaagatctcaaagaagtaagtattttaggaaaaaagaaaggaccacgtttactttgggcatagcactttctcgtcctcattagtttcttctttacttagtaggtaactatgcaatgagctcaaaccgacccatcatcccaagaatggaaaa

SEQ ID NO: 375080 - DNA, 545 bp, Homo sapiens
aacgtctgtttctattcagcggattttctaatttctttgatcagcctaaatattttcttggcaaacggaaattgaccatgccatgaatatgataacaacctgcttggaaaaaaagctattttgtttccaagcagcagaaaaaaaggggtggggggacggtgaaggaggctggctgttaggaatgcctgtaacagattccagcacatacatctttttgcagtctctgaagcagctttgtgaaaactgccttttctctctcgtgaagcttctttccttcctctcctcctctcagttaaacacacacctggtctcctaaaagcctttgatactctttattaaaaaatagaacttcaatggatgcctcaggagactttccctttaaaacatagatgaaaggcaaggttaatacaatgttctcttaatccctttgccttctgagtcaaaataaatattttcttctgcatgtgattgtacatcctgccatttggctatggctataagcaaattgacggtaataaaaatgttttgaggctgtgaaaaaaatg

SEQ ID NO: 375081 - DNA, 378 bp, Homo sapiens
ggacactccttcaatgcttagccaggccattcacaactctctgccttagccttgcttcctacttgtactgagcctaaaggtcaaccagtggtgaaagtgtctggtcttctcaggtcttttctgaacatgcatcttgctctgtgcatgcactttctagtttccctggtatacatgggaaattttccaagcccttatgccccccatcccggttctgggagagcattgttattaagggatgcatgacaggaatgttgggcagaactgggaaagtattaaaaaagcattatcaggacagtcttggatattataacattttcaggaaatatgattaaaaaataattaaacttaaaacccctggattttccaaaagttttaaaa

SEQ ID NO: 375082 - DNA, 2222 bp, Homo sapiens
caaaaacgtctgcctttgtgagtttatatcatagtggaaggaaatagacaataaaaataagtaaaatatagacattggtatgtagatggtgataaatgataaggagaaatataaagacagatcggaagtgacaacagtggggaagtggaattggtatctgcatttaacgttgttttttaacagcaaattcaggatggggcagagagcagtgagaaaaatgaggcccttatgctcagcgcccccaaccccgcctcggtggggtcactattcattttggaacattgcccttgggaccaacatattctcagtggtccttgtgaaggtttccaccctaagtccctcatcctcaccaggcaatattcattaccctacagcaaactccggaggcaacgcggagaaagtgtgaatcaattcaagactaaggttgccaaaatgtttgatcagctctgcgtcagccttgacattacattacattacagatcccctgatcgccaccgtcgcagaagctctgaattaaaagcgtgcatgtagctgcacatccattgctggcacttcttccgttagcctccgctggaactggttagtgaggacccctccatttcacaagacagcttcggttttgcttcgttttgacttccgcaccccgaagctgtagcaccagtttgttttctcacggcacaggggcggcttccggggcgcggcgtgctgggggttgtagtccgcgctctgcctcctacttccattacagaaggcgatgggccgagagctgaggaactacaactcctagagtactccgcgccgccgggacgccgcgcggctgcggggctgggcgagcgcaaagatgtccgcgcccgctgccgggaggcgaggtgagtctttgatcgtaaccaggagcccggagctgaggcagttcctgcacgtgtcgcggggccggagaagctagggccaggtattccagggatgcaagaatcctgcaaatctgacgtgtaaactgcttccccagcctccaggcgagcccagcttttgcctcagataggccccttccttttccttctcggggaatcgacctcgggaaggggtgtgggcaaagagatgaggactctccctcttcgcccaggccaactcgggatatcccggagcctctggggaggcggtcactccgacgtctgaggacctgggccttggacccggactcgttatgaagagcgattcttcgacctctgcagcccccctcagggggctcgggggacccctgcgcagcagcgagccggtgcgcgcggtcccggcccgggcgccggccgtggaccttctggaggaggcggccgacctcctggtggtgcacctggacttccgggcggcgctggagacctgcgagcgggcctggcagagtctggccaaccacgccgtggcagaggaacccgcgggcacgtacgtgctgggctcggaaatgaaccgatttccgggcgctcttgtggtggggctcaaggtctcaggagttctgtccttcccagattgcccacaaggagctttacacctcgctttcatcagtggtttgtctccgagagggtggtcgctcatcgtgtgcccattctacagagaagggaagtcgtgtaacaaaaacttagtggggatcccacagccaattatttgctccttgttccaaggtacaatgacatgatgggaaggctgaatgtgtattaagtgctaagttctgtcagtaagcaggtggtaaaagtcctctcccaggtacctccgccctccccgccccgcccaaggttgtttattcctgaccttggctgatgatggggaatgggggtcatggcaggagcagcgttctggtccaattagaggactggattaaagaattaattcagggccgggagctggggcttacgcctgtaatcccagcactttgggaggccgaggcaggaggattgcttgagcccaggagttcgagaccagcctgggtaacataatgagccctcttctctaccaaaaagaagaaaaagaaaagaatccggagaaaaaaaccttgggcttgcattgctctttctaatgccaccagcctcgtctggcaggtgagggagtcatttctttgcattgtaaacttgggttaggccacgctagggaggtggtaggtagaatagctaaagttgaccacaaagaaggatgatctggagagccctggctgtgttttaggggactgggtgggagctcatttc

SEQ ID NO: 375083 - DNA, 3831 bp, Homo sapiens
caaaaacgtctgcctttgtgagtttatatcatagtggaaggaaatagacaataaaaataagtaaaatatagacattggtatgtagatggtgataaatgataaggagaaatataaagacagatcggaagtgacaacagtggggaagtggaattggtatctgcatttaacgttgttttttaacagcaaattcaggatggggcagagagcagtgagaaaaatgaggcccttatgctcagcgcccccaaccccgcctcggtggggtcactattcattttggaacattgcccttgggaccaacatattctcagtggtccttgtgaaggtttccaccctaagtccctcatcctcaccaggcaatattcattaccctacagcaaactccggaggcaacgcggagaaagtgtgaatcaattcaagactaaggttgccaaaatgtttgatcagctctgcgtcagccttgacattacattacattacagatcccctgatcgccaccgtcgcagaagctctgaattaaaagcgtgcatgtagctgcacatccattgctggcacttcttccgttagcctccgctggaactggttagtgaggacccctccatttcacaagacagcttcggttttgcttcgttttgacttccgcaccccgaagctgtagcaccagtttgttttctcacggcacaggggcggcttccggggcgcggcgtgctgggggttgtagtccgcgctctgcctcctacttccattacagaaggcgatgggccgagagctgaggaactacaactcctagagtactccgcgccgccgggacgccgcgcggctgcggggctgggcgagcgcaaagatgtccgcgcccgctgccgggaggcgaggccaactcgggatatcccggagcctctggggaggcggtcactccgacgtctgaggacctgggccttggacccggactcgttatgaagagcgattcttcgacctctgcagcccccctcagggggctcgggggacccctgcgcagcagcgagccggtgcgcgcggtcccggcccgggcgccggccgtggaccttctggaggaggcggccgacctcctggtggtgcacctggacttccgggcggcgctggagacctgcgagcgggcctggcagagtctggccaaccacgccgtggcagaggaacccgcgggcacctcattggaggtgaagtgctccctgtgtgttgtggggatccaggccctggcagaaatggatcggtggcaagaagtcctctcctgggtccttcagtattaccaggtccctgaaaagctaccccccaaagtcctggagctgtgcattcttttatacagcaaaatgcaagagcctggagctgtgctggatgtggtgggtgcctggctccaagacccagccaatcaaaaccttccagaatatggagccttggcagaatttcacgtgcagcgggtgctgctgcctctgggctgcttatcggaggctgaggagctagtggtgggctctgcagcctttggtgaggagcggcgactggatgtacttcaggccattcacacagcgaggcagcagcagaaacaggaacactcaggctctgaggaggcccagaagccaaacctggaaggctctgtctcccacaagttcctgtcactaccgatgttggttcgccagctttgggactctgcggtgagccacttcttttctctgcccttcaaaaagagtctcctggctgccttgatcctctgtctcctggtggtgagatttgatccagcttccccttcctccctgcacttcctctacaagctggcccagctcttccgctggatccggaaggctgcattttctcgcctctaccagctccgcatccgtgactgagggtccctgcgcaccacagcctctctgctcctcacgtccgtggccacagaagcagagcgacagagcgacacatccacaggcgcccctggggaaatgggaccagcctaatctcgcggagtgcactgtgtcttgctgcctgggtgccctctcctttgcaccctacttcagctggtcgcggtagatgatgtggaaacaaagcaggaccagcaggcacagcacctccagaacagtgccccggatgaccagaggccccttgaaaaggaggggtttggggacagggactgtgtccatgaaacattccatcttcttggtgaaggcaaggggttggttcttcaggtcaggatgttaatggagctggaagttcagaaaaagcctggtgaagtgacccttggcctttcacttcttgagaaacatacttctttgctgggcatggtgactcacgcctgtaatcccagcactttggaaggtacaggtgtgagccatcgcgcccggccaacttttctttagaaaaatgagtaaagtaggtaaacttcacaggccccttagaattaaatccttagggcatggttcaagtctgtaggaagcaaatctatacttttttatatgggcttttaagtagagcttagaaccctggggggagaaaagcagtcaggtgaggtttgagattccttctatagaatgatttcttaaaatgaaaatctgggcccacttaactaccctagataaaacgcttcaatggcttcccatggctcactggataacatctaaattcttcatggaattgaaggcccctatgtgctggttttggctaagatctcccctttgatgtgggtcccctgttgattatacgtgcggccttccagctgcccaccatcacagctacagctcgctccccttggcctctgtgccttggctcgcactgttcctactgaaggcctagcacctgctcttggcctggtgagcccctccaccttccaggcttactcaaagaattctttctgcccctccctgtgtcccgggacctgtttcatatcgcttctgtggtcgtgaccccatggtcttgtaattgtgaacttctttgctgccccttcgaagctggggagtgcttgttgcagatgcatccaagaggggtaattgcgtatcaacagtggatttgctggttgtttctacagggttctgaagcatgcaacatagaacagatacctttaaatttaggggcgctaaggaaagcaggaaccagtaatcctcttctgtggtgggatgggagggtgggggagaggggtggaatggagaggaaacaggctattgttggccagccctgggtggaggtgggtgcaagcaggacagatagtgcctgggggtgggggcggagggttcgcctctaggaaggggctagaagggatgaggaaatagttcatagcttcgtgcaggtgatccctattctgcgtgtatgtgtttgcacatgagtgtttgtagaccatagaccattaaaaaatacggaattcaaaagttacaaaaagggtattcttggaaaagaaagttgtttttttttagtcttgctgtgttgcccaggctggacctgaactcctgggcttgagcaagtcttcccctcagcctctggagtagctgggcctacagtgtgtgctgccacacccagctaatacagtctttctactcccgctctctattccccagtttcttgcccagaggcaacccttgccagtctgtttatccctccagatacagtctctgatagtaaacttttctttctcttacacaaatgatagtagtcacatacactacacacactgtgccacgtttaaaaagaaaaaaaacaattctcggctgggcgcggtggcgcatgcctgtaatcccagcactttgggaggccaaggtgggtgaatcacctgaagtcaggagttcgagatcagcatggccaacatggtgaagccccatctctact

SEQ ID NO: 375084 - DNA, 3315 bp, Homo sapiens
  misc_feature (2259)..(2259): n is a, c, g, or t
gctcttttggttcaaagatgtgtattgagctctactctgctctgcagggacagaactaagtatgtttgctattcaggggatacacagtcattccatgagcaagttacacaatgtaaaataaggacattgtgaaaaacaaaaccataccgtacataatgcactttatagtaaagtactgggaacagagtatttggtaaattgtaactataataataattttaaacagatccacaaatcacacttattattatattctgtttcacccgggctttgccaagcttcccacatttgtactagatcctcttggctttagtttctccccagcccttgtcaccagacatgcacacatccatcttctgggatttccgttctcttgcagaaaagtctgcatttaacgttgttttttaacagcaaattcaggatggggcagagagcagtgagaaaaatgaggcccttatgctcagcgcccccaaccccgcctcggtggggtcactattcattttggaacattgcccttgggaccaacatattctcagtggtccttgtgaaggtttccaccctaagtccctcatcctcaccaggcaatattcattaccctacagcaaactccggaggcaacgcggagaaagtgtgaatcaattcaagactaaggttgccaaaatgtttgatcagctctgcgtcagccttgacattacattacattacagatcccctgatcgccaccgtcgcagaagctctgaattaaaagcgtgcatgtagctgcacatccattgctggcacttcttccgttagcctccgctggaactggttagtgaggacccctccatttcacaagacagcttcggttttgcttcgttttgacttccgcaccccgaagctgtagcaccagtttgttttctcacggcacaggggcggcttccggggcgcggcgtgctgggggttgtagtccgcgctctgcctcctacttccattacagaaggcgatgggccgagagctgaggaactacaactcctagagtactccgcgccgccgggacgccgcgcggctgcggggctgggcgagcgcaaagatgtccgcgcccgctgccgggaggcgaggccaactcgggatatcccggagcctctggggaggcggtcactccgacgtctgaggacctgggccttggacccggactcgttatgaagagcgattcttcgacctctgcagcccccctcagggggctcgggggacccctgcgcagcagcgagccggtgcgcgcggtcccggcccgggcgccggccgtggaccttctggaggaggcggccgacctcctggtggtgcacctggacttccgggcggcgctggagacctgcgagcgggcctggcagagtctggccaaccacgccgtggcagaggaacccgcgggcacctcattggaggtgaagtgctccctgtgtgttgtggggatccaggccctggcagaaatggatcggtggcaagaagtcctctcctgggtccttcagtattaccaggtccctgaaaagctaccccccaaagtcctggagctgtgcattcttttatacagcaaaatgcaagagcctggagctgtgctggatgtggtgggtgcctggctccaagacccagccaatcaaaaccttccagaatatggagccttggcagaatttcacgtgcagcgggtgctgctgcctctgggctgcttatcggaggctgaggagctagtggtgggctctgcagcctttggtgaggagcggcgactggatgtacttcaggccattcacacagcgaggcagcagcagaaacaggaacactcaggctctgaggaggcccagaagccaaacctggaaggctctgtctcccacaagttcctgtcactaccgatgttggttcgccagctttgggactctgcggtgagccacttcttttctctgcccttcaaaaagagtctcctggctgccttgatcctctgtctcctggtggtgagatttgatccagcttccccttcctccctgcacttcctctacaagctggcccagctcttccgctggatccggaaggctgcattttctcgcctctaccagctccgcatccgtgactgagggtccctgcgcaccacagcctcccgagtagctgggactacaggtgcccaccacctcgcctggctaatatttttgtatttttagtagagtctgggtttcactgtgttggccgggatggtctcgatctcctgaacttgtgatccacccacctaggcctcccaangtgctgggattacaggtgtgagccatcgcgcccggccaacttttctttagaaaaatgagtaaagtaggtaaacttcacaggccccttagaattaaatccttagggcatggttcaagtctgtaggaagcaaatctatacttttttatatgggcttttaagtagagcttagaaccctggggggagaaaagcagtcaggtgaggtttgagattccttctatagaatgatttcttaaaatgaaaatctgggcccacttaactaccctagataaaacgcttcaatggcttcccatggctcactggataacatctaaattcttcatggaattgaaggcccctatgtgctggttttggctaagatctcccctttgatgtgggtcccctgttgattatacgtgcggccttccagctgcccaccatcacagctacagctcgctccccttggcctctgtgccttggctcgcactgttcctactgaaggcctagcacctgctcttggcctggtgagcccctccaccttccaggcttactcaaagaattctttctgcccctccctgtgtcccgggacctgtttcatatcgcttctgtggtcgtgaccccatggtcttgtaattgtgaacttctttgctgccccttcgaagctggggagtgcttgttgcagatgcatccaagaggggtaattgcgtatcaacagtggatttgctggttgtttctacagggttctgaagcatgcaacatagaacagatacctttaaatttaggggcgctaaggaaagcaggaaccagtaatcctcttctgtggtgggatgggagggtgggggagaggggtggaatggagaggaaacaggctattgttggccagccctgggtggaggtgggtgcaagcaggacagatagtgcctgggggtgggggcggagggttcgcctctaggaaggggctagaagggatgaggaaatagttcatagcttcgtgcaggtgatccctattctgcgtgtatgtgtttgcacatgagtgtttgtagaccatagaccattaaaaaatacggaattcaaaagtta

SEQ ID NO: 375085 - DNA, 5348 bp, Homo sapiens
  misc_feature (3842)..(3842): n is a, c, g, or t
gctcttttggttcaaagatgtgtattgagctctactctgctctgcagggacagaactaagtatgtttgctattcaggggatacacagtcattccatgagcaagttacacaatgtaaaataaggacattgtgaaaaacaaaaccataccgtacataatgcactttatagtaaagtactgggaacagagtatttggtaaattgtaactataataataattttaaacagatccacaaatcacacttattattatattctgtttcacccgggctttgccaagcttcccacatttgtactagatcctcttggctttagtttctccccagcccttgtcaccagacatgcacacatccatcttctgggatttccgttctcttgcagaaaagtctgcatttaacgttgttttttaacagcaaattcaggatggggcagagagcagtgagaaaaatgaggcccttatgctcagcgcccccaaccccgcctcggtggggtcactattcattttggaacattgcccttgggaccaacatattctcagtggtccttgtgaaggtttccaccctaagtccctcatcctcaccaggcaatattcattaccctacagcaaactccggaggcaacgcggagaaagtgtgaatcaattcaagactaaggttgccaaaatgtttgatcagctctgcgtcagccttgacattacattacattacagatcccctgatcgccaccgtcgcagaagctctgaattaaaagcgtgcatgtagctgcacatccattgctggcacttcttccgttagcctccgctggaactggttagtgaggacccctccatttcacaagacagcttcggttttgcttcgttttgacttccgcaccccgaagctgtagcaccagtttgttttctcacggcacaggggcggcttccggggcgcggcgtgctgggggttgtagtccgcgctctgcctcctacttccattacagaaggcgatgggccgagagctgaggaactacaactcctagagtactccgcgccgccgggacgccgcgcggctgcggggctgggcgagcgcaaagatgtccgcgcccgctgccgggaggcgaggccaactcgggatatcccggagcctctggggaggcggtcactccgacgtctgaggacctgggccttggacccggactcgttatgaagagcgattcttcgacctctgcagcccccctcagggggctcgggggacccctgcgcagcagcgagccggtgcgcgcggtcccggcccgggcgccggccgtggaccttctggaggaggcggccgacctcctggtggtgcacctggacttccgggcggcgctggagacctgcgagcgggcctggcagagtctggccaaccacgccgtggcagaggaacccgcgggcacctcattggaggtgaagtgctccctgtgtgttgtggggatccaggccctggcagaaatggatcggtggcaagaagtcctctcctgggtccttcagtattaccaggtccctgaaaagctaccccccaaagtcctggagctgtgcattcttttatacagcaaaatgcaagagcctggagctgtgctggatgtggtgggtgcctggctccaagacccagccaatcaaaaccttccagaatatggagccttggcagaatttcacgtgcagcgggtgctgctgcctctgggctgcttatcggaggctgaggagctagtggtgggctctgcagcctttggtgaggagcggcgactggatgtacttcaggccattcacacagcgaggcagcagcagaaacaggaacactcaggctctgaggaggcccagaagccaaacctggaagcttccccttcctccctgcacttcctctacaagctggcccagctcttccgctggatccggaaggctgcattttctcgcctctaccagctccgcatccgtgactgagggtccctgcgcaccacagcctctctgctcctcacgtccgtggccacagaagcagagcgacagagcgacacatccacaggcgcccctggggaaatgggaccagcctaatctcgcggagtgcactgtgtcttgctgcctgggtgccctctcctttgcaccctacttcagctggtcgcggtagatgatgtggaaacaaagcaggaccagcaggcacagcacctccagaacagtgccccggatgaccagaggccccttgaaaaggaggggtttggggacagggactgtgtccatgaaacattccatcttcttggtgaaggcaaggggttggttcttcaggtcaggatgttaatggagctggaagttcagaaaaagcctggtgaagtgacccttggcctttcacttcttgagaaacatacttctttgctgggcatggtgactcacgcctgtaatcccagcactttggaagggtgaggtgggtggatcacttgtggccaggagttcaaaacctgcctggccaacatggtgaaaccccatctctactaaaaatacaaaaattagctagatgtggtgcacgcctatagtcctagctacttgggaggctgaggcaggagaatcacttgagccagggaggcaaaagttgcagtgagctgagattgtgctaccgcactctctcaaaacaaacaaaaaaacatgccccacaggacagtaccttaattagctagagtagatctgagagggcctcttcttgcctgcactgtgctccccagagctgatctaattctgtatcaataggctgttcccatggtcttgccatgcgcttgaagctgcgggagccttctcactgttcaggctggggtgtggttttcagaaccaccgggttgactactgaaaaccaagtgagccttacagctcttatcgctgggtaaagtgatcttgcctggtgcctcttggtcttcagctcaattttccaggttgtcctggccaagccttgctctgttacgctcagtgcctctgcccactctttccccgccagcccttccctcccgccctgcaaacttgtcccttggctgtttcaccaggttctgcctgtatccttgcctccttggtacacaccatttcaggttcttccctttctgtgtcccattgtcctagttatgttctgttgtttgtgtaatgcccaaatttttctgctcgtgtggccttgaaaagtaggccagcctcagaggctgctgagctgaaaatggaactgagtaatcaggtgagctggaagggatgtggggggcggggcagacgggagacatgggttttgaaggcagtgaacaataaaaccttagggaggtggcaccgaggccttagcatttgaggagctgaaatgtttcagtgttgttttctcaccagccacaagcatcttatgagtttctgtgcaaggaagcgtagagcactgctgtgctgtcaggatgaagaagggctttctgcaggggctggcctttctctacccagaggccaagcaggctgccctgcactgtgtccttggttggtgttgatgcccaaaatagagaaggtgcttgctagcttttccttggtacattttcgggggttgcaaggcaacaagttttcttttgttttgtttgtttgtttgtttgtttgtttttgagatggagtctctgtcacccaggctggagtgcggtggcgtgatctcagctcactgcaagctccgcctcccgggttcatgccattctcctgcctcagcctcccgagtagctgggactacaggtgcccaccacctcgcctggctaatatttttgtatttttagtagagtctgggtttcactgtgttggccgggatggtctcgatctcctgaacttgtgatccacccacctaggcctcccaangtgctgggattacaggtgtgagccatcgcgcccggccaacttttctttagaaaaatgagtaaagtaggtaaacttcacaggccccttagaattaaatccttagggcatggttcaagtctgtaggaagcaaatctatacttttttatatgggcttttaagtagagcttagaaccctggggggagaaaagcagtcaggtgaggtttgagattccttctatagaatgatttcttaaaatgaaaatctgggcccacttaactaccctagataaaacgcttcaatggcttcccatggctcactggataacatctaaattcttcatggaattgaaggcccctatgtgctggttttggctaagatctcccctttgatgtgggtcccctgttgattatacgtgcggccttccagctgcccaccatcacagctacagctcgctccccttggcctctgtgccttggctcgcactgttcctactgaaggcctagcacctgctcttggcctggtgagcccctccaccttccaggcttactcaaagaattctttctgcccctccctgtgtcccgggacctgtttcatatcgcttctgtggtcgtgaccccatggtcttgtaattgtgaacttctttgctgccccttcgaagctggggagtgcttgttgcagatgcatccaagaggggtaattgcgtatcaacagtggatttgctggttgtttctacagggttctgaagcatgcaacatagaacagatacctttaaatttaggggcgctaaggaaagcaggaaccagtaatcctcttctgtggtgggatgggagggtgggggagaggggtggaatggagaggaaacaggctattgttggccagccctgggtggaggtgggtgcaagcaggacagatagtgcctgggggtgggggcggagggttcgcctctaggaaggggctagaagggatgaggaaatagttcatagcttcgtgcaggtgatccctattctgcgtgtatgtgtttgcacatgagtgtttgtagaccatagaccattaaaaaatacggaattcaaaagttacaaaaagggtattcttggaaaagaaagttgtttttttttagtcttgctgtgttgcccaggctggacctgaactcctgggcttgagcaagtcttcccctcagcctctggagtagctgggcctacagtgtgtgctgccacacccagctaatacagtctttctactcccgctctctattccccagtttcttgcccagaggcaacccttgccagtctgtttatccctccagatacagtctctgatagtaaacttttctttctcttacacaaatgatagtagtcacatacactacacacactgtgccacgtttaaaaagaaaaaaaacaattctcggctgggcgcggtggcgcatgcctgtaatcccagcactttgggaggccaaggtgggtgaatcacctgaagtcaggagttcgagatcagcatggccaacatggtgaagccccatctctact

SEQ ID NO: 375086 - DNA, 3546 bp, Homo sapiens
  misc_feature (2040)..(2040): n is a, c, g, or t
atctcagctatgctgaaacctgtttggaaaaacatgatttaactttagaaaataaaacttttaatacttaagagataacatgatgcaaacgttgcttgttggcctgactttccaggactaagaccctctgggaatcaactggggctcggtgacatggcgtaacctgctactggggtgtggtctcagacacaaaatcacactggatgttggtctacagaggcaggattctctcattgctggatgactcttgaaatgaagcctttgcctttgttacacatttggctttacaatcttcattgacaaatagttcggcaaagagtagaggagcacggccacgaagagcagcaggaccagcaggcacagcacctccagaacagtgccccggatgaccagaggccccttgaaaaggaggggtttggggacagggactgtgtccatgaaacattccatcttcttggtgaaggcaaggggttggttcttcaggtcaggatgttaatggagctggaagttcagaaaaagcctggtgaagtgacccttggcctttcacttcttgagaaacatacttctttgctgggcatggtgactcacgcctgtaatcccagcactttggaagggtgaggtgggtggatcacttgtggccaggagttcaaaacctgcctggccaacatggtgaaaccccatctctactaaaaatacaaaaattagctagatgtggtgcacgcctatagtcctagctacttgggaggctgaggcaggagaatcacttgagccagggaggcaaaagttgcagtgagctgagattgtgctaccgcactctctcaaaacaaacaaaaaaacatgccccacaggacagtaccttaattagctagagtagatctgagagggcctcttcttgcctgcactgtgctccccagagctgatctaattctgtatcaataggctgttcccatggtcttgccatgcgcttgaagctgcgggagccttctcactgttcaggctggggtgtggttttcagaaccaccgggttgactactgaaaaccaagtgagccttacagctcttatcgctgggtaaagtgatcttgcctggtgcctcttggtcttcagctcaattttccaggttgtcctggccaagccttgctctgttacgctcagtgcctctgcccactctttccccgccagcccttccctcccgccctgcaaacttgtcccttggctgtttcaccaggttctgcctgtatccttgcctccttggtacacaccatttcaggttcttccctttctgtgtcccattgtcctagttatgttctgttgtttgtgtaatgcccaaatttttctgctcgtgtggccttgaaaagtaggccagcctcagaggctgctgagctgaaaatggaactgagtaatcaggtgagctggaagggatgtggggggcggggcagacgggagacatgggttttgaaggcagtgaacaataaaaccttagggaggtggcaccgaggccttagcatttgaggagctgaaatgtttcagtgttgttttctcaccagccacaagcatcttatgagtttctgtgcaaggaagcgtagagcactgctgtgctgtcaggatgaagaagggctttctgcaggggctggcctttctctacccagaggccaagcaggctgccctgcactgtgtccttggttggtgttgatgcccaaaatagagaaggtgcttgctagcttttccttggtacattttcgggggttgcaaggcaacaagttttcttttgttttgtttgtttgtttgtttgtttgtttttgagatggagtctctgtcacccaggctggagtgcggtggcgtgatctcagctcactgcaagctccgcctcccgggttcatgccattctcctgcctcagcctcccgagtagctgggactacaggtgcccaccacctcgcctggctaatatttttgtatttttagtagagtctgggtttcactgtgttggccgggatggtctcgatctcctgaacttgtgatccacccacctaggcctcccaangtgctgggattacaggtgtgagccatcgcgcccggccaacttttctttagaaaaatgagtaaagtaggtaaacttcacaggccccttagaattaaatccttagggcatggttcaagtctgtaggaagcaaatctatacttttttatatgggcttttaagtagagcttagaaccctggggggagaaaagcagtcaggtgaggtttgagattccttctatagaatgatttcttaaaatgaaaatctgggcccacttaactaccctagataaaacgcttcaatggcttcccatggctcactggataacatctaaattcttcatggaattgaaggcccctatgtgctggttttggctaagatctcccctttgatgtgggtcccctgttgattatacgtgcggccttccagctgcccaccatcacagctacagctcgctccccttggcctctgtgccttggctcgcactgttcctactgaaggcctagcacctgctcttggcctggtgagcccctccaccttccaggcttactcaaagaattctttctgcccctccctgtgtcccgggacctgtttcatatcgcttctgtggtcgtgaccccatggtcttgtaattgtgaacttctttgctgccccttcgaagctggggagtgcttgttgcagatgcatccaagaggggtaattgcgtatcaacagtggatttgctggttgtttctacagggttctgaagcatgcaacatagaacagatacctttaaatttaggggcgctaaggaaagcaggaaccagtaatcctcttctgtggtgggatgggagggtgggggagaggggtggaatggagaggaaacaggctattgttggccagccctgggtggaggtgggtgcaagcaggacagatagtgcctgggggtgggggcggagggttcgcctctaggaaggggctagaagggatgaggaaatagttcatagcttcgtgcaggtgatccctattctgcgtgtatgtgtttgcacatgagtgtttgtagaccatagaccattaaaaaatacggaattcaaaagttacaaaaagggtattcttggaaaagaaagttgtttttttttagtcttgctgtgttgcccaggctggacctgaactcctgggcttgagcaagtcttcccctcagcctctggagtagctgggcctacagtgtgtgctgccacacccagctaatacagtctttctactcccgctctctattccccagtttcttgcccagaggcaacccttgccagtctgtttatccctccagatacagtctctgatagtaaacttttctttctcttacacaaatgatagtagtcacatacactacacacactgtgccacgtttaaaaagaaaaaaaacaattctcggctgggcgcggtggcgcatgcctgtaatcccagcactttgggaggccaaggtgggtgaatcacctgaagtcaggagttcgagatcagcatggccaacatggtgaagccccatctctact

SEQ ID NO: 375087 - DNA, 5344 bp, Homo sapiens
  misc_feature (3989)..(3989): n is a, c, g, or t
gctcttttggttcaaagatgtgtattgagctctactctgctctgcagggacagaactaagtatgtttgctattcaggggatacacagtcattccatgagcaagttacacaatgtaaaataaggacattgtgaaaaacaaaaccataccgtacataatgcactttatagtaaagtactgggaacagagtatttggtaaattgtaactataataataattttaaacagatccacaaatcacacttattattatattctgtttcacccgggctttgccaagcttcccacatttgtactagatcctcttggctttagtttctccccagcccttgtcaccagacatgcacacatccatcttctgggatttccgttctcttgcagaaaagtctgcatttaacgttgttttttaacagcaaattcaggatggggcagagagcagtgagaaaaatgaggcccttatgctcagcgcccccaaccccgcctcggtggggtcactattcattttggaacattgcccttgggaccaacatattctcagtggtccttgtgaaggtttccaccctaagtccctcatcctcaccaggcaatattcattaccctacagcaaactccggaggcaacgcggagaaagtgtgaatcaattcaagactaaggttgccaaaatgtttgatcagctctgcgtcagccttgacattacattacattacagatcccctgatcgccaccgtcgcagaagctctgaattaaaagcgtgcatgtagctgcacatccattgctggcacttcttccgttagcctccgctggaactggttagtgaggacccctccatttcacaagacagcttcggttttgcttcgttttgacttccgcaccccgaagctgtagcaccagtttgttttctcacggcacaggggcggcttccggggcgcggcgtgctgggggttgtagtccgcgctctgcctcctacttccattacagaaggcgatgggccgagagctgaggaactacaactcctagagtactccgcgccgccgggacgccgcgcggctgcggggctgggcgagcgcaaagatgtccgcgcccgctgccgggaggcgaggccaactcgggatatcccggagcctctggggaggcggtcactccgacgtctgaggacctgggccttggacccggactcgttatgaagagcgattcttcgacctctgcagcccccctcagggggctcgggggacccctgcgcagcagcgagccggtgcgcgcggtcccggcccgggcgccggccgtggaccttctggaggaggcggccgacctcctggtggtgcacctggacttccgggcggcgctggagacctgcgagcgggcctggcagagtctggccaaccacgccgtggcagaggaacccgcgggcacctcattggaggtgaagtgctccctgtgtgttgtggggatccaggccctggcagaaatggatcggtggcaagaagtcctctcctgggtccttcagtattaccaggtccctgaaaagctaccccccaaagtcctggagctgtgcattcttttatacagcaaaatgcaagagcctggagctgtgctggatgtggtgggtgcctggctccaagacccagccaatcaaaaccttccagaatatggagccttggcagaatttcacgtgcagcgggtgctgctgcctctgggctgcttatcggaggctgaggagctagtggtgggctctgcagcctttggtgaggagcggcgactggatgtacttcaggccattcacacagcgaggcagcagcagaaacaggaacactcaggctctgaggaggcccagaagccaaacctggaaggctctgtctcccacaagttcctgtcactaccgatgttggttcgccagctttgggactctgcggtgagccacttcttttctctgcccttcaaaaagagtctcctggctgccttgatcctctgtctcctggtggtgagatttgatccagcttccccttcctccctgcacttcctctacaagctggcccagctcttccgctggatccggaaggctgcattttctcgcctctaccagctccgcatccgtgactgagggtccctgcgcaccacagcctctctgctcctcacgtccgtggccacagaagcagagcgacagagcgacacatccacaggcgcccctggggaaatgggaccagcctaatctcgcggagtgcactgtgtcttgctgcctgggtgccctctcctttgcaccctacttcagctggtcgcggtagatgatgtggaaacaaagcaggaccagcaggcacagcacctccagaacagtgccccggatgaccagaggccccttgaaaaggaggggtttggggacagggactgtgtccatgaaacattccatcttcttggtgaaggcaaggggttggttcttcaggtcaggatgttaatggagctggaagttcagaaaaagcctggtgaagtgacccttggcctttcacttcttgagaaacatacttctttgctgggcatggtgactcacgcctgtaatcccagcactttggaagggtgaggtgggtggatcacttgtggccaggagttcaaaacctgcctggccaacatggtgaaaccccatctctactaaaaatacaaaaattagctagatgtggtgcacgcctatagtcctagctacttgggaggctgaggcaggagaatcacttgagccagggaggcaaaagttgcagtgagctgagattgtgctaccgcactctctcaaaacaaacaaaaaaacatgccccacaggacagtaccttaattagctagagtagatctgagagggcctcttcttgcctgcactgtgctccccagagctgatctaattctgtatcaataggctgttcccatggtcttgccatgcgcttgaagctgcgggagccttctcactgttcaggctggggtgtggttttcagaaccaccgggttgactactgaaaaccaagtgagccttacagctcttatcgctgggtaaagtgatcttgcctggtgcctcttggtcttcagctcaattttccaggttgtcctggccaagccttgctctgttacgctcagtgcctctgcccactctttccccgccagcccttccctcccgccctgcaaacttgtcccttggctgtttcaccaggttctgcctgtatccttgcctccttggtacacaccatttcaggttcttccctttctgtgtcccattgtcctagttatgttctgttgtttgtgtaatgcccaaatttttctgctcgtgtggccttgaaaagtaggccagcctcagaggctgctgagctgaaaatggaactgagtaatcaggtgagctggaagggatgtggggggcggggcagacgggagacatgggttttgaaggcagtgaacaataaaaccttagggaggtggcaccgaggccttagcatttgaggagctgaaatgtttcagtgttgttttctcaccagccacaagcatcttatgagtttctgtgcaaggaagcgtagagcactgctgtgctgtcaggatgaagaagggctttctgcaggggctggcctttctctacccagaggccaagcaggctgccctgcactgtgtccttggttggtgttgatgcccaaaatagagaaggtgcttgctagcttttccttggtacattttcgggggttgcaaggcaacaagttttcttttgttttgtttgtttgtttgtttgtttgtttttgagatggagtctctgtcacccaggctggagtgcggtggcgtgatctcagctcactgcaagctccgcctcccgggttcatgccattctcctgcctcagcctcccgagtagctgggactacaggtgcccaccacctcgcctggctaatatttttgtatttttagtagagtctgggtttcactgtgttggccgggatggtctcgatctcctgaacttgtgatccacccacctaggcctcccaangtgctgggattacaggtgtgagccatcgcgcccggccaacttttctttagaaaaatgagtaaagtaggtaaacttcacaggccccttagaattaaatccttagggcatggttcaagtctgtaggaagcaaatctatacttttttatatgggcttttaagtagagcttagaaccctggggggagaaaagcagtcaggtgaggtttgagattccttctatagaatgatttcttaaaatgaaaatctgggcccacttaactaccctagataaaacgcttcaatggcttcccatggctcactggataacatctaaattcttcatggaattgaaggcccctatgtgctggttttggctaagatctcccctttgatgtgggtcccctgttgattatacgtgcggccttccagctgcccaccatcacagctacagctcgctccccttggcctctgtgccttggctcgcactgttcctactgaaggcctagcacctgctcttggcctggtgagcccctccaccttccaggcttactcaaagaattctttctgcccctccctgtgtcccgggacctgtttcatatcgcttctgtggtcgtgaccccatggtcttgtaattgtgaacttctttgctgccccttcgaagctggggagtgcttgttgcagatgcatccaagaggggtggaatggagaggaaacaggctattgttggccagccctgggtggaggtgggtgcaagcaggacagatagtgcctgggggtgggggcggagggttcgcctctaggaaggggctagaagggatgaggaaatagttcatagcttcgtgcaggtgatccctattctgcgtgtatgtgtttgcacatgagtgtttgtagaccatagaccattaaaaaatacggaattcaaaagttacaaaaagggtattcttggaaaagaaagttgtttttttttagtcttgctgtgttgcccaggctggacctgaactcctgggcttgagcaagtcttcccctcagcctctggagtagctgggcctacagtgtgtgctgccacacccagctaatacagtctttctactcccgctctctattccccagtttcttgcccagaggcaacccttgccagtctgtttatccctccagatacagtctctgatagtaaacttttctttctcttacacaaatgatagtagtcacatacactacacacactgtgccacgtttaaaaagaaaaaaaacaattctcggctgggcgcggtggcgcatgcctgtaatcccagcactttgggaggccaaggtgggtgaatcacctgaagtcaggagttcgagatcagcatggccaacatggtgaagccccatctctact

SEQ ID NO: 375088 - DNA, 3860 bp, Homo sapiens
  misc_feature (2354)..(2354): n is a, c, g, or t
gctcttttggttcaaagatgtgtattgagctctactctgctctgcagggacagaactaagtatgtttgctattcaggggatacacagtcattccatgagcaagttacacaatgtaaaataaggacattgtgaaaaacaaaaccataccgtacataatgcactttatagtaaagtactgggaacagagtatttggtaaattgtaactataataataattttaaacagatccacaaatcacacttattattatattctgtttcacccgggctttgccaagcttcccacatttgtactagatcctcttggctttagtttctccccagcccttgtcaccagacatgcacacatccatcttctgggatttccgttctcttgcagaaaagtctgcatttaacgttgttttttaacagcaaattcaggatggggcagagagcagtgagaaaaatgaggcccttatgctcagcgcccccaaccccgcctcggtggggtcactattcattttggaacattgcccttgggaccaacatattctcagtggtccttgtgaaggtttccaccctaagtccctcatcctcaccaggcaatattcattaccctacagcaaactccggaggcaacgcggagaaagtgtgaatcaattcaagactaaggttgccaaaatgtttgatcagctctgcgtcagccttgacattacattacattacagatcccctgatcgccaccgtcgcagaagctctgaattaaaagcgtgcatgtagctgcacatccattgctggcacttcttccgttagcctccgctggaactggttagtgaggacccctccatttcacaagacagcttcggttttgcttcgttttgacttccgcaccccgaagctgtagcaccagtttgttttctcacggcacaggggcggcttccggggcgcggcgtgctgggggttgtagtccgcgctctgcctcctacttccattacagaaggcgatgggccgagagctgaggaactacaactcctagagtactccgcgccgccgggacgccgcgcggctgcggggctgggcgagcgcaaagatgtccgcgcccgctgccgggaggcgaggccaactcgggatatcccggagcctctggggaggcggtcactccgacgtctgaggacctgggccttggacccggactcgttatgaagagcgattcttcgacctctgcagcccccctcagggggctcgggggacccctgcgcagcagcgagccggtgcgcgcggtcccggcccgggcgccggccgtggaccttctggaggaggcggccgacctcctggtggtgcacctggacttccgggcggcgctggagacctgcgagcgggcctggcagagtctggccaaccacgccgtggcagaggaacccgcgggcacctcattggaggtgaagtgctccctgtgtgttgtggggatccaggccctggcagaaatggatcggtggcaagaagtcctctcctgggtccttcagtattaccaggtccctgaaaagctaccccccaaagtcctggagctgtgcattcttttatacagcaaaatgcaagagcctggagctgtgctggatgtggtgggtgcctggctccaagacccagccaatcaaaaccttccagaatatggagccttggcagaatttcacgtgcagcgggtgctgctgcctctgggctgcttatcggaggctgaggagctagtggtgggctctgcagcctttggtgaggagcggcgactggatgtacttcaggccattcacacagcgaggcagcagcagaaacaggaacactcaggctctgaggaggcccagaagccaaacctggaagcttccccttcctccctgcacttcctctacaagctggcccagctcttccgctggatccggaaggctgcattttctcgcctctaccagctccgcatccgtgactgagggtccctgcgcaccacagcctctctgctcctcacgtccgtggccacagaagcagagcgacagagcgacacatccacaggcgcccctggggaaatgggaccagcctaatctcgcggagtgcactgtgtcttgctgcctgggtgccctctcctttgcaccctacttcagctggtcgcggtagatgatgtggaaacaaagcaggaccagcaggcacagcacctccagaacagtgccccggatgaccagaggccccttgaaaaggaggggtttggggacagggactgtgtccatgaaacattccatcttcttggtgaaggcaaggggttggttcttcaggtcaggatgttaatggagctggaagttcagaaaaagcctggtgaagtgaccccacctaggcctcccaangtgctgggattacaggtgtgagccatcgcgcccggccaacttttctttagaaaaatgagtaaagtaggtaaacttcacaggccccttagaattaaatccttagggcatggttcaagtctgtaggaagcaaatctatacttttttatatgggcttttaagtagagcttagaaccctggggggagaaaagcagtcaggtgaggtttgagattccttctatagaatgatttcttaaaatgaaaatctgggcccacttaactaccctagataaaacgcttcaatggcttcccatggctcactggataacatctaaattcttcatggaattgaaggcccctatgtgctggttttggctaagatctcccctttgatgtgggtcccctgttgattatacgtgcggccttccagctgcccaccatcacagctacagctcgctccccttggcctctgtgccttggctcgcactgttcctactgaaggcctagcacctgctcttggcctggtgagcccctccaccttccaggcttactcaaagaattctttctgcccctccctgtgtcccgggacctgtttcatatcgcttctgtggtcgtgaccccatggtcttgtaattgtgaacttctttgctgccccttcgaagctggggagtgcttgttgcagatgcatccaagaggggtaattgcgtatcaacagtggatttgctggttgtttctacagggttctgaagcatgcaacatagaacagatacctttaaatttaggggcgctaaggaaagcaggaaccagtaatcctcttctgtggtgggatgggagggtgggggagaggggtggaatggagaggaaacaggctattgttggccagccctgggtggaggtgggtgcaagcaggacagatagtgcctgggggtgggggcggagggttcgcctctaggaaggggctagaagggatgaggaaatagttcatagcttcgtgcaggtgatccctattctgcgtgtatgtgtttgcacatgagtgtttgtagaccatagaccattaaaaaatacggaattcaaaagttacaaaaagggtattcttggaaaagaaagttgtttttttttagtcttgctgtgttgcccaggctggacctgaactcctgggcttgagcaagtcttcccctcagcctctggagtagctgggcctacagtgtgtgctgccacacccagctaatacagtctttctactcccgctctctattccccagtttcttgcccagaggcaacccttgccagtctgtttatccctccagatacagtctctgatagtaaacttttctttctcttacacaaatgatagtagtcacatacactacacacactgtgccacgtttaaaaagaaaaaaaacaattctcggctgggcgcggtggcgcatgcctgtaatcccagcactttgggaggccaaggtgggtgaatcacctgaagtcaggagttcgagatcagcatggccaacatggtgaagccccatctctact

SEQ ID NO: 375089 - DNA, 1795 bp, Homo sapiens
  misc_feature (26)..(26): n is a, c, g, or t
  misc_feature (289)..(289): n is a, c, g, or t
acagcagcaatgtaataagtggatantagcggctgtcggtcgaattctgggatgttcactctgtcacccaggctggagtgcggtggcgtgatctcagctcactgcaagctccgcctcccgggttcatgccattctcctgcctcagcctcccgagtagctgggactacaggtgcccaccacctcgcctggctaatatttttgtatttttagtagagtctgggtttcactgtgttggccgggatggtctcgatctcctgaacttgtgatccacccacctaggcctcccaangtgctgggattacaggtgtgagccatcgcgcccggccaacttttctttagaaaaatgagtaaagtaggtaaacttcacaggccccttagaattaaatccttagggcatggttcaagtctgtaggaagcaaatctatacttttttatatgggcttttaagtagagcttagaaccctggggggagaaaagcagtcaggtgaggtttgagattccttctatagaatgatttcttaaaatgaaaatctgggcccacttaactaccctagataaaacgcttcaatggcttcccatggctcactggataacatctaaattcttcatggaattgaaggcccctatgtgctggttttggctaagatctcccctttgatgtgggtcccctgttgattatacgtgcggccttccagctgcccaccatcacagctacagctcgctccccttggcctctgtgccttggctcgcactgttcctactgaaggcctagcacctgctcttggcctggtgagcccctccaccttccaggcttactcaaagaattctttctgcccctccctgtgtcccgggacctgtttcatatcgcttctgtggtcgtgaccccatggtcttgtaattgtgaacttctttgctgccccttcgaagctggggagtgcttgttgcagatgcatccaagaggggtaattgcgtatcaacagtggatttgctggttgtttctacagggttctgaagcatgcaacatagaacagatacctttaaatttaggggcgctaaggaaagcaggaaccagtaatcctcttctgtggtgggatgggagggtgggggagaggggtggaatggagaggaaacaggctattgttggccagccctgggtggaggtgggtgcaagcaggacagatagtgcctgggggtgggggcggagggttcgcctctaggaaggggctagaagggatgaggaaatagttcatagcttcgtgcaggtgatccctattctgcgtgtatgtgtttgcacatgagtgtttgtagaccatagaccattaaaaaatacggaattcaaaagttacaaaaagggtattcttggaaaagaaagttgtttttttttagtcttgctgtgttgcccaggctggacctgaactcctgggcttgagcaagtcttcccctcagcctctggagtagctgggcctacagtgtgtgctgccacacccagctaatacagtctttctactcccgctctctattccccagtttcttgcccagaggcaacccttgccagtctgtttatccctccagatacagtctctgatagtaaacttttctttctcttacacaaatgatagtagtcacatacactacacacactgtgccacgtttaaaaagaaaaaaaacaattctcggctgggcgcggtggcgcatgcctgtaatcccagcactttgggaggccaaggtgggtgaatcacctgaagtcaggagttcgagatcagcatggccaacatggtgaagccccatctctact

SEQ ID NO: 375090 - DNA, 3176 bp, Homo sapiens
gctcttttggttcaaagatgtgtattgagctctactctgctctgcagggacagaactaagtatgtttgctattcaggggatacacagtcattccatgagcaagttacacaatgtaaaataaggacattgtgaaaaacaaaaccataccgtacataatgcactttatagtaaagtactgggaacagagtatttggtaaattgtaactataataataattttaaacagatccacaaatcacacttattattatattctgtttcacccgggctttgccaagcttcccacatttgtactagatcctcttggctttagtttctccccagcccttgtcaccagacatgcacacatccatcttctgggatttccgttctcttgcagaaaagtctgcatttaacgttgttttttaacagcaaattcaggatggggcagagagcagtgagaaaaatgaggcccttatgctcagcgcccccaaccccgcctcggtggggtcactattcattttggaacattgcccttgggaccaacatattctcagtggtccttgtgaaggtttccaccctaagtccctcatcctcaccaggcaatattcattaccctacagcaaactccggaggcaacgcggagaaagtgtgaatcaattcaagactaaggttgccaaaatgtttgatcagctctgcgtcagccttgacattacattacattacagatcccctgatcgccaccgtcgcagaagctctgaattaaaagcgtgcatgtagctgcacatccattgctggcacttcttccgttagcctccgctggaactggttagtgaggacccctccatttcacaagacagcttcggttttgcttcgttttgacttccgcaccccgaagctgtagcaccagtttgttttctcacggcacaggggcggcttccggggcgcggcgtgctgggggttgtagtccgcgctctgcctcctacttccattacagaaggcgatgggccgagagctgaggaactacaactcctagagtactccgcgccgccgggacgccgcgcggctgcggggctgggcgagcgcaaagatgtccgcgcccgctgccgggaggcgaggtgagtctttgatcgtaaccaggagcccggagctgaggcagttcctgcacgtgtcgcggggccggagaagctagggccaggtattccagggatgcaagaatcctgcaaatctgacgtgtaaactgcttccccagcctccaggcgagcccagcttttgcctcagataggccccttccttttccttctcggggaatcgacctcgggaaggggtgtgggcaaagagatgaggactctccctcttcgcccaggccaactcgggatatcccggagcctctggggaggcggtcactccgacgtctgaggacctgggccttggacccggactcgttatgaagagcgattcttcgacctctgcagcccccctcagggggctcgggggacccctgcgcagcagcgagccggtgcgcgcggtcccggcccgggcgccggccgtggaccttctggaggaggcggccgacctcctggtggtgcacctggacttccgggcggcgctggagacctgcgagcgggcctggcagagtctggccaaccacgccgtggcagaggaacccgcgggcacctcattggaggtgaagtgctcccttacaggtgtgagccatcgcgcccggccaacttttctttagaaaaatgagtaaagtaggtaaacttcacaggccccttagaattaaatccttagggcatggttcaagtctgtaggaagcaaatctatacttttttatatgggcttttaagtagagcttagaaccctggggggagaaaagcagtcaggtgaggtttgagattccttctatagaatgatttcttaaaatgaaaatctgggcccacttaactaccctagataaaacgcttcaatggcttcccatggctcactggataacatctaaattcttcatggaattgaaggcccctatgtgctggttttggctaagatctcccctttgatgtgggtcccctgttgattatacgtgcggccttccagctgcccaccatcacagctacagctcgctccccttggcctctgtgccttggctcgcactgttcctactgaaggcctagcacctgctcttggcctggtgagcccctccaccttccaggcttactcaaagaattctttctgcccctccctgtgtcccgggacctgtttcatatcgcttctgtggtcgtgaccccatggtcttgtaattgtgaacttctttgctgccccttcgaagctggggagtgcttgttgcagatgcatccaagaggggtaattgcgtatcaacagtggatttgctggttgtttctacagggttctgaagcatgcaacatagaacagatacctttaaatttaggggcgctaaggaaagcaggaaccagtaatcctcttctgtggtgggatgggagggtgggggagaggggtggaatggagaggaaacaggctattgttggccagccctgggtggaggtgggtgcaagcaggacagatagtgcctgggggtgggggcggagggttcgcctctaggaaggggctagaagggatgaggaaatagttcatagcttcgtgcaggtgatccctattctgcgtgtatgtgtttgcacatgagtgtttgtagaccatagaccattaaaaaatacggaattcaaaagttacaaaaagggtattcttggaaaagaaagttgtttttttttagtcttgctgtgttgcccaggctggacctgaactcctgggcttgagcaagtcttcccctcagcctctggagtagctgggcctacagtgtgtgctgccacacccagctaatacagtctttctactcccgctctctattccccagtttcttgcccagaggcaacccttgccagtctgtttatccctccagatacagtctctgatagtaaacttttctttctcttacacaaatgatagtagtcacatacactacacacactgtgccacgtttaaaaagaaaaaaaacaattctcggctgggcgcggtggcgcatgcctgtaatcccagcactttgggaggccaaggtgggtgaatcacctgaagtcaggagttcgagatcagcatggccaacatggtgaagccccatctctact

SEQ ID NO: 375091 - DNA, 3249 bp, Homo sapiens
gctcttttggttcaaagatgtgtattgagctctactctgctctgcagggacagaactaagtatgtttgctattcaggggatacacagtcattccatgagcaagttacacaatgtaaaataaggacattgtgaaaaacaaaaccataccgtacataatgcactttatagtaaagtactgggaacagagtatttggtaaattgtaactataataataattttaaacagatccacaaatcacacttattattatattctgtttcacccgggctttgccaagcttcccacatttgtactagatcctcttggctttagtttctccccagcccttgtcaccagacatgcacacatccatcttctgggatttccgttctcttgcagaaaagtctgcatttaacgttgttttttaacagcaaattcaggatggggcagagagcagtgagaaaaatgaggcccttatgctcagcgcccccaaccccgcctcggtggggtcactattcattttggaacattgcccttgggaccaacatattctcagtggtccttgtgaaggtttccaccctaagtccctcatcctcaccaggcaatattcattaccctacagcaaactccggaggcaacgcggagaaagtgtgaatcaattcaagactaaggttgccaaaatgtttgatcagctctgcgtcagccttgacattacattacattacagatcccctgatcgccaccgtcgcagaagctctgaattaaaagcgtgcatgtagctgcacatccattgctggcacttcttccgttagcctccgctggaactggttagtgaggacccctccatttcacaagacagcttcggttttgcttcgttttgacttccgcaccccgaagctgtagcaccagtttgttttctcacggcacaggggcggcttccggggcgcggcgtgctgggggttgtagtccgcgctctgcctcctacttccattacagaaggcgatgggccgagagctgaggaactacaactcctagagtactccgcgccgccgggacgccgcgcggctgcggggctgggcgagcgcaaagatgtccgcgcccgctgccgggaggcgaggccaactcgggatatcccggagcctctggggaggcggtcactccgacgtctgaggacctgggccttggacccggactcgttatgaagagcgattcttcgacctctgcagcccccctcagggggctcgggggacccctgcgcagcagcgagccggtgcgcgcggtcccggcccgggcgccggccgtggaccttctggaggaggcggccgacctcctggtggtgcacctggacttccgggcggcgctggagacctgcgagcgggcctggcagagtctggccaaccacgccgtggcagaggaacccgcgggcacctcattggaggtgaagtgctccctgtgtgttgtggggatccaggccctggcagaaatggatcggtggcaagaagtcctctcctgggtccttcagtattaccaggtccctgaaaagctaccccccaaagtcctggagctgtgcattcttttatacagcaaaatgcaagagcctggagctgtgctggatgtggtgggtgcctggctccaagacccagccaatcaaaaccttccagaatatggagccttggcagaatttcacgtgcagcgggtgctgctgcctctgggctgcttatcggaggctgaggagctagtggtgggctctgcagcctttggtgaggagcggcgactggatgtacttcaggccattcacacagcgaggcagcagcagaaacaggaacactcaggctctgaggaggccccttagaattaaatccttagggcatggttcaagtctgtaggaagcaaatctatacttttttatatgggcttttaagtagagcttagaaccctggggggagaaaagcagtcaggtgaggtttgagattccttctatagaatgatttcttaaaatgaaaatctgggcccacttaactaccctagataaaacgcttcaatggcttcccatggctcactggataacatctaaattcttcatggaattgaaggcccctatgtgctggttttggctaagatctcccctttgatgtgggtcccctgttgattatacgtgcggccttccagctgcccaccatcacagctacagctcgctccccttggcctctgtgccttggctcgcactgttcctactgaaggcctagcacctgctcttggcctggtgagcccctccaccttccaggcttactcaaagaattctttctgcccctccctgtgtcccgggacctgtttcatatcgcttctgtggtcgtgaccccatggtcttgtaattgtgaacttctttgctgccccttcgaagctggggagtgcttgttgcagatgcatccaagaggggtaattgcgtatcaacagtggatttgctggttgtttctacagggttctgaagcatgcaacatagaacagatacctttaaatttaggggcgctaaggaaagcaggaaccagtaatcctcttctgtggtgggatgggagggtgggggagaggggtggaatggagaggaaacaggctattgttggccagccctgggtggaggtgggtgcaagcaggacagatagtgcctgggggtgggggcggagggttcgcctctaggaaggggctagaagggatgaggaaatagttcatagcttcgtgcaggtgatccctattctgcgtgtatgtgtttgcacatgagtgtttgtagaccatagaccattaaaaaatacggaattcaaaagttacaaaaagggtattcttggaaaagaaagttgtttttttttagtcttgctgtgttgcccaggctggacctgaactcctgggcttgagcaagtcttcccctcagcctctggagtagctgggcctacagtgtgtgctgccacacccagctaatacagtctttctactcccgctctctattccccagtttcttgcccagaggcaacccttgccagtctgtttatccctccagatacagtctctgatagtaaacttttctttctcttacacaaatgatagtagtcacatacactacacacactgtgccacgtttaaaaagaaaaaaaacaattctcggctgggcgcggtggcgcatgcctgtaatcccagcactttgggaggccaaggtgggtgaatcacctgaagtcaggagttcgagatcagcatggccaacatggtgaagccccatctctact

SEQ ID NO: 375092 - DNA, 3802 bp, Homo sapiens
gctcttttggttcaaagatgtgtattgagctctactctgctctgcagggacagaactaagtatgtttgctattcaggggatacacagtcattccatgagcaagttacacaatgtaaaataaggacattgtgaaaaacaaaaccataccgtacataatgcactttatagtaaagtactgggaacagagtatttggtaaattgtaactataataataattttaaacagatccacaaatcacacttattattatattctgtttcacccgggctttgccaagcttcccacatttgtactagatcctcttggctttagtttctccccagcccttgtcaccagacatgcacacatccatcttctgggatttccgttctcttgcagaaaagtctgcatttaacgttgttttttaacagcaaattcaggatggggcagagagcagtgagaaaaatgaggcccttatgctcagcgcccccaaccccgcctcggtggggtcactattcattttggaacattgcccttgggaccaacatattctcagtggtccttgtgaaggtttccaccctaagtccctcatcctcaccaggcaatattcattaccctacagcaaactccggaggcaacgcggagaaagtgtgaatcaattcaagactaaggttgccaaaatgtttgatcagctctgcgtcagccttgacattacattacattacagatcccctgatcgccaccgtcgcagaagctctgaattaaaagcgtgcatgtagctgcacatccattgctggcacttcttccgttagcctccgctggaactggttagtgaggacccctccatttcacaagacagcttcggttttgcttcgttttgacttccgcaccccgaagctgtagcaccagtttgttttctcacggcacaggggcggcttccggggcgcggcgtgctgggggttgtagtccgcgctctgcctcctacttccattacagaaggcgatgggccgagagctgaggaactacaactcctagagtactccgcgccgccgggacgccgcgcggctgcggggctgggcgagcgcaaagatgtccgcgcccgctgccgggaggcgaggccaactcgggatatcccggagcctctggggaggcggtcactccgacgtctgaggacctgggccttggacccggactcgttatgaagagcgattcttcgacctctgcagcccccctcagggggctcgggggacccctgcgcagcagcgagccggtgcgcgcggtcccggcccgggcgccggccgtggaccttctggaggaggcggccgacctcctggtggtgcacctggacttccgggcggcgctggagacctgcgagcgggcctggcagagtctggccaaccacgccgtggcagaggaacccgcgggcacctcattggaggtgaagtgctccctgtgtgttgtggggatccaggccctggcagaaatggatcggtggcaagaagtcctctcctgggtccttcagtattaccaggtccctgaaaagctaccccccaaagtcctggagctgtgcattcttttatacagcaaaatgcaagagcctggagctgtgctggatgtggtgggtgcctggctccaagacccagccaatcaaaaccttccagaatatggagccttggcagaatttcacgtgcagcgggtgctgctgcctctgggctgcttatcggaggctgaggagctagtggtgggctctgcagcctttggtgaggagcggcgactggatgtacttcaggccattcacacagcgaggcagcagcagaaacaggaacactcaggctctgaggaggcccagaagccaaacctggaaggctctgtctcccacaagttcctgtcactaccgatgttggttcgccagctttgggactctgcggtgagccacttcttttctctgcccttcaaaaagagtctcctggctgccttgatcctctgtctcctggtggtgagatttgatccagcttccccttcctccctgcacttcctctacaagctggcccagctcttccgctggatccggaaggctgcattttctcgcctctaccagctccgcatccgtgactgagggtccctgcgcaccacagcctctctgctcctcacgtccgtggccacagaagcagagcgacagagcgacacatccacaggcgcccctggggaaatgggaccagcctaatctcgcggagtgcactgtgtcttgctgcctgggtgccctctcctttgcaccctacttcagctggtcgcggtagatgatgtggaaacaaagcaggaccagcaggcacagcacctccagaacagtgccccggatgaccagaggccccttgaaaaggaggggtttggggacagggactgtgtccatgaaacattccatcttcttggtgaaggcaaggggttggttcttcaggtcaggatgttaatggagctggaagttcagaaaaagcctggtgaagtgacccttggcctttcacttcttgagaaacatacttctttgctgggcatggtgactcacgcctgtaatcccagcactttggaagggtgaggtgggtggatcacttgtggccaggagttcaaaacctgcctggccaacatggtgaaaccccatctctactaaaaatacaaaaattagctagatgtggtgcacgcctatagtcctagctacttgggaggctgaggcaggagaatcacttgagccagggaggcaaaagttgcagtgagctgagattgtgctaccgcactctctcaaaacaaacaaaaaaacatgccccacaggacagtaccttaattagctagagtagatctgagagggcctcttcttgcctgcactgtgctccccagagctgatctaattctgtatcaataggctgttcccatggtcttgccatgcgcttgaagctgcgggagccttctcactgttcaggctggggtgtggttttcagaaccaccgggttgactactgaaaaccaagtgagccttacagctcttatcgctgggtaaagtgatcttgcctggtgcctcttggtcttcagctcaattttccaggttgtcctggccaagccttgctctgttacgctcagtgcctctgcccactctttccccgccagcccttccctcccgccctgcaaacttgtcccttggctgtttcaccaggttctgcctgtatccttgcctccttggtacacaccatttcaggttcttccctttctgtgtcccattgtcctagttatgttctgttgtttgtgtaatgcccaaatttttctgctcgtgtggccttgaaaagtaggccagcctcagaggctgctgagctgaaaatggaactgagtaatcaggtgagctggaagggatgtggggggcggggcagacgggagacatgggttttgaaggcagtgaacaataaaaccttagggaggtggcaccgaggccttagcatttgaggagctgaaatgtttcagtgttgttttctcaccagccacaagcatcttatgagtttctgtgcaaggaagcgtagagcactgctgtgctgtcaggatgaagaagggctttctgcaggggctggcctttctctacccagaggccaagcaggctgccctgcactgtgtccttggttggtgttgatgcccaaaatagagaaggtgcttgctagcttttccttggtacattttcgggggttgcaaggcaacaagttttcttttgttttgtttgtttgtttgtttgtttgtttttgagatggagtctcactccagtctgggcgacggagtgagattctgtctcaaaaaa

SEQ ID NO: 375093 - DNA, 3373 bp, Homo sapiens
gctcttttggttcaaagatgtgtattgagctctactctgctctgcagggacagaactaagtatgtttgctattcaggggatacacagtcattccatgagcaagttacacaatgtaaaataaggacattgtgaaaaacaaaaccataccgtacataatgcactttatagtaaagtactgggaacagagtatttggtaaattgtaactataataataattttaaacagatccacaaatcacacttattattatattctgtttcacccgggctttgccaagcttcccacatttgtactagatcctcttggctttagtttctccccagcccttgtcaccagacatgcacacatccatcttctgggatttccgttctcttgcagaaaagtctgcatttaacgttgttttttaacagcaaattcaggatggggcagagagcagtgagaaaaatgaggcccttatgctcagcgcccccaaccccgcctcggtggggtcactattcattttggaacattgcccttgggaccaacatattctcagtggtccttgtgaaggtttccaccctaagtccctcatcctcaccaggcaatattcattaccctacagcaaactccggaggcaacgcggagaaagtgtgaatcaattcaagactaaggttgccaaaatgtttgatcagctctgcgtcagccttgacattacattacattacagatcccctgatcgccaccgtcgcagaagctctgaattaaaagcgtgcatgtagctgcacatccattgctggcacttcttccgttagcctccgctggaactggttagtgaggacccctccatttcacaagacagcttcggttttgcttcgttttgacttccgcaccccgaagctgtagcaccagtttgttttctcacggcacaggggcggcttccggggcgcggcgtgctgggggttgtagtccgcgctctgcctcctacttccattacagaaggcgatgggccgagagctgaggaactacaactcctagagtactccgcgccgccgggacgccgcgcggctgcggggctgggcgagcgcaaagatgtccgcgcccgctgccgggaggcgaggccaactcgggatatcccggagcctctggggaggcggtcactccgacgtctgaggacctgggccttggacccggactcgttatgaagagcgattcttcgacctctgcagcccccctcagggggctcgggggacccctgcgcagcagcgagccggtgcgcgcggtcccggcccgggcgccggccgtggaccttctggaggaggcggccgacctcctggtggtgcacctggacttccgggcggcgctggagacctgcgagcgggcctggcagagtctggccaaccacgccgtggcagaggaacccgcgggcacctcattggaggtgaagtgctccctgtgtgttgtggggatccaggccctggcagaaatggatcggtggcaagaagtcctctcctgggtccttcagtattaccaggtccctgaaaagctaccccccaaagtcctggagctgtgcattcttttatacagcaaaatgcaagagcctggagctgtgctggatgtggtgggtgcctggctccaagacccagccaatcaaaaccttccagaatatggagccttggcagaatttcacgtgcagcgggtgctgctgcctctgggctgcttatcggaggctgaggagctagtggtgggctctgcagcctttggtgaggagcggcgactggatgtacttcaggccattcacacagcgaggcagcagcagaaacaggaacactcaggctctgaggaggcccagaagccaaacctggaaggctctgtctcccacaagttcctgtcactaccgatgttggttcgccagctttgggactctgcggtgagccacttcttttctctgcccttcaaaaagagtctcctggctgccttgatcctctgtctcctggtggtgagatttgatccagcttccccttcctccctgcacttcctctacaagctggcccagctcttccgctggatccggaaggctgcattttctcgcctctaccagctccgcatccgtgactgagggtccctgcgcaccacagcctctctgctcctcacgtccgtggccacagaagcagagcgacagagcgacacatccacaggcgcccctggggaaatgggaccagcctaatctcgcggagtgcactgtgtcttgctgcctgggtgccctctcctttgcaccctacttcagctggtcgcggtagatgatgtggaaacaaagcaggaccagcaggcacagcacctccagaacagtgccccggatgaccagaggccccttgaaaaggaggggtttggggacagggactgtgtccatgaaacattccatcttcttggtgaaggcaaggggttggttcttcaggtcaggatgttaatggagctggaagttcagaaaaagcctggtgaagtgacccttggcctttcacttcttgagaaacatacttctttgctgggcatggtgactcacgcctgtaatcccagcactttggaagggtgaggtgggtggatcacttgtggccaggagttcaaaacctgcctggccaacatggtgaaaccccatctctactaaaaatacaaaaattagctagatgtggtgcacgcctatagtcctagctacttgggaggctgaggcaggagaatcacttgaacccgggaggcaagggttgcagtgagctgagatcgcaccattgcactcccacctgggcaacaaagagtgaaacttggtctcagaaacgaaacaaaacacaaaaacctttctcagtcccagcatatgtggagcagcctcattcttcatagctgtgtgtcattccgttgcgtgatggggtcacagagcacagacctggtgcccttttcctttttaatatgtggaaacccctccatgctttccaaagcctacaagtacagcagccccaagtttagggtgagcagcagtggtcagagctctttactattacttttgggcaaacgcaagccaggctggcaaccaccactgccgccgaggggagatacaagcaggccagttcacactctggacgtttagtttctttctacatctagaaggtggcctctgctatccacttaaagcagcccaaggaactgtcagaaagcgaaagtgatgacatgaaccgcgagtagggcacctccctgtgccgtcgtctgctttccttcctccctcccagcctccctgtgccgtcctctctgcgtttgaaacgcagagaggatcagcaagcaggagtatgattccttggtcaacgcgagaacctctctgcgtttgtcctctctcgtttgtcctctctgcgtttg

SEQ ID NO: 375094 - DNA, 184 bp, Homo sapiens
agtctcccagggtgggagatggcagagtgacaggtgagaggggtgggacgttcactgtagtctccctctgccctgcagcttccccttcctccctgcacttcctctacaagctggcccagctcttccgctggatccggaaggctgcattttctcgcctctaccagctccgcatccgtgactgagg

SEQ ID NO: 375095 - DNA, 4059 bp, Homo sapiens
gctcttttggttcaaagatgtgtattgagctctactctgctctgcagggacagaactaagtatgtttgctattcaggggatacacagtcattccatgagcaagttacacaatgtaaaataaggacattgtgaaaaacaaaaccataccgtacataatgcactttatagtaaagtactgggaacagagtatttggtaaattgtaactataataataattttaaacagatccacaaatcacacttattattatattctgtttcacccgggctttgccaagcttcccacatttgtactagatcctcttggctttagtttctccccagcccttgtcaccagacatgcacacatccatcttctgggatttccgttctcttgcagaaaagtctgcatttaacgttgttttttaacagcaaattcaggatggggcagagagcagtgagaaaaatgaggcccttatgctcagcgcccccaaccccgcctcggtggggtcactattcattttggaacattgcccttgggaccaacatattctcagtggtccttgtgaaggtttccaccctaagtccctcatcctcaccaggcaatattcattaccctacagcaaactccggaggcaacgcggagaaagtgtgaatcaattcaagactaaggttgccaaaatgtttgatcagctctgcgtcagccttgacattacattacattacagatcccctgatcgccaccgtcgcagaagctctgaattaaaagcgtgcatgtagctgcacatccattgctggcacttcttccgttagcctccgctggaactggttagtgaggacccctccatttcacaagacagcttcggttttgcttcgttttgacttccgcaccccgaagctgtagcaccagtttgttttctcacggcacaggggcggcttccggggcgcggcgtgctgggggttgtagtccgcgctctgcctcctacttccattacagaaggcgatgggccgagagctgaggaactacaactcctagagtactccgcgccgccgggacgccgcgcggctgcggggctgggcgagcgcaaagatgtccgcgcccgctgccgggaggcgaggccaactcgggatatcccggagcctctggggaggcggtcactccgacgtctgaggacctgggccttggacccggactcgttatgaagagcgattcttcgacctctgcagcccccctcagggggctcgggggacccctgcgcagcagcgagccggtgcgcgcggtcccggcccgggcgccggccgtggaccttctggaggaggcggccgacctcctggtggtgcacctggacttccgggcggcgctggagacctgcgagcgggcctggcagagtctggccaaccacgccgtggcagaggaacccgcgggcacctcattggaggtgaagtgctccctgtgtgttgtggggatccaggccctggcagaaatggatcggtggcaagaagtcctctcctgggtccttcagtattaccaggtccctgaaaagctaccccccaaagtcctggagctgtgcattcttttatacagcaaaatgcaagagcctggagctgtgctggatgtggtgggtgcctggctccaagacccagccaatcaaaaccttccagaatatggagccttggcagaatttcacgtgcagcgggtgctgctgcctctgggctgcttatcggaggctgaggagctagtggtgggctctgcagcctttggtgaggagcggcgactggatgtacttcaggccattcacacagcgaggcagcagcagaaacaggaacactcaggctctgaggaggcccagaagccaaacctggaaggctctgtctcccacaagttcctgtcactaccgatgttggttcgccagctttgggactctgcggtgagccacttcttttctctgcccttcaaaaagagtctcctggctgccttgatcctctgtctcctggtggtgagatttgatccagcttccccttcctccctgcacttcctctacaagctggcccagctcttccgctggatccggaaggctgcattttctcgcctctaccagctccgcatccgtgactgagggtccctgcgcaccacagcctctctgctcctcacgtccgtggccacagaagcagagcgacagagcgacacatccacaggcgcccctggggaaatgggaccagcctaatctcgcggagtgcactgtgtcttgctgcctgggtgccctctcctttgcaccctacttcagctggtcgcggtagatgatgtggaaacaaagcaggaccagcaggcacagcacctccagaacagtgccccggatgaccagaggccccttgaaaaggaggggtttggggacagggactgtgtccatgaaacattccatcttcttggtgaaggcaaggggttggttcttcaggtcaggatgttaatggagctggaagttcagaaaaagcctggtgaagtgacccttggcctttcacttcttgagaaacatacttctttgctgggcatggtgactcacgcctgtaatcccagcactttggaaggtacaggtgtgagccatcgcgcccggccaacttttctttagaaaaatgagtaaagtaggtaaacttcacaggccccttagaattaaatccttagggcatggttcaagtctgtaggaagcaaatctatacttttttatatgggcttttaagtagagcttagaaccctggggggagaaaagcagtcaggtgaggtttgagattccttctatagaatgatttcttaaaatgaaaatctgggcccacttaactaccctagataaaacgcttcaatggcttcccatggctcactggataacatctaaattcttcatggaattgaaggcccctatgtgctggttttggctaagatctcccctttgatgtgggtcccctgttgattatacgtgcggccttccagctgcccaccatcacagctacagctcgctccccttggcctctgtgccttggctcgcactgttcctactgaaggcctagcacctgctcttggcctggtgagcccctccaccttccaggcttactcaaagaattctttctgcccctccctgtgtcccgggacctgtttcatatcgcttctgtggtcgtgaccccatggtcttgtaattgtgaacttctttgctgccccttcgaagctggggagtgcttgttgcagatgcatccaagaggggtaattgcgtatcaacagtggatttgctggttgtttctacagggttctgaagcatgcaacatagaacagatacctttaaatttaggggcgctaaggaaagcaggaaccagtaatcctcttctgtggtgggatgggagggtgggggagaggggtggaatggagaggaaacaggctattgttggccagccctgggtggaggtgggtgcaagcaggacagatagtgcctgggggtgggggcggagggttcgcctctaggaaggggctagaagggatgaggaaatagttcatagcttcgtgcaggtgatccctattctgcgtgtatgtgtttgcacatgagtgtttgtagaccatagaccattaaaaaatacggaattcaaaagttacaaaaagggtattcttggaaaagaaagttgtttttttttagtcttgctgtgttgcccaggctggacctgaactcctgggcttgagcaagtcttcccctcagcctctggagtagctgggcctacagtgtgtgctgccacacccagctaatacagtctttctactcccgctctctattccccagtttcttgcccagaggcaacccttgccagtctgtttatccctccagatacagtctctgatagtaaacttttctttctcttacacaaatgatagtagtcacatacactacacacactgtgccacgtttaaaaagaaaaaaaacaattctcggctgggcgcggtggcgcatgcctgtaatcccagcactttgggaggccaaggtgggtgaatcacctgaagtcaggagttcgagatcagcatggccaacatggtgaagccccatctctact

SEQ ID NO: 375096 - DNA, 5495 bp, Homo sapiens
  misc_feature (3989)..(3989): n is a, c, g, or t
gctcttttggttcaaagatgtgtattgagctctactctgctctgcagggacagaactaagtatgtttgctattcaggggatacacagtcattccatgagcaagttacacaatgtaaaataaggacattgtgaaaaacaaaaccataccgtacataatgcactttatagtaaagtactgggaacagagtatttggtaaattgtaactataataataattttaaacagatccacaaatcacacttattattatattctgtttcacccgggctttgccaagcttcccacatttgtactagatcctcttggctttagtttctccccagcccttgtcaccagacatgcacacatccatcttctgggatttccgttctcttgcagaaaagtctgcatttaacgttgttttttaacagcaaattcaggatggggcagagagcagtgagaaaaatgaggcccttatgctcagcgcccccaaccccgcctcggtggggtcactattcattttggaacattgcccttgggaccaacatattctcagtggtccttgtgaaggtttccaccctaagtccctcatcctcaccaggcaatattcattaccctacagcaaactccggaggcaacgcggagaaagtgtgaatcaattcaagactaaggttgccaaaatgtttgatcagctctgcgtcagccttgacattacattacattacagatcccctgatcgccaccgtcgcagaagctctgaattaaaagcgtgcatgtagctgcacatccattgctggcacttcttccgttagcctccgctggaactggttagtgaggacccctccatttcacaagacagcttcggttttgcttcgttttgacttccgcaccccgaagctgtagcaccagtttgttttctcacggcacaggggcggcttccggggcgcggcgtgctgggggttgtagtccgcgctctgcctcctacttccattacagaaggcgatgggccgagagctgaggaactacaactcctagagtactccgcgccgccgggacgccgcgcggctgcggggctgggcgagcgcaaagatgtccgcgcccgctgccgggaggcgaggccaactcgggatatcccggagcctctggggaggcggtcactccgacgtctgaggacctgggccttggacccggactcgttatgaagagcgattcttcgacctctgcagcccccctcagggggctcgggggacccctgcgcagcagcgagccggtgcgcgcggtcccggcccgggcgccggccgtggaccttctggaggaggcggccgacctcctggtggtgcacctggacttccgggcggcgctggagacctgcgagcgggcctggcagagtctggccaaccacgccgtggcagaggaacccgcgggcacctcattggaggtgaagtgctccctgtgtgttgtggggatccaggccctggcagaaatggatcggtggcaagaagtcctctcctgggtccttcagtattaccaggtccctgaaaagctaccccccaaagtcctggagctgtgcattcttttatacagcaaaatgcaagagcctggagctgtgctggatgtggtgggtgcctggctccaagacccagccaatcaaaaccttccagaatatggagccttggcagaatttcacgtgcagcgggtgctgctgcctctgggctgcttatcggaggctgaggagctagtggtgggctctgcagcctttggtgaggagcggcgactggatgtacttcaggccattcacacagcgaggcagcagcagaaacaggaacactcaggctctgaggaggcccagaagccaaacctggaaggctctgtctcccacaagttcctgtcactaccgatgttggttcgccagctttgggactctgcggtgagccacttcttttctctgcccttcaaaaagagtctcctggctgccttgatcctctgtctcctggtggtgagatttgatccagcttccccttcctccctgcacttcctctacaagctggcccagctcttccgctggatccggaaggctgcattttctcgcctctaccagctccgcatccgtgactgagggtccctgcgcaccacagcctctctgctcctcacgtccgtggccacagaagcagagcgacagagcgacacatccacaggcgcccctggggaaatgggaccagcctaatctcgcggagtgcactgtgtcttgctgcctgggtgccctctcctttgcaccctacttcagctggtcgcggtagatgatgtggaaacaaagcaggaccagcaggcacagcacctccagaacagtgccccggatgaccagaggccccttgaaaaggaggggtttggggacagggactgtgtccatgaaacattccatcttcttggtgaaggcaaggggttggttcttcaggtcaggatgttaatggagctggaagttcagaaaaagcctggtgaagtgacccttggcctttcacttcttgagaaacatacttctttgctgggcatggtgactcacgcctgtaatcccagcactttggaagggtgaggtgggtggatcacttgtggccaggagttcaaaacctgcctggccaacatggtgaaaccccatctctactaaaaatacaaaaattagctagatgtggtgcacgcctatagtcctagctacttgggaggctgaggcaggagaatcacttgagccagggaggcaaaagttgcagtgagctgagattgtgctaccgcactctctcaaaacaaacaaaaaaacatgccccacaggacagtaccttaattagctagagtagatctgagagggcctcttcttgcctgcactgtgctccccagagctgatctaattctgtatcaataggctgttcccatggtcttgccatgcgcttgaagctgcgggagccttctcactgttcaggctggggtgtggttttcagaaccaccgggttgactactgaaaaccaagtgagccttacagctcttatcgctgggtaaagtgatcttgcctggtgcctcttggtcttcagctcaattttccaggttgtcctggccaagccttgctctgttacgctcagtgcctctgcccactctttccccgccagcccttccctcccgccctgcaaacttgtcccttggctgtttcaccaggttctgcctgtatccttgcctccttggtacacaccatttcaggttcttccctttctgtgtcccattgtcctagttatgttctgttgtttgtgtaatgcccaaatttttctgctcgtgtggccttgaaaagtaggccagcctcagaggctgctgagctgaaaatggaactgagtaatcaggtgagctggaagggatgtggggggcggggcagacgggagacatgggttttgaaggcagtgaacaataaaaccttagggaggtggcaccgaggccttagcatttgaggagctgaaatgtttcagtgttgttttctcaccagccacaagcatcttatgagtttctgtgcaaggaagcgtagagcactgctgtgctgtcaggatgaagaagggctttctgcaggggctggcctttctctacccagaggccaagcaggctgccctgcactgtgtccttggttggtgttgatgcccaaaatagagaaggtgcttgctagcttttccttggtacattttcgggggttgcaaggcaacaagttttcttttgttttgtttgtttgtttgtttgtttgtttttgagatggagtctctgtcacccaggctggagtgcggtggcgtgatctcagctcactgcaagctccgcctcccgggttcatgccattctcctgcctcagcctcccgagtagctgggactacaggtgcccaccacctcgcctggctaatatttttgtatttttagtagagtctgggtttcactgtgttggccgggatggtctcgatctcctgaacttgtgatccacccacctaggcctcccaangtgctgggattacaggtgtgagccatcgcgcccggccaacttttctttagaaaaatgagtaaagtaggtaaacttcacaggccccttagaattaaatccttagggcatggttcaagtctgtaggaagcaaatctatacttttttatatgggcttttaagtagagcttagaaccctggggggagaaaagcagtcaggtgaggtttgagattccttctatagaatgatttcttaaaatgaaaatctgggcccacttaactaccctagataaaacgcttcaatggcttcccatggctcactggataacatctaaattcttcatggaattgaaggcccctatgtgctggttttggctaagatctcccctttgatgtgggtcccctgttgattatacgtgcggccttccagctgcccaccatcacagctacagctcgctccccttggcctctgtgccttggctcgcactgttcctactgaaggcctagcacctgctcttggcctggtgagcccctccaccttccaggcttactcaaagaattctttctgcccctccctgtgtcccgggacctgtttcatatcgcttctgtggtcgtgaccccatggtcttgtaattgtgaacttctttgctgccccttcgaagctggggagtgcttgttgcagatgcatccaagaggggtaattgcgtatcaacagtggatttgctggttgtttctacagggttctgaagcatgcaacatagaacagatacctttaaatttaggggcgctaaggaaagcaggaaccagtaatcctcttctgtggtgggatgggagggtgggggagaggggtggaatggagaggaaacaggctattgttggccagccctgggtggaggtgggtgcaagcaggacagatagtgcctgggggtgggggcggagggttcgcctctaggaaggggctagaagggatgaggaaatagttcatagcttcgtgcaggtgatccctattctgcgtgtatgtgtttgcacatgagtgtttgtagaccatagaccattaaaaaatacggaattcaaaagttacaaaaagggtattcttggaaaagaaagttgtttttttttagtcttgctgtgttgcccaggctggacctgaactcctgggcttgagcaagtcttcccctcagcctctggagtagctgggcctacagtgtgtgctgccacacccagctaatacagtctttctactcccgctctctattccccagtttcttgcccagaggcaacccttgccagtctgtttatccctccagatacagtctctgatagtaaacttttctttctcttacacaaatgatagtagtcacatacactacacacactgtgccacgtttaaaaagaaaaaaaacaattctcggctgggcgcggtggcgcatgcctgtaatcccagcactttgggaggccaaggtgggtgaatcacctgaagtcaggagttcgagatcagcatggccaacatggtgaagccccatctctact

SEQ ID NO: 375097 - DNA, 5743 bp, Homo sapiens
  misc_feature (4237)..(4237): n is a, c, g, or t
gctcttttggttcaaagatgtgtattgagctctactctgctctgcagggacagaactaagtatgtttgctattcaggggatacacagtcattccatgagcaagttacacaatgtaaaataaggacattgtgaaaaacaaaaccataccgtacataatgcactttatagtaaagtactgggaacagagtatttggtaaattgtaactataataataattttaaacagatccacaaatcacacttattattatattctgtttcacccgggctttgccaagcttcccacatttgtactagatcctcttggctttagtttctccccagcccttgtcaccagacatgcacacatccatcttctgggatttccgttctcttgcagaaaagtctgcatttaacgttgttttttaacagcaaattcaggatggggcagagagcagtgagaaaaatgaggcccttatgctcagcgcccccaaccccgcctcggtggggtcactattcattttggaacattgcccttgggaccaacatattctcagtggtccttgtgaaggtttccaccctaagtccctcatcctcaccaggcaatattcattaccctacagcaaactccggaggcaacgcggagaaagtgtgaatcaattcaagactaaggttgccaaaatgtttgatcagctctgcgtcagccttgacattacattacattacagatcccctgatcgccaccgtcgcagaagctctgaattaaaagcgtgcatgtagctgcacatccattgctggcacttcttccgttagcctccgctggaactggttagtgaggacccctccatttcacaagacagcttcggttttgcttcgttttgacttccgcaccccgaagctgtagcaccagtttgttttctcacggcacaggggcggcttccggggcgcggcgtgctgggggttgtagtccgcgctctgcctcctacttccattacagaaggcgatgggccgagagctgaggaactacaactcctagagtactccgcgccgccgggacgccgcgcggctgcggggctgggcgagcgcaaagatgtccgcgcccgctgccgggaggcgaggtgagtctttgatcgtaaccaggagcccggagctgaggcagttcctgcacgtgtcgcggggccggagaagctagggccaggtattccagggatgcaagaatcctgcaaatctgacgtgtaaactgcttccccagcctccaggcgagcccagcttttgcctcagataggccccttccttttccttctcggggaatcgacctcgggaaggggtgtgggcaaagagatgaggactctccctcttcgcccaggccaactcgggatatcccggagcctctggggaggcggtcactccgacgtctgaggacctgggccttggacccggactcgttatgaagagcgattcttcgacctctgcagcccccctcagggggctcgggggacccctgcgcagcagcgagccggtgcgcgcggtcccggcccgggcgccggccgtggaccttctggaggaggcggccgacctcctggtggtgcacctggacttccgggcggcgctggagacctgcgagcgggcctggcagagtctggccaaccacgccgtggcagaggaacccgcgggcacctcattggaggtgaagtgctccctgtgtgttgtggggatccaggccctggcagaaatggatcggtggcaagaagtcctctcctgggtccttcagtattaccaggtccctgaaaagctaccccccaaagtcctggagctgtgcattcttttatacagcaaaatgcaagagcctggagctgtgctggatgtggtgggtgcctggctccaagacccagccaatcaaaaccttccagaatatggagccttggcagaatttcacgtgcagcgggtgctgctgcctctgggctgcttatcggaggctgaggagctagtggtgggctctgcagcctttggtgaggagcggcgactggatgtacttcaggccattcacacagcgaggcagcagcagaaacaggaacactcaggctctgaggaggcccagaagccaaacctggaaggctctgtctcccacaagttcctgtcactaccgatgttggttcgccagctttgggactctgcggtgagccacttcttttctctgcccttcaaaaagagtctcctggctgccttgatcctctgtctcctggtggtgagatttgatccagcttccccttcctccctgcacttcctctacaagctggcccagctcttccgctggatccggaaggctgcattttctcgcctctaccagctccgcatccgtgactgagggtccctgcgcaccacagcctctctgctcctcacgtccgtggccacagaagcagagcgacagagcgacacatccacaggcgcccctggggaaatgggaccagcctaatctcgcggagtgcactgtgtcttgctgcctgggtgccctctcctttgcaccctacttcagctggtcgcggtagatgatgtggaaacaaagcaggaccagcaggcacagcacctccagaacagtgccccggatgaccagaggccccttgaaaaggaggggtttggggacagggactgtgtccatgaaacattccatcttcttggtgaaggcaaggggttggttcttcaggtcaggatgttaatggagctggaagttcagaaaaagcctggtgaagtgacccttggcctttcacttcttgagaaacatacttctttgctgggcatggtgactcacgcctgtaatcccagcactttggaagggtgaggtgggtggatcacttgtggccaggagttcaaaacctgcctggccaacatggtgaaaccccatctctactaaaaatacaaaaattagctagatgtggtgcacgcctatagtcctagctacttgggaggctgaggcaggagaatcacttgagccagggaggcaaaagttgcagtgagctgagattgtgctaccgcactctctcaaaacaaacaaaaaaacatgccccacaggacagtaccttaattagctagagtagatctgagagggcctcttcttgcctgcactgtgctccccagagctgatctaattctgtatcaataggctgttcccatggtcttgccatgcgcttgaagctgcgggagccttctcactgttcaggctggggtgtggttttcagaaccaccgggttgactactgaaaaccaagtgagccttacagctcttatcgctgggtaaagtgatcttgcctggtgcctcttggtcttcagctcaattttccaggttgtcctggccaagccttgctctgttacgctcagtgcctctgcccactctttccccgccagcccttccctcccgccctgcaaacttgtcccttggctgtttcaccaggttctgcctgtatccttgcctccttggtacacaccatttcaggttcttccctttctgtgtcccattgtcctagttatgttctgttgtttgtgtaatgcccaaatttttctgctcgtgtggccttgaaaagtaggccagcctcagaggctgctgagctgaaaatggaactgagtaatcaggtgagctggaagggatgtggggggcggggcagacgggagacatgggttttgaaggcagtgaacaataaaaccttagggaggtggcaccgaggccttagcatttgaggagctgaaatgtttcagtgttgttttctcaccagccacaagcatcttatgagtttctgtgcaaggaagcgtagagcactgctgtgctgtcaggatgaagaagggctttctgcaggggctggcctttctctacccagaggccaagcaggctgccctgcactgtgtccttggttggtgttgatgcccaaaatagagaaggtgcttgctagcttttccttggtacattttcgggggttgcaaggcaacaagttttcttttgttttgtttgtttgtttgtttgtttgtttttgagatggagtctctgtcacccaggctggagtgcggtggcgtgatctcagctcactgcaagctccgcctcccgggttcatgccattctcctgcctcagcctcccgagtagctgggactacaggtgcccaccacctcgcctggctaatatttttgtatttttagtagagtctgggtttcactgtgttggccgggatggtctcgatctcctgaacttgtgatccacccacctaggcctcccaangtgctgggattacaggtgtgagccatcgcgcccggccaacttttctttagaaaaatgagtaaagtaggtaaacttcacaggccccttagaattaaatccttagggcatggttcaagtctgtaggaagcaaatctatacttttttatatgggcttttaagtagagcttagaaccctggggggagaaaagcagtcaggtgaggtttgagattccttctatagaatgatttcttaaaatgaaaatctgggcccacttaactaccctagataaaacgcttcaatggcttcccatggctcactggataacatctaaattcttcatggaattgaaggcccctatgtgctggttttggctaagatctcccctttgatgtgggtcccctgttgattatacgtgcggccttccagctgcccaccatcacagctacagctcgctccccttggcctctgtgccttggctcgcactgttcctactgaaggcctagcacctgctcttggcctggtgagcccctccaccttccaggcttactcaaagaattctttctgcccctccctgtgtcccgggacctgtttcatatcgcttctgtggtcgtgaccccatggtcttgtaattgtgaacttctttgctgccccttcgaagctggggagtgcttgttgcagatgcatccaagaggggtaattgcgtatcaacagtggatttgctggttgtttctacagggttctgaagcatgcaacatagaacagatacctttaaatttaggggcgctaaggaaagcaggaaccagtaatcctcttctgtggtgggatgggagggtgggggagaggggtggaatggagaggaaacaggctattgttggccagccctgggtggaggtgggtgcaagcaggacagatagtgcctgggggtgggggcggagggttcgcctctaggaaggggctagaagggatgaggaaatagttcatagcttcgtgcaggtgatccctattctgcgtgtatgtgtttgcacatgagtgtttgtagaccatagaccattaaaaaatacggaattcaaaagttacaaaaagggtattcttggaaaagaaagttgtttttttttagtcttgctgtgttgcccaggctggacctgaactcctgggcttgagcaagtcttcccctcagcctctggagtagctgggcctacagtgtgtgctgccacacccagctaatacagtctttctactcccgctctctattccccagtttcttgcccagaggcaacccttgccagtctgtttatccctccagatacagtctctgatagtaaacttttctttctcttacacaaatgatagtagtcacatacactacacacactgtgccacgtttaaaaagaaaaaaaacaattctcggctgggcgcggtggcgcatgcctgtaatcccagcactttgggaggccaaggtgggtgaatcacctgaagtcaggagttcgagatcagcatggccaacatggtgaagccccatctctact

SEQ ID NO: 375098 - DNA, 4897 bp, Homo sapiens
  misc_feature (3989)..(3989): n is a, c, g, or t
gctcttttggttcaaagatgtgtattgagctctactctgctctgcagggacagaactaagtatgtttgctattcaggggatacacagtcattccatgagcaagttacacaatgtaaaataaggacattgtgaaaaacaaaaccataccgtacataatgcactttatagtaaagtactgggaacagagtatttggtaaattgtaactataataataattttaaacagatccacaaatcacacttattattatattctgtttcacccgggctttgccaagcttcccacatttgtactagatcctcttggctttagtttctccccagcccttgtcaccagacatgcacacatccatcttctgggatttccgttctcttgcagaaaagtctgcatttaacgttgttttttaacagcaaattcaggatggggcagagagcagtgagaaaaatgaggcccttatgctcagcgcccccaaccccgcctcggtggggtcactattcattttggaacattgcccttgggaccaacatattctcagtggtccttgtgaaggtttccaccctaagtccctcatcctcaccaggcaatattcattaccctacagcaaactccggaggcaacgcggagaaagtgtgaatcaattcaagactaaggttgccaaaatgtttgatcagctctgcgtcagccttgacattacattacattacagatcccctgatcgccaccgtcgcagaagctctgaattaaaagcgtgcatgtagctgcacatccattgctggcacttcttccgttagcctccgctggaactggttagtgaggacccctccatttcacaagacagcttcggttttgcttcgttttgacttccgcaccccgaagctgtagcaccagtttgttttctcacggcacaggggcggcttccggggcgcggcgtgctgggggttgtagtccgcgctctgcctcctacttccattacagaaggcgatgggccgagagctgaggaactacaactcctagagtactccgcgccgccgggacgccgcgcggctgcggggctgggcgagcgcaaagatgtccgcgcccgctgccgggaggcgaggccaactcgggatatcccggagcctctggggaggcggtcactccgacgtctgaggacctgggccttggacccggactcgttatgaagagcgattcttcgacctctgcagcccccctcagggggctcgggggacccctgcgcagcagcgagccggtgcgcgcggtcccggcccgggcgccggccgtggaccttctggaggaggcggccgacctcctggtggtgcacctggacttccgggcggcgctggagacctgcgagcgggcctggcagagtctggccaaccacgccgtggcagaggaacccgcgggcacctcattggaggtgaagtgctccctgtgtgttgtggggatccaggccctggcagaaatggatcggtggcaagaagtcctctcctgggtccttcagtattaccaggtccctgaaaagctaccccccaaagtcctggagctgtgcattcttttatacagcaaaatgcaagagcctggagctgtgctggatgtggtgggtgcctggctccaagacccagccaatcaaaaccttccagaatatggagccttggcagaatttcacgtgcagcgggtgctgctgcctctgggctgcttatcggaggctgaggagctagtggtgggctctgcagcctttggtgaggagcggcgactggatgtacttcaggccattcacacagcgaggcagcagcagaaacaggaacactcaggctctgaggaggcccagaagccaaacctggaaggctctgtctcccacaagttcctgtcactaccgatgttggttcgccagctttgggactctgcggtgagccacttcttttctctgcccttcaaaaagagtctcctggctgccttgatcctctgtctcctggtggtgagatttgatccagcttccccttcctccctgcacttcctctacaagctggcccagctcttccgctggatccggaaggctgcattttctcgcctctaccagctccgcatccgtgactgagggtccctgcgcaccacagcctctctgctcctcacgtccgtggccacagaagcagagcgacagagcgacacatccacaggcgcccctggggaaatgggaccagcctaatctcgcggagtgcactgtgtcttgctgcctgggtgccctctcctttgcaccctacttcagctggtcgcggtagatgatgtggaaacaaagcaggaccagcaggcacagcacctccagaacagtgccccggatgaccagaggccccttgaaaaggaggggtttggggacagggactgtgtccatgaaacattccatcttcttggtgaaggcaaggggttggttcttcaggtcaggatgttaatggagctggaagttcagaaaaagcctggtgaagtgacccttggcctttcacttcttgagaaacatacttctttgctgggcatggtgactcacgcctgtaatcccagcactttggaagggtgaggtgggtggatcacttgtggccaggagttcaaaacctgcctggccaacatggtgaaaccccatctctactaaaaatacaaaaattagctagatgtggtgcacgcctatagtcctagctacttgggaggctgaggcaggagaatcacttgagccagggaggcaaaagttgcagtgagctgagattgtgctaccgcactctctcaaaacaaacaaaaaaacatgccccacaggacagtaccttaattagctagagtagatctgagagggcctcttcttgcctgcactgtgctccccagagctgatctaattctgtatcaataggctgttcccatggtcttgccatgcgcttgaagctgcgggagccttctcactgttcaggctggggtgtggttttcagaaccaccgggttgactactgaaaaccaagtgagccttacagctcttatcgctgggtaaagtgatcttgcctggtgcctcttggtcttcagctcaattttccaggttgtcctggccaagccttgctctgttacgctcagtgcctctgcccactctttccccgccagcccttccctcccgccctgcaaacttgtcccttggctgtttcaccaggttctgcctgtatccttgcctccttggtacacaccatttcaggttcttccctttctgtgtcccattgtcctagttatgttctgttgtttgtgtaatgcccaaatttttctgctcgtgtggccttgaaaagtaggccagcctcagaggctgctgagctgaaaatggaactgagtaatcaggtgagctggaagggatgtggggggcggggcagacgggagacatgggttttgaaggcagtgaacaataaaaccttagggaggtggcaccgaggccttagcatttgaggagctgaaatgtttcagtgttgttttctcaccagccacaagcatcttatgagtttctgtgcaaggaagcgtagagcactgctgtgctgtcaggatgaagaagggctttctgcaggggctggcctttctctacccagaggccaagcaggctgccctgcactgtgtccttggttggtgttgatgcccaaaatagagaaggtgcttgctagcttttccttggtacattttcgggggttgcaaggcaacaagttttcttttgttttgtttgtttgtttgtttgtttgtttttgagatggagtctctgtcacccaggctggagtgcggtggcgtgatctcagctcactgcaagctccgcctcccgggttcatgccattctcctgcctcagcctcccgagtagctgggactacaggtgcccaccacctcgcctggctaatatttttgtatttttagtagagtctgggtttcactgtgttggccgggatggtctcgatctcctgaacttgtgatccacccacctaggcctcccaangtgctgggattacaggtgtgagccatcgcgcccggccaacttttctttagaaaaatgagtaaagtaggtaaacttcacaggccccttagaattaaatccttagggcatggttcaagtctgtaggaagcaaatctatacttttttatatgggcttttaagtagagcttagaaccctggggggagaaaagcagtcaggtgaggtttgagattccttctatagaatgatttcttaaaatgaaaatctgggcccacttaactaccctagataaaacgcttcaatggcttcccatggctcactggataacatctaaattcttcatggaattgaaggcccctatgtgctggttttggctaagatctcccctttgatgtgggtcccctgttgattatacgtgcggccttccagctgcccaccatcacagctacagctcgctccccttggcctctgtgccttggctcgcactgttcctactgaaggcctagcacctgctcttggcctggtgagcccctccaccttccaggcttactcaaagaattctttctgcccctccctgtgtcccgggacctgtttcatatcgcttctgtggtcgtgaccccatggtcttgtaattgtgaacttctttgctgccccttcgaagctggggagtgcttgttgcagatgcatccaagaggggtaattgcgtatcaacagtggatttgctggttgtttctacagggttctgaagcatgcaacatagaacagatacctttaaatttaggggcgggagggttcgcctctaggaaggggctagaagggatgaggaaatagttcatagcttcgtgcaggtgatccctattctgcgtgtatgtgtttgcacatgagtgtttgtagaccatagaccattaaaaaatacggaattcaaaagtta

SEQ ID NO: 375099 - DNA, 4396 bp, Homo sapiens
gctcttttggttcaaagatgtgtattgagctctactctgctctgcagggacagaactaagtatgtttgctattcaggggatacacagtcattccatgagcaagttacacaatgtaaaataaggacattgtgaaaaacaaaaccataccgtacataatgcactttatagtaaagtactgggaacagagtatttggtaaattgtaactataataataattttaaacagatccacaaatcacacttattattatattctgtttcacccgggctttgccaagcttcccacatttgtactagatcctcttggctttagtttctccccagcccttgtcaccagacatgcacacatccatcttctgggatttccgttctcttgcagaaaagtctgcatttaacgttgttttttaacagcaaattcaggatggggcagagagcagtgagaaaaatgaggcccttatgctcagcgcccccaaccccgcctcggtggggtcactattcattttggaacattgcccttgggaccaacatattctcagtggtccttgtgaaggtttccaccctaagtccctcatcctcaccaggcaatattcattaccctacagcaaactccggaggcaacgcggagaaagtgtgaatcaattcaagactaaggttgccaaaatgtttgatcagctctgcgtcagccttgacattacattacattacagatcccctgatcgccaccgtcgcagaagctctgaattaaaagcgtgcatgtagctgcacatccattgctggcacttcttccgttagcctccgctggaactggttagtgaggacccctccatttcacaagacagcttcggttttgcttcgttttgacttccgcaccccgaagctgtagcaccagtttgttttctcacggcacaggggcggcttccggggcgcggcgtgctgggggttgtagtccgcgctctgcctcctacttccattacagaaggcgatgggccgagagctgaggaactacaactcctagagtactccgcgccgccgggacgccgcgcggctgcggggctgggcgagcgcaaagatgtccgcgcccgctgccgggaggcgaggccaactcgggatatcccggagcctctggggaggcggtcactccgacgtctgaggacctgggccttggacccggactcgttatgaagagcgattcttcgacctctgcagcccccctcagggggctcgggggacccctgcgcagcagcgagccggtgcgcgcggtcccggcccgggcgccggccgtggaccttctggaggaggcggccgacctcctggtggtgcacctggacttccgggcggcgctggagacctgcgagcgggcctggcagagtctggccaaccacgccgtggcagaggaacccgcgggcacctcattggaggtgaagtgctccctgtgtgttgtggggatccaggccctggcagaaatggatcggtggcaagaagtcctctcctgggtccttcagtattaccaggtccctgaaaagctaccccccaaagtcctggagctgtgcattcttttatacagcaaaatgcaagagcctggagctgtgctggatgtggtgggtgcctggctccaagacccagccaatcaaaaccttccagaatatggagccttggcagaatttcacgtgcagcgggtgctgctgcctctgggctgcttatcggaggctgaggagctagtggtgggctctgcagcctttggtgaggagcggcgactggatgtacttcaggccattcacacagcgaggcagcagcagaaacaggaacactcaggctctgaggaggcccagaagccaaacctggaaggctctgtctcccacaagttcctgtcactaccgatgttggttcgccagctttgggactctgcggtgagccacttcttttctctgcccttcaaaaagagtctcctggctgccttgatcctctgtctcctggtggtgagatttgatccagcttccccttcctccctgcacttcctctacaagctggcccagctcttccgctggatccggaaggctgcattttctcgcctctaccagctccgcatccgtgactgagggtccctgcgcaccacagcctctctgctcctcacgtccgtggccacagaagcagagcgacagagcgacacatccacaggcgcccctggggaaatgggaccagcctaatctcgcggagtgcactgtgtcttgctgcctgggtgccctctcctttgcaccctacttcagctggtcgcggtagatgatgtggaaacaaagcaggaccagcaggcacagcacctccagaacagtgccccggatgaccagaggccccttgaaaaggaggggtttggggacagggactgtgtccatgaaacattccatcttcttggtgaaggcaaggggttggttcttcaggtcaggatgttaatggagctggaagttcagaaaaagcctggtgaagtgacccttggcctttcacttcttgagaaacatacttctttgctgggcatggtgactcacgcctgtaatcccagcactttggaagggtgaggtgggtggatcacttgtggccaggagttcaaaacctgcctggccaacatggtgaaaccccatctctactaaaaatacaaaaattagctagatgtggtgcacgcctatagtcctagctacttgggaggctgaggcaggagaatcacttgagccagggaggcaaaagttgcagtgagctgagattgtgctaccgcactctctcaaaacaaacaaaaaaacatgccccacaggacagtaccttaattagctagagtagatctgagagggcctcttcttgcctgcactgtgctccccagagctgatctaattctgtatcaataggctgttcccatggtcttgccatgcgcttgaagctgcgggagccttctcactgttcaggctggggtgtggttttcagaaccaccgggttgactactgaaaaccaagtgagccttacagctcttatcgctgggtaaagtgatcttgcctggtgcctcttggtcttcagctcaattttccaggttgtcctggccaagccttgctctgttacgctcagtgcctctgcccactctttccccgccagcccttccctcccgccctgcaaacttgtcccttggctgtttcaccaggttctgcctgtatccttgcctccttggtacacaccatttcaggttcttccctttctgtgtcccattgtcctagttatgttctgttgtttgtgtaatgcccaaatttttctgctcgtgtggccttgaaaagtaggccagcctcagaggctgctgagctgaaaatggaactgagtaatcaggtgagctggaagggatgtggggggcggggcagacgggagacatgggttttgaaggcagtgaacaataaaaccttagggaggtggcaccgaggccttagcatttgaggagctgaaatgtttcagtgttgttttctcaccagccacaagcatcttatgagtttctgtgcaaggaagcgtagagcactgctgtgctgtcaggatgaagaagggctttctgcaggggctggcctttctctacccagaggccaagcaggctgccctgcactgtgtccttggttggtgttgatgcccaaaatagagaaggtgcttgctagcttttccttggtacattttcgggggttgcaaggcaacaagttttcttttgttttgtttgtttgtttgtttgtttgtttttgagatggagtctcgtgggtgcaagcaggacagatagtgcctgggggtgggggcggagggttcgcctctaggaaggggctagaagggatgaggaaatagttcatagcttcgtgcaggtgatccctattctgcgtgtatgtgtttgcacatgagtgtttgtagaccatagaccattaaaaaatacggaattcaaaagttacaaaaagggtattcttggaaaagaaagttgtttttttttagtcttgctgtgttgcccaggctggacctgaactcctgggcttgagcaagtcttcccctcagcctctggagtagctgggcctacagtgtgtgctgccacacccagctaatacagtctttctactcccgctctctattccccagtttcttgcccagaggcaacccttgccagtctgtttatccctccagatacagtctctgatagtaaacttttctttctcttacacaaatgatagtagtcacatacactacacacactgtgccacgtttaaaaagaaaaaaaacaattctcggctgggcgcggtggcgcatgcctgtaatcccagcactttgggaggccaaggtgggtgaatcacctgaagtcaggagttcgagatcagcatggccaacatggtgaagccccatctctact

SEQ ID NO: 375100 - DNA, 4176 bp, Homo sapiens
gctcttttggttcaaagatgtgtattgagctctactctgctctgcagggacagaactaagtatgtttgctattcaggggatacacagtcattccatgagcaagttacacaatgtaaaataaggacattgtgaaaaacaaaaccataccgtacataatgcactttatagtaaagtactgggaacagagtatttggtaaattgtaactataataataattttaaacagatccacaaatcacacttattattatattctgtttcacccgggctttgccaagcttcccacatttgtactagatcctcttggctttagtttctccccagcccttgtcaccagacatgcacacatccatcttctgggatttccgttctcttgcagaaaagtctgcatttaacgttgttttttaacagcaaattcaggatggggcagagagcagtgagaaaaatgaggcccttatgctcagcgcccccaaccccgcctcggtggggtcactattcattttggaacattgcccttgggaccaacatattctcagtggtccttgtgaaggtttccaccctaagtccctcatcctcaccaggcaatattcattaccctacagcaaactccggaggcaacgcggagaaagtgtgaatcaattcaagactaaggttgccaaaatgtttgatcagctctgcgtcagccttgacattacattacattacagatcccctgatcgccaccgtcgcagaagctctgaattaaaagcgtgcatgtagctgcacatccattgctggcacttcttccgttagcctccgctggaactggttagtgaggacccctccatttcacaagacagcttcggttttgcttcgttttgacttccgcaccccgaagctgtagcaccagtttgttttctcacggcacaggggcggcttccggggcgcggcgtgctgggggttgtagtccgcgctctgcctcctacttccattacagaaggcgatgggccgagagctgaggaactacaactcctagagtactccgcgccgccgggacgccgcgcggctgcggggctgggcgagcgcaaagatgtccgcgcccgctgccgggaggcgaggccaactcgggatatcccggagcctctggggaggcggtcactccgacgtctgaggacctgggccttggacccggactcgttatgaagagcgattcttcgacctctgcagcccccctcagggggctcgggggacccctgcgcagcagcgagccggtgcgcgcggtcccggcccgggcgccggccgtggaccttctggaggaggcggccgacctcctggtggtgcacctggacttccgggcggcgctggagacctgcgagcgggcctggcagagtctggccaaccacgccgtggcagaggaacccgcgggcacctcattggaggtgaagtgctccctgtgtgttgtggggatccaggccctggcagaaatggatcggtggcaagaagtcctctcctgggtccttcagtattaccaggtccctgaaaagctaccccccaaagtcctggagctgtgcattcttttatacagcaaaatgcaagagcctggagctgtgctggatgtggtgggtgcctggctccaagacccagccaatcaaaaccttccagaatatggagccttggcagaatttcacgtgcagcgggtgctgctgcctctgggctgcttatcggaggctgaggagctagtggtgggctctgcagcctttggtgaggagcggcgactggatgtacttcaggccattcacacagcgaggcagcagcagaaacaggaacactcaggctctgaggaggcccagaagccaaacctggaaggctctgtctcccacaagttcctgtcactaccgatgttggttcgccagctttgggactctgcggtgagccacttcttttctctgcccttcaaaaagagtctcctggctgccttgatcctctgtctcctggtggtgagatttgatccagcttccccttcctccctgcacttcctctacaagctggcccagctcttccgctggatccggaaggctgcattttctcgcctctaccagctccgcatccgtgactgagggtccctgcgcaccacagcctctctgctcctcacgtccgtggccacagaagcagagcgacagagcgacacatccacaggcgcccctggggaaatgggaccagcctaatctcgcggagtgcactgtgtcttgctgcctgggtgccctctcctttgcaccctacttcagctggtcgcggtagatgatgtggaaacaaagcaggaccagcaggcacagcacctccagaacagtgccccggatgaccagaggccccttgaaaaggaggggtttggggacagggactgtgtccatgaaacattccatcttcttggtgaaggcaaggggttggttcttcaggtcaggatgttaatggagctggaagttcagaaaaagcctggtgaagtgacccttggcctttcacttcttgagaaacatacttctttgctgggcatggtgactcacgcctgtaatcccagcactttggaagggtgaggtgggtggatcacttgtggccaggagttcaaaacctgcctggccaacatggtgaaaccccatctctactaaaaatacaaaaattagctagatgtggtgcacgcctatagtcctagctacttgggaggctgaggcaggagaatcacttgaacccgggaggcaagggttgcagtgagctgagatcgcaccattgcactcccacctgggcaacaaagagtgaaacttggtctcagaaacgaaacaaaacacaaaaacctttctcagtcccagcatatgtggagcagcctcattcttcatagctgtgtgtcattccgttgcgtgatggggtcacagagcacagacctggtgcccttttcctttttaatatgtggaaacccctccatgctttccaaagcctacaagtacagcagccccaagtttagggtgagcagcagtggtcagagctctttactattacttttgggcaaacgcaagccaggctggcaaccaccactgccgccgaggggagatacaagcaggccagttcacactctggacgtttagtttctttctacatctagaaggtggcctctgctatccacttaaagcagcccaaggaactgtcagaaagcgaaagtgatgacatgaaccgcgagtagggcacctccctgtgccgtcgtctgctttccttcctccctcccagcctccctgtgccgtcctctgctttcctccctcccagcacggaaaagccgtggggccgatggactttggcctcacatccacagatggggcctgtgggaattctactgatttactctctggcctagttcaagcaacccacccacggcctggccaaggtcggcctcaccgccctggcctagcacctttggaaactgaatacatggagtgttaaccagaaaaatgtctggcccttttgcctcgctgcctctggaaacctcagtgtttcgggctggtaggaagctacaggacagacagtgggcacggtgcctagcagcctgtcgcgcccccgcccgcctctgcattcctccagcggtggtgtacggatccagacattgtttgccacctctaggcctcttgataaaacagcaagtatttttcttgtcttaaagcaatgcatgtatattttagaaaatattaattgcatagaaggaaatacaggactcgtgatcccaccactcagaaataattactattaatacggttgattttctttcagcttttttccccctaattaattaactaattcttttttttcctgcaactcctgcttcacagacttttttttttttttaacttggcatggtggctcacacctataatcccagcactttgggaggccagagtgggaggattgcttgagccctaggagttcaaagctagcctgggcaacctagtgggaccccatttcttttttttggggggggggtgggttataaaagcccttttataaagccaattttaaacaagaaaaaaacaaaaagtttacaaaagaaaaaaagatacagaaaaagaataacttgcttcatatgtcccaaaaagagaaaaaaataaacgggacaatgccaacatgctcaacaataaagggttctttttcttacttttttaatac

SEQ ID NO: 375101 - DNA, 492 bp, Homo sapiens
acaaagggccctgaaaaaccagtggtccatttccttggtgaaaaagaggtaaacatttcagaatggatagtggctataatacgcagaattgtggaagcaatattatggatacagttggggcagaaagttactgcaaagaaagtgatgcacaaacatgtgaagttgagagtaaatctcaagcatttaatatgaagcaagaccacacaacacagaggtgttggatgaaaacagcaagcccttttcaatgcagcagtccatagaatacctctgtcagaatcaaagactaagcttaagagttcctcgcatatatcgttgtgcacaggatcaacatgatggtgactgggaaaaaattacttcaagtaacatgcttagctttccctccttaatgtgaaaaatcaagggcttactgacataggaacaacagaaatgctcctggaacttcaagttgctgaattataagtttattttttatcaataaatatttttatactt

SEQ ID NO: 375102 - DNA, 2844 bp, Homo sapiens
agagtctatgcctgtcgtggaagctggcctggcccccggagctccctggagtcggtactgggggcttcgttttgtacgcaccgttttctctctgtgctatgggagatgtcaaggaatcaaagatgcaaataacaccagaaactccaggaaggatccctgttttaaatccttttgaaagtcctagtgattattctaatctccatgaacaaactctcgccagtccttctgtttttaaatcaacaaaattaccaaatagataaagatgtggaagacaaaagacaaaaagccattgaagagtttttcactaaagatgtcatcgtaccctctccttggactgatcatgaagggaaacagctttcacaatgtcattccagtaaatgcactaacataaatagtgactctccagttggaaaaaagctgaccattcattctgagaaaagcgatgctgcttgtcagacattgctgtctcttcctgtggattttaatttagaaaatatattaggtgactattttagagctgatgaatttgcagatcaatctcctggaaacctcagttcttcatccctcagaagaaagctgtttttagatgggaacggaagcatctccgactccttaccttcggcttctcccggaagtcctcacagtggtgttcaaacatcactagagatgttttattcaatagatttgtctcctgtaaagtgtaggagccccttgcagacaccaagttcggggcagttttcttctagccctattcaggctagtgcaaaaaaatacagcttgggaagcataactagtccttcgcctatttcttcacccactttctcaccaattgaatttcagataggagagactccactctcagaacaaaggaagtttactgttcattctcctgatgcttcatctggaacaaattctaatgggataactaatccgtgtatcagaagtccttatatagatggctgctcgccaattaaaaattggtctcctatgagacttcagatgtatagtggtggtactcagtatcggacctcagtgattcagataccttttactcttgagactcaaggtgaagatgaggaagataaagagaatattccttccacagatgtctcatcacccgccatggatgctgctggaatacacctacggcagtttagtaatgaggcttctacccatggtacacatttggttgtgactgccatgtctgttacacaaaatcagtccagtgcttctgagaaagaattagcactgttgcaggatgttgaaagggagaaagacaataacactgtggatatggttgatcctatagagatagcagatgagaccacttggattaaggagccggttgataatggcagtttacccatgactgattttgtaagtggcattgccttcagtattgaaaactctcatatgtgcatgtcacctcttgctgaaagcagtgtcattccttgtgaaagcagtaacattcagatggatagtggctataatacgcagaattgtggaagcaatattatggatacagttggggcagaaagttactgcaaagaaagtgatgcacaaacatgtgaagttgagagtaaatctcaagcatttaatatgaagcaagaccacacaacacagaggtgttggatgaaaacagcaagcccttttcaatgcagcagtccatagaatacctctgtcagaatcaaagactaagcttaagagttcctcgcatatatcgttgtgcacaggatcaacatgatggtgactgggaaaaaattacttcaagtaacatgcttagctttccctccttaatgtgaaaaatcaagggcttactgacataggaacaacagaaatgctcctggaacttcaagttgctgaattataagtttattttttatcaataaatatttttatacttacattgagtgatgtgtttaacaacaaattgtgacagagctgagtgctcctatcttacagggtcaatgaactacttattaagccttactggtagcactgaatttagcagttctgagaacatgtgaaactatgttaaaactgaaggcactatatatttttacataaaagcttgaacatacagatgaattataacctatgtgaagaaatcttagatataaaactaacttttcaaagatacaaaagaaattaaacaggtttcctgaaattttagttcttggtctgttcacctctgtggggaaaattcttagttccagtgataactgttctagttactacttttaagtatgtaaatactagaaaggtagtactagtgacatcatcacgtgtattgttatctatggggcaaatgtgtggtgcccagaataaaatatacctcatgcctagggtagggacatcctttccagctcaaacgtgggtagggatgtgggagaataagaatgtgggagaaccaagagaaaaagtggggctgggagagtggagttcccgtagggcataggcctgtgaagtaacactggggcagatatgtatgttatatacaactatttttttaaaaaacttatatccatgttgggagtagatgggtatataacagtttggaaatactatctttggagaatgtatttttgtatttataaatcaacttttaaaaactgtctcattcaaaagggaataaagacctgtgttatcaatgtgtcattttcttctttcctccataactgtaccttgaaaccttactgctgacctgcagaaaatgtgccgcgttatgtacctggctcatcttcaacacactaaccatgaacactaatagccattaggggacatggctacagatactacattggaaagttgtctttaatcacacaggtgttaaactcaatataa

SEQ ID NO: 375103 - DNA, 2905 bp, Homo sapiens
agagtctatgcctgtcgtggaagctggcctggcccccggagctccctggagtcggtactgggggcttcgttttgtacgcaccgttttctctctgtgctatgggagatgtcaaggaatcaaagatgcaaataacaccagaaactccaggaaggatccctgttttaaatccttttgaaagtcctagtgattattctaatctccatgaacaaactctcgccagtccttctgtttttaaatcaacaaaattaccaactccagggaaatttagatggtctattgatcaactagctgtaataaatcctgtagaaatagacccagaagatattcatcgtcaagctttatacttaagtcattctcgtttttcactaaagatgtcatcgtaccctctccttggactgatcatgaagggaaacagctttcacaatgtcattccagtaaatgcactaacataaatagtgactctccagttggaaaaaagctgaccattcattctgagaaaagcgatgctgcttgtcagacattgctgtctcttcctgtggattttaatttagaaaatatattaggtgactattttagagctgatgaatttgcagatcaatctcctggaaacctcagttcttcatccctcagaagaaagctgtttttagatgggaacggaagcatctccgactccttaccttcggcttctcccggaagtcctcacagtggtgttcaaacatcactagagatgttttattcaatagatttgtctcctgtaaagtgtaggagccccttgcagacaccaagttcggggcagttttcttctagccctattcaggctagtgcaaaaaaatacagcttgggaagcataactagtccttcgcctatttcttcacccactttctcaccaattgaatttcagataggagagactccactctcagaacaaaggaagtttactgttcattctcctgatgcttcatctggaacaaattctaatgggataactaatccgtgtatcagaagtccttatatagatggctgctcgccaattaaaaattggtctcctatgagacttcagatgtatagtggtggtactcagtatcggacctcagtgattcagataccttttactcttgagactcaaggtgaagatgaggaagataaagagaatattccttccacagatgtctcatcacccgccatggatgctgctggaatacacctacggcagtttagtaatgaggcttctacccatggtacacatttggttgtgactgccatgtctgttacacaaaatcagtccagtgcttctgagaaagaattagcactgttgcaggatgttgaaagggagaaagacaataacactgtggatatggttgatcctatagagatagcagatgagaccacttggattaaggagccggttgataatggcagtttacccatgactgattttgtaagtggcattgccttcagtattgaaaactctcatatgtgcatgtcacctcttgctgaaagcagtgtcattccttgtgaaagcagtaacattcagatggatagtggctataatacgcagaattgtggaagcaatattatggatacagttggggcagaaagttactgcaaagaaagtgatgcacaaacatgtgaagttgagagtaaatctcaagcatttaatatgaagcaagaccacacaacacagaggtgttggatgaaaacagcaagcccttttcaatgcagcagtccatagaatacctctgtcagaatcaaagactaagcttaagagttcctcgcatatatcgttgtgcacaggatcaacatgatggtgactgggaaaaaattacttcaagtaacatgcttagctttccctccttaatgtgaaaaatcaagggcttactgacataggaacaacagaaatgctcctggaacttcaagttgctgaattataagtttattttttatcaataaatatttttatacttacattgagtgatgtgtttaacaacaaattgtgacagagctgagtgctcctatcttacagggtcaatgaactacttattaagccttactggtagcactgaatttagcagttctgagaacatgtgaaactatgttaaaactgaaggcactatatatttttacataaaagcttgaacatacagatgaattataacctatgtgaagaaatcttagatataaaactaacttttcaaagatacaaaagaaattaaacaggtttcctgaaattttagttcttggtctgttcacctctgtggggaaaattcttagttccagtgataactgttctagttactacttttaagtatgtaaatactagaaaggtagtactagtgacatcatcacgtgtattgttatctatggggcaaatgtgtggtgcccagaataaaatatacctcatgcctagggtagggacatcctttccagctcaaacgtgggtagggatgtgggagaataagaatgtgggagaaccaagagaaaaagtggggctgggagagtggagttcccgtagggcataggcctgtgaagtaacactggggcagatatgtatgttatatacaactatttttttaaaaaacttatatccatgttgggagtagatgggtatataacagtttggaaatactatctttggagaatgtatttttgtatttataaatcaacttttaaaaactgtctcattcaaaagggaataaagacctgtgttatcaatgtgtcattttcttctttcctccataactgtaccttgaaaccttactgctgacctgcagaaaatgtgccgcgttatgtacctggctcatcttcaacacactaaccatgaacactaatagccattaggggacatggctacagatactacattggaaagttgtctttaatcacacaggtgttaaactcaatataa

SEQ ID NO: 375104 - DNA, 2787 bp, Homo sapiens
agagtctatgcctgtcgtggaagctggcctggcccccggagctccctggagtcggtactgggggcttcgttttgtacgcaccgttttctctctgtgctatgggagatgtcaaggaatcaaagatgcaaataacaccagaaactccaggaaggatccctgttttaaatccttttgaaagtcctagtgattattctaatctccatgaacaaactctcgccagtccttctgtttttaaatcaacaaaattaccaactccagggaaatttagatggtctattgatcaactagctgtaataaatcctgtagaaatagacccagaagatattcatcgtcaagctttatacttaagtcattctcgaatagataaagatgtggaagacaaaagacaaaaagccattgaagagtttttcactaaagatgtcatcgtaccctctccttggactgatcatgaagggaaacagctttcacaatgtcattccagtaaatgcactaacataaatagtgactctccagttggaaaaaagctgaccattcattctgagaaaagcgatgctgcttgtcagacattgctgtctcttcctgtggattttaatttagaaaatatattaggtgactattttagagctgatgaatttgcagatcaatctcctggaaacctcagttcttcatccctcagaagaaagctgtttttagatgggaacggaagcatctccgactccttaccttcggcttctcccggaagtcctcacagtggtgttcaaacatcactagagatgttttattcaatagatttgtctcctgtaaagtgtaggagccccttgcagacaccaagttcggggcagttttcttctagccctattcaggctagtgcaaaaaaatacagcttgggaagcataactagtccttcgcctatttcttcacccactttctcaccaattgaatttcagataggagagactccactctcagaacaaaggaagtttactgttcattctcctgatgcttcatctggaacaaattctaatgggataactaatccgtgtatcagaagtccttatatagatggctgctcgccaattaaaaattggtctcctatgagacttcagatgtatagtggtggtactcagtatcggacctcagtgattcagataccttttactcttgagactcaaggtgaagatgaggaagataaagagaatattccttccacagatgtctcatcacccgccatggatgctgctggaatacacctacggcagtttagtaatgaggcttctacccatggtacacatttggttgtgactgccatgtctgttacacaaaatcagtccagtgcttctgagaaagaattagcactgttgcaggatgttgaaagggagaaagacaataacactgtggatatggttgatcctatagagatagcagatgagaccacttggattaaggagccggttgataatggcagtttacccatgactgattttgtaagtggcattgccttcagtattgaaaactctcatatgtgcatgtcacctcttgctgaaagcagtgtcattccttgtgaaagcagtaacattcagatggatagtggctataatacgcagaattgtggaagcaatattatggatacagttggggcagaaagttactgcaaagaaagtgatgcacaaacatgtgaagttgagagtaaatctcaagcatttaatatgaagcaagaccacacaacacagaggtgttggatgaaaacagcaagcccttttcaatgcagcagtccatagaatacctctgtcagaatcaaagactaagcttaagagttcctcgcatatatcgttgtgcacaggatcaacatgatggtgactgggaaaaaattacttcaagtaacatgcttagctttccctccttaatgtgaaaaatcaagggcttactgacataggaacaacagaaatgctcctggaacttcaagttgctgaattataagtttattttttatcaataaatatttttatacttacattgagtgatgtgtttaacaacaaattgtgacagagctgagtgctcctatcttacagggtcaatgaactacttattaagccttactggtagcactgaatttagcagttctgagaacatgtgaaactatgttaaaactgaaggcactatatatttttacataaaagcttgaacatacagatgaattataacctatgtgaagaaatcttagatataaaactaacttttcaaagatacaaaagaaattaaacaggtttcctgaaattttagttcttggtctgttcacctctgtggggaaaattcttagttccagtgataactgttctagttactacttttaagtatgtaaatactagaaaggtagtactagtgacatcatcacgtgtattgttatctatggggcaaatgtgtggtgcccagaataaaatatacctcatgcctagggtagggacatcctttccagctcaaacgtgggtagggatgtgggagaataagaatgtgggagaaccaagagaaaaagtggggctgggagagtggagttcccgtagggcataggcctgtgaagtaacactggggcagatatgtatgttatatacaactatttttttaaaaaacttatatccatgttgggagtagatgggtatataacagtttggaaatactatctttggagaatgtatttttgtatttataaatcaacttttaaaaactgtctcattcaaaagggaataattcatatgtacccttaggaaataaagacctgtgttatcaaaaaaa

SEQ ID NO: 375105 - DNA, 1549 bp, Homo sapiens
  misc_feature (73)..(73): n is a, c, g, or t
  misc_feature (82)..(82): n is a, c, g, or t
  misc_feature (86)..(86): n is a, c, g, or t
  misc_feature (113)..(113): n is a, c, g, or t
ctcctgtccatgtaggcaataaataacttttcttacgtacaagaaatggaaaggatttaactgagttgaagtnaattaattnattnaaaaaatacattatttgtaaagtcagncagttgacaggagccatgaagcaacatagacatatgaaacatgcataaagacaaggaaacatggaagagttttatatgaccaggatgctgcatagatcttagtctaaacatccagctttagcatagggtgctctttaaaaacattaggctgggtgcggtggctcacacctgtaatcccagcacggcactgttgggatgctttttgatgcagaatattgatttataaaatactgtatctttactgtcccttcagagttcagctaaagaaacgtgcttttaggttttaaaaacagtcccgataattgcatcctccagtggtcctacttaaactgaaaacaaggtattgtcttctttttcacagcaagaccacacaacacagaggtgttggatgaaaacagcaagcccttttcaatgcagcagtccatagaatacctctgtcagaatcaaagactaagcttaagagttcctcgcatatatcgttgtgcacaggatcaacatgatggtgactgggaaaaaattacttcaagtaacatgcttagctttccctccttaatgtgaaaaatcaagggcttactgacataggaacaacagaaatgctcctggaacttcaagttgctgaattataagtttattttttatcaataaatatttttatacttacattgagtgatgtgtttaacaacaaattgtgacagagctgagtgctcctatcttacagggtcaatgaactacttattaagccttactggtagcactgaatttagcagttctgagaacatgtgaaactatgttaaaactgaaggcactatatatttttacataaaagcttgaacatacagatgaattataacctatgtgaagaaatcttagatataaaactaacttttcaaagatacaaaagaaattaaacaggtttcctgaaattttagttcttggtctgttcacctctgtggggaaaattcttagttccagtgataactgttctagttactacttttaagtatgtaaatactagaaaggtagtactagtgacatcatcacgtgtattgttatctatggggcaaatgtgtggtgcccagaataaaatatacctcatgcctagggtagggacatcctttccagctcaaacgtgggtagggatgtgggagaataagaatgtgggagaaccaagagaaaaagtggggctgggagagtggagttcccgtagggcataggcctgtgaagtaacactggggcagatatgtatgttatatacaactatttttttaaaaaacttatatccatgttgggagtagatgggtatataacagtttggaaatactatctttggagaatgtatttttgtatttataaatcaacttttaaaaactgtctcattcaaaagggaataattcatatgtacccttaggaaataaagacctgtgttatcaaaaaaa

SEQ ID NO: 375106 - DNA, 1938 bp, Homo sapiens
agagtctatgcctgtcgtggaagctggcctggcccccggagctccctggagtcggtactgggggcttcgttttgtacgcaccgttttctctctgtgctatgggagatgtcaaggaatcaaagatgcaaataacaccagaaactccaggaaggatccctgttttaaatccttttgaaagtcctagtgattattctaatctccatgaacaaactctcgccagtccttctgtttttaaatcaacaaaattaccaactccagggaaatttagatggtctattgatcaactagctgtaataaatcctgtagaaatagacccagaagatattcatcgtcaagctttatacttaagtcattctcgaatagataaagatgtggaagacaaaagacaaaaagccattgaagagtttttcactaaagatgtcatcgtaccctctccttggactgatcatgaagggaaacagctttcacaatgtcattccagtaaatgcactaacataaatagtgactctccagttggaaaaaagctgaccattcattctgagaaaagcgatgctgcttgtcagacattgctgtctcttcctgtggattttaatttagaaaatatattaggtgactattttagagctgatgaatttgcagatcaatctcctggaaacctcagttcttcatccctcagaagaaagctgtttttagatgggaacggaagcatctccgactccttaccttcggcttctcccggaagtcctcacagtggtgttcaaacatcactagagatgttttattcaatagatttgtctcctgtaaagtgtaggagccccttgcagacaccaagttcggggcagttttcttctagccctattcaggctagtgcaaaaaaatacagcttgggaagcataactagtccttcgcctatttcttcacccactttctcaccaattgaatttcagataggagagactccactctcagaacaaaggaagtttactgttcattctcctgatgcttcatctggaacaaattctaatgggataactaatccgtgtatcagaagtccttatatagatggctgctcgccaattaaaaattggtctcctatgagacttcagatgtatagtggtggtactcagtatcggacctcagtgattcagataccttttactcttgagactcaaggtgaagatgaggaagataaagagaatattccttccacagatgtctcatcacccgccatggatgctgctggaatacacctacggcagtttagtaatgaggcttctacccatggtacacatttggttgtgactgccatgtctgttacacaaaatcagtccagtgcttctgagaaagaattagcactgttgcaggatgttgaaagggagaaagacaataacactgtggatatggttgatcctatagagatagcagatgagaccacttggattaaggagccggttgataatggcagtttacccatgactgattttgtaagtggcattgccttcagtattgaaaactctcatatgtgcatgtcacctcttgctgaaagcagtgtcattccttgtgaaagcagtaacattcagatggatagtggctataatacgcagaattgtggaagcaatattatggatacagttggggcagaaagttactgcaaagaaagtgatgcacaaacatgtgaagttgagagtaaatctcaagcatttaatatgaagcaagacaccacacagcactgtggtgaaacgcagccctttatggcgagcataaagcccggtcgaatcaagctagctaaatcccatatgtggcccgctcactggggcggcaaaactcgaagagtccccatgaaaagggtggcataaaccatcccacggatttcacacacaacgggcacacaacagcccactattcatctcttgattttatgtaaatcattatttatcg

SEQ ID NO: 375107 - DNA, 492 bp, Homo sapiens
ttttttactatttaattttattacaggggcagttttcttctagccctattcaggctagtgcaaaaaaatacagcttgggaagcataactagtccttcgcctatttcttcacccactttctcaccaattgaatttcagataggagagactccactctcaggtatgtctcataataaaatacctagttaaaagttttatactatcaatatttgttattagagaggttcttttaatttgtcttaatgatagagctcaaaatgatcactaaccttctaacatttaggaactttgatttttaaataaaagaacagtttaccttcaaaggctggaattctcaccagtttgtactgtagtgttaaatatagttactttaattagcaatatttacatcaaacactatcaaaggaaatttagcaatttccatttgtgctattgtttttgacatcacaatttcactttggtaaacaacacaactgttacagaaatgcagttt

SEQ ID NO: 375108 - DNA, 714 bp, Homo sapiens
gagacaaggtctcattctgtcacccaggctagagtgtagtggcacgaccacagctcactgtagccttcacctcccagactcaagcagtcttaccacctcagcctcctgagtagctagggctacaggcatgtgccaccacacccagctttttaaaatttttggtagagacagggtctcactatgttgccagggctagtcccaaactcctgggctcgtgcgatcctcccaccttggcctctcaaagtgttgggatgctttttgatgcagaatattgatttataaaatactgtatctttactgtcccttcagagttcagctaaagaaacgtgcttttaggttttaaaaacagtcccgataattgcatcctccagtggtcctacttaaactgaaaacaaggtattgtcttctttttcacagcaagaccacacaacacagaggtgttggatgaaaacagcaagcccttttcaatgcagcagtccatagaatacctctgtcagaatcaaagactaagcttaagagttcctcgcatatatcgttgtgcacaggatcaacatgatggtgactgggaaaaaattacttcaagtaacatgcttagctttccctccttaatgtgaaaaatcaagggcttactgacataggaacaacagaaatgctcctggaacttcaagttgctgaattataagtttattttttatcaataaatatttttatact

SEQ ID NO: 375109 - DNA, 2951 bp, Homo sapiens
agagtctatgcctgtcgtggaagctggcctggcccccggagctccctggagtcggtactgggggcttcgttttgtacgcaccgttttctctctgtgctatgggagatgtcaaggaatcaaagatgcaaataacaccagaaactccaggaaggatccctgttttaaatccttttgaaagtcctagtgattattctaatctccatgaacaaactctcgccagtccttctgtttttaaatcaacaaaattaccaactccagggaaatttagatggtctattgatcaactagctgtaataaatcctgtagaaatagacccagaagatattcatcgtcaagctttatacttaagtcattctcgaatagataaagatgtggaagacaaaagacaaaaagccattgaagagtttttcactaaagatgtcatcgtaccctctccttggactgatcatgaagggaaacagctttcacaatgtcattccagtaaatgcactaacataaatagtgactctccagttggaaaaaagctgaccattcattctgagaaaagcgatgctgcttgtcagacattgctgtctcttcctgtggattttaatttagaaaatatattaggtgactattttagagctgatgaatttgcagatcaatctcctggaaacctcagttcttcatccctcagaagaaagctgtttttagatgggaacggaagcatctccgactccttaccttcggcttctcccggaagtcctcacagtggtgttcaaacatcactagagatgttttattcaatagatttgtctcctgtaaagtgtaggagccccttgcagacaccaagttcggggcagttttcttctagccctattcaggctagtgcaaaaaaatacagcttgggaagcataactagtccttcgcctatttcttcacccactttctcaccaattgaatttcagataggagagactccactctcagaacaaaggaagtttactgttcattctcctgatgcttcatctggaacaaattctaatgggataactaatccgtgtatcagaagtccttatatagatggctgctcgccaattaaaaattggtctcctatgagacttcagatgtatagtggtggtactcagtatcggacctcagtgattcagataccttttactcttgagactcaaggtgaagatgaggaagataaagagaatattccttccacagatgtctcatcacccgccatggatgctgctggaatacacctacggcagtttagtaatgaggcttctacccatggtacacatttggttgtgactgccatgtctgttacacaaaatcagtccagtgcttctgagaaagaattagcactgttgcaggatgttgaaagggagaaagacaataacactgtggatatggttgatcctatagagatagcagatgagaccacttggattaaggagccggttgataatggcagtttacccatgactgattttgtaagtggcattgccttcagtattgaaaactctcatatgtgcatgtcacctcttgctgaaagcagtgtcattccttgtgaaagcagtaacattcagatggatagtggctataatacgcagaattgtggaagcaatattatggatacagttggggcagaaagttactgcaaagaaagtgatgcacaaacatgtgaagttgagagtaaatctcaagcatttaatatgaagcaagaccacacaacacagaggtgttggatgaaaacagcaagcccttttcaatgcagcagtccatagaatacctctgtcagaatcaaagactaagcttaagagttcctcgcatatatcgttgtgcacaggatcaacatgatggtgactgggaaaaaattacttcaagtaacatgcttagctttccctccttaatgtgaaaaatcaagggcttactgacataggaacaacagaaatgctcctggaacttcaagttgctgaattataagtttattttttatcaataaatatttttatacttacattgagtgatgtgtttaacaacaaattgtgacagagctgagtgctcctatcttacagggtcaatgaactacttattaagccttactggtagcactgaatttagcagttctgagaacatgtgaaactatgttaaaactgaaggcactatatatttttacataaaagcttgaacatacagatgaattataacctatgtgaagaaatcttagatataaaactaacttttcaaagatacaaaagaaattaaacaggtttcctgaaattttagttcttggtctgttcacctctgtggggaaaattcttagttccagtgataactgttctagttactacttttaagtatgtaaatactagaaaggtagtactagtgacatcatcacgtgtattgttatctatggggcaaatgtgtggtgcccagaataaaatatacctcatgcctagggtagggacatcctttccagctcaaacgtgggtagggatgtgggagaataagaatgtgggagaaccaagagaaaaagtggggctgggagagtggagttcccgtagggcataggcctgtgaagtaacactggggcagatatgtatgttatatacaactatttttttaaaaaacttatatccatgttgggagtagatgggtatataacagtttggaaatactatctttggagaatgtatttttgtatttataaatcaacttttaaaaactgtctcattcaaaagggaataaagacctgtgttatcaatgtgtcattttcttctttcctccataactgtaccttgaaaccttactgctgacctgcagaaaatgtgccgcgttatgtacctggctcatcttcaacacactaaccatgaacactaatagccattaggggacatggctacagatactacattggaaagttgtctttaatcacacaggtgttaaactcaatataa

SEQ ID NO: 375110 - DNA, 2010 bp, Homo sapiens
agagtctatgcctgtcgtggaagctggcctggcccccggagctccctggagtcggtactgggggcttcgttttgtacgcaccgttttctctctgtgctatgggagatgtcaaggaatcaaagatgcaaataacaccagaaactccaggaaggatccctgttttaaatccttttgaaagtcctagtgattattctaatctccatgaacaaactctcgccagtccttctgtttttaaatcaacaaaattaccaactccagggaaatttagatggtctattgatcaactagctgtaataaatcctgtagaaatagacccagaagatattcatcgtcaagctttatacttaagtcattctcgaatagataaagatgtggaagacaaaagacaaaaagccattgaagagtttttcactaaagatgtcatcgtaccctctccttggactgatcatgaagggaaacagctttcacaatgtcattccagtaaatgcactaacataaatagtgactctccagttggaaaaaagctgaccattcattctgagaaaagcgatgctgcttgtcagacattgctgtctcttcctgtggattttaatttagaaaatatattaggtgactattttagagctgatgaatttgcagatcaatctcctggaaacctcagttcttcatccctcagaagaaagctgtttttagatgggaacggaagcatctccgactccttaccttcggcttctcccggaagtcctcacagtggtgttcaaacatcactagagatgttttattcaatagatttgtctcctgtaaagtgtaggagccccttgcagacaccaagttcggggcagttttcttctagccctattcaggctagtgcaaaaaaatacagcttgggaagcataactagtccttcgcctatttcttcacccactttctcaccaattgaatttcagataggagagactccactctcagaacaaaggaagtttactgttcattctcctgatgcttcatctggaacaaattctaatgggataactaatccgtgtatcagaagtccttatatagatggctgctcgccaattaaaaattggtctcctatgagacttcagatgtatagtggtggtactcagtatcggacctcagtgattcagataccttttactcttgagactcaaggtgaagatgaggaagataaagagaatattccttccacagatgtctcatcacccgccatggatgctgctggaatacacctacggcagtttagtaatgaggcttctacccatggtacacatttggttgtgactgccatgtctgttacacaaaatcagtccagtgcttctgagaaagaattagcactgttgcaggatgttgaaagggagaaagacaataacactgtggatatggttgatcctatagagatagcagatgagaccacttggattaaggagccggttgataatggcagtttacccatgactgattttgtaagtggcattgccttcagtattgaaaactctcatatgtgcatgtcacctcttgctgaaagcagtgtcattccttgtgaaagcagtaacattcagatggatagtggctataatacgcagaattgtggaagcaatattatggatacagttggggcagaaagttactgcaaagaaagtgatgcacaaacatgtgaagttgagagtaaatctcaagcatttaatatgaagcaagaccacacaacacagaggtgttggatgaaaacagcaagcccttttcaatgcagcagtccatagaatacctctgtcagaatcaaagactaagcttaagagttcctcgcatatatcgttgtgcacaggatcaacatgatggtgactgggaaaaaattacttcaagtaacatgcttagctttccctccttaatgtgaaaaatcaagggcttactgacataggaacaacagaaatgctcctggaacttcaagttgctgaattataagtttattttttatcaataaatatttttatactt

SEQ ID NO: 375111 - DNA, 2563 bp, Homo sapiens
tgaaactataaacattttattgatattatactaacaatgtagcacttaaaaactaaggaataatttaagatgtaaaacatcaaatatgcaattaaactttgccctctttttgggaaaaaattcaaacatagtgcatgctggcttcttaaaagttgagtaacagaagtataattgccctttaaaatgactagctttgccttttctcctattattaaatataggtgactattttagagctgatgaatttgcagatcaatctcctggaaacctcagttcttcatccctcagaagaaagctgtttttagatgggaacggaagcatctccgactccttaccttcggcttctcccggaagtcctcacagtggtgttcaaacatcactagagatgttttattcaatagatttgtctcctgtaaagtgtaggagccccttgcagacaccaagttcggggcagttttcttctagccctattcaggctagtgcaaaaaaatacagcttgggaagcataactagtccttcgcctatttcttcacccactttctcaccaattgaatttcagataggagagactccactctcagaacaaaggaagtttactgttcattctcctgatgcttcatctggaacaaattctaatgggataactaatccgtgtatcagaagtccttatatagatggctgctcgccaattaaaaattggtctcctatgagacttcagatgtatagtggtggtactcagtatcggacctcagtgattcagataccttttactcttgagactcaaggtgaagatgaggaagataaagagaatattccttccacagatgtctcatcacccgccatggatgctgctggaatacacctacggcagtttagtaatgaggcttctacccatggtacacatttggttgtgactgccatgtctgttacacaaaatcagtccagtgcttctgagaaagaattagcactgttgcaggatgttgaaagggagaaagacaataacactgtggatatggttgatcctatagagatagcagatgagaccacttggattaaggagccggttgataatggcagtttacccatgactgattttgtaagtggcattgccttcagtattgaaaactctcatatgtgcatgtcacctcttgctgaaagcagtgtcattccttgtgaaagcagtaacattcagatggatagtggctataatacgcagaattgtggaagcaatattatggatacagttggggcagaaagttactgcaaagaaagtgatgcacaaacatgtgaagttgagagtaaatctcaagcatttaatatgaagcaagaccacacaacacagaggtgttggatgaaaacagcaagcccttttcaatgcagcagtccatagaatacctctgtcagaatcaaagactaagcttaagagttcctcgcatatatcgttgtgcacaggatcaacatgatggtgactgggaaaaaattacttcaagtaacatgcttagctttccctccttaatgtgaaaaatcaagggcttactgacataggaacaacagaaatgctcctggaacttcaagttgctgaattataagtttattttttatcaataaatatttttatacttacattgagtgatgtgtttaacaacaaattgtgacagagctgagtgctcctatcttacagggtcaatgaactacttattaagccttactggtagcactgaatttagcagttctgagaacatgtgaaactatgttaaaactgaaggcactatatatttttacataaaagcttgaacatacagatgaattataacctatgtgaagaaatcttagatataaaactaacttttcaaagatacaaaagaaattaaacaggtttcctgaaattttagttcttggtctgttcacctctgtggggaaaattcttagttccagtgataactgttctagttactacttttaagtatgtaaatactagaaaggtagtactagtgacatcatcacgtgtattgttatctatggggcaaatgtgtggtgcccagaataaaatatacctcatgcctagggtagggacatcctttccagctcaaacgtgggtagggatgtgggagaataagaatgtgggagaaccaagagaaaaagtggggctgggagagtggagttcccgtagggcataggcctgtgaagtaacactggggcagatatgtatgttatatacaactatttttttaaaaaacttatatccatgttgggagtagatgggtatataacagtttggaaatactatctttggagaatgtatttttgtatttataaatcaacttttaaaaactgtctcattcaaaagggaataaagacctgtgttatcaatgtgtcattttcttctttcctccataactgtaccttgaaaccttactgctgacctgcagaaaatgtgccgcgttatgtacctggctcatcttcaacacactaaccatgaacactaatagccattaggggacatggctacagatactacattggaaagttgtctttaatcacacaggtgttaaactcaatataa

SEQ ID NO: 375112 - DNA, 727 bp, Homo sapiens
tttactggcaagtttacaaaattaattttattggccatcctggaatggttagtgaacaaatttgctgtccaggtaaatttgtgaattagctatcatcagaaggaagtgcttttatcttagtaataggcctttttcagaactaaaattaatgacaatccatcctgcttatgccctaggtgacatccctggttcagttactcagtgatcccttttataggacacttgaaggcttccagatgttggttgaaaaagagtggctctcttttggtcacaaattcagtcagaggagcagcttgaccctcaactgtcaggggagtggttttgctccagtcttcttacagttcttagactgtgtacaccaggtaagtagagcaagcttgagttgacttgatatgaaggaaagaacacaacatactagcattgatggagcattgcgatggtgtgcccggtaccttcctgtcataactctgattaactcagccacaggacatgctgaaatcttagcagtagactccttctgggtcgtggcagataaaatgagttcacgtcagggctggctctcaggaggcgctcagtgctcgtggctttcctccccggtggacagaaccccggggcagctccccgcgccctgacgcccagagcggagcggcccggagcggagcgaccaccgcacactggacccgaccctagtcggccccgcgcgcccgggtcggggctggaacctgcg

SEQ ID NO: 375113 - DNA, 3100 bp, Homo sapiens
tttactggcaagtttacaaaattaattttattggccatcctggaatggttagtgaacaaatttgctgtccaggtaaatttgtgaattagctatcatcagaaggaagtgcttttatcttagtaataggcctttttcagaactaaaattaatgacaatccatcctgcttatgccctaggtgacatccctggttcagttactcagtgatcccttttataggacacttgaaggcttccagatgttggttgaaaaagagtggctctcttttggtcacaaattcagtcagaggagcagcttgaccctcaactgtcaggggagtggttttgctccagtcttcttacagttcttagactgtgtacaccaggttcacaaccagtatccaactgagtttgaattcaatctctattacttaaagttcttggctttccactatgtgtctaatcgctttaaaacatttctcctggattcagactatgaaagattagagcacggaactttatttgatgataaaggagaaaagcatgccaaaaaaggagtctgtatttgggaatgtattgacagaatgcacaagaggagtcccattttctttaattatttatattcaccattggaaatagaggctctaaagcccaatgtaaacgtctctagcctcaagaagtgggattactacatagaagagaccctgtccacaggcccttcctatgactggatgatgctaacccccaagcacttcccctccgaagactctgacctggctggagaagctgggccacggagccagaggagaacagtgtggccatgctatgatgatgtcagctgtactcagcctgatgctctcaccagccttttcagtgaaattgaaaaattggagcacaaattgaaccaagcccctgagaagtggcagcagctgtgggaaagggtaaccgtggaccttaaagaagaaccaagaacagatcgctcccaaagacacctgtcgagatccccaggaattgtgtctaccaacctaccttcctatcagaagaggtctctgctacatctcccagacagcagcatgggggaggaacagaattccagcatctccccatccaatggagtggagcgaagagcagccacgctctatagccagtatacatccaagaatgatgaaaacaggtcctttgagggaacactttataaaagaggggctttgctgaaaggttggaagccccgttggtttgttttggatgtaacaaaacatcagctgcgctactatgactcaggtgaggacacaagctgtaaaggccacattgatctggctgaagtagaaatggtcatccctgctggccccagcatgggagccccaaagcacacaagtgacaaggctttctttgatctcaagaccagcaaacgtgtgtataacttctgcgcccaggatggacagagtgcccagcaatggatggacaagatccagagttgtatctctgatgcctgatgcccatggtcaacccacgcagaagaaacagaagaactcatgctgccagatagatagaaaaagaagcatggatccttgaggagctgacaacaagttatcccagggcctgaggttctcctgcccagtcccctcttgcaggggttgctatatctacttaacctgaataggtgtttcacacaggtctggtcaacagccccatgcactccctgtatcttgcactaaatttttctaacagggtcttagtggttaatgatcagaagatgtctcctgagccaactgtgaacctcacccaggcaaaatggctaccacctacttgggtccttcttcatgaaagctatagatccttttttgttctctgaggtcataatttcctcggagacctgtttaacaagcaaaaatcaaaaccctccaagattgtctcatattctacctggactaggtttcctatgagagacatctacttgtaatgcctgacctttgagatgctcagttctctggtgctgccaaaagatgcttccatggtccgtgctctgccagtggggttcacaacaagagacgtcattgttcagtagcaggcaaagagggagcacacagcattattctgatggaaaaagattatccagggaatggtacaacaatgaccagcccaatgcaggaaaacactacttccaaaacactgaattctctagaccagaggtgctctgaggatccagggccttgtgttcttatgtatcttctgcttcctgacagcttctttttcaaaataacatgcaaaaaaagctgaatgcactaactcacaaaacaaacacttgcactgaattcccaatgaagtgaagatgttggaaagacagaggccagctatttaggaccatacgcacctgtgacaagggctgtgttgaccacagtcacactgtggcatgactggatacccaaactacacttctacacatgaaaagtaagaactgtctttagattttctttactttgataacttgtgattgtttagcttaagacccaagaaatgctgtttgctcatggtaaacagaaacagcatcttcgctacaaccactgacaccagctggcgtcataggtagctagatcattgcatttgttttgaaatgttaatatgttaaatactaaactaatatttcaaaaatgtgtatatatgatttctatatccttgtttttcagatagcctgcttataatttaatataaattaactgatgcattcataagatttcaataatgaaatggttcccttttaaaaaataaaaatactttgtagattaaaaataaatcagaatttcaaatttaaaattgtccacacactaggaaatagaactgtgttaatatataagaaatttggggataattaagaatgaaggacttttctatcatttccattttataaattgccacctgtgaaaatggtttttgcacattatttgtatttttctttgtatatgaaataattttttgtactttgtaaaatatggagcccattgtaccttcagctatttgagactatacacagtgcttcttttgtaactggattactttaactttcgtgaaggcattacattgcctcacattcactaaccaccttgaattaaatttatttcttaagaaa

SEQ ID NO: 375114 - DNA, 4148 bp, Homo sapiens
gctagtattacaggcatgaggcactgtgcccattactaaacttataattctcattcttcatggatactgaaaaatataatataatcttgtttagaattacatcgttttggcatgatatacaaatattaattccaaatccagcttcagattttagtagacttatgaagtttctatttcatatctttaaatgtcatgttaaattgaccaaataagcagaagaatgttccttacttttttcatgaagccctgagaaattgcataactcagcatttgccttcctagactttattagtacctcctgccagcatgttttgttttcagtatcaatgtactgtttctgcttaagatcttagtatttacttttaaatcctgaatttacatcaaaatataaaataggattgatttgggggatttgctaggtcattctgaggctaagattgtgtgattttgaaatgctatattggataatgtttatgttacagaagtagcaaatgaccatatgacttacggtttttagattaatcagcttgctatgacctctaaaactgtagctccagagcatgcacctttttccttagttagtggcattcccacattagattatctcactccacgactttggcttttgtgaaggtgtgtgggcaagtcttcgctctagcactcgcttgatcagctctccaacatccttcattgatgttggcgcccggctggcaggcaaggatcactcggcctccttcagtaacagcagctacctacaaaaccagctcttgaaacggcaagcagccctttacatattggtgaaaagtcgcaactaaggaacttcaaggtagaatttgctttaaattgtgagtttgttcctgttgaatttcatgaaatccggcaagtgaaagccagttttaagaagctgatgagggcttgtatcccaagcaccatccctactgactcagaagtgaccttcctgaaagcgctgggagattctgagtggttcccacagcttcacaggataatgcagctggctgtggttgtatcagaagtacttgagaatggttcctcagttttggtctgtttggaggaaggctgggacatcactgcacaagtgacatccctggttcagttactcagtgatcccttttataggacacttgaaggcttccagatgttggttgaaaaagagtggctctcttttggtcacaaattcagtcagaggagcagcttgaccctcaactgtcaggggagtggttttgctccagtcttcttacagttcttagactgtgtacaccaggttcacaaccagtatccaactgagtttgaattcaatctctattacttaaagttcttggctttccactatgtgtctaatcgctttaaaacatttctcctggattcagactatgaaagattagagcacggaactttatttgatgataaaggagaaaagcatgccaaaaaaggagtctgtatttgggaatgtattgacagaatgcacaagaggagtcccattttctttaattatttatattcaccattggaaatagaggctctaaagcccaatgtaaacgtctctagcctcaagaagtgggattactacatagaagagaccctgtccacaggcccttcctatgactggatgatgctaacccccaagcacttcccctccgaagactctgacctggctggagaagctgggccacggagccagaggagaacagtgtggccatgctatgatgatgtcagctgtactcagcctgatgctctcaccagccttttcagtgaaattgaaaaattggagcacaaattgaaccaagcccctgagaagtggcagcagctgtgggaaagggtaaccgtggaccttaaagaagaaccaagaacagatcgctcccaaagacacctgtcgagatccccaggaattgtgtctaccaacctaccttcctatcagaagaggtctctgctacatctcccagacagcagcatgggggaggaacagaattccagcatctccccatccaatggagtggagcgaagagcagccacgctctatagccagtatacatccaagaatgatgaaaacaggtcctttgagggaacactttataaaagaggggctttgctgaaaggttggaagccccgttggtttgttttggatgtaacaaaacatcagctgcgctactatgactcaggtgaggacacaagctgtaaaggccacattgatctggctgaagtagaaatggtcatccctgctggccccagcatgggagccccaaagcacacaagtgacaaggctttctttgatctcaagaccagcaaacgtgtgtataacttctgcgcccaggatggacagagtgcccagcaatggatggacaagatccagagttgtatctctgatgcctgatgcccatggtcaacccacgcagaagaaacagaagaactcatgctgccagatagatagaaaaagaagcatggatccttgaggagctgacaacaagttatcccagggcctgaggttctcctgcccagtcccctcttgcaggggttgctatatctacttaacctgaataggtgtttcacacaggtctggtcaacagccccatgcactccctgtatcttgcactaaatttttctaacagggtcttagtggttaatgatcagaagatgtctcctgagccaactgtgaacctcacccaggcaaaatggctaccacctacttgggtccttcttcatgaaagctatagatccttttttgttctctgaggtcataatttcctcggagacctgtttaacaagcaaaaatcaaaaccctccaagattgtctcatattctacctggactaggtttcctatgagagacatctacttgtaatgcctgacctttgagatgctcagttctctggtgctgccaaaagatgcttccatggtccgtgctctgccagtggggttcacaacaagagacgtcattgttcagtagcaggcaaagagggagcacacagcattattctgatggaaaaagattatccagggaatggtacaacaatgaccagcccaatgcaggaaaacactacttccaaaacactgaattctctagaccagaggtgctctgaggatccagggccttgtgttcttatgtatcttctgcttcctgacagcttctttttcaaaataacatgcaaaaaaagctgaatgcactaactcacaaaacaaacacttgcactgaattcccaatgaagtgaagatgttggaaagacagaggccagctatttaggaccatacgcacctgtgacaagggctgtgttgaccacagtcacactgtggcatgactggatacccaaactacacttctacacatgaaaagtaagaactgtctttagattttctttactttgataacttgtgattgtttagcttaagacccaagaaatgctgtttgctcatggtaaacagaaacagcatcttcgctacaaccactgacaccagctggcgtcataggtagctagatcattgcatttgttttgaaatgttaatatgttaaatactaaactaatatttcaaaaatgtgtatatatgatttctatatccttgtttttcagatagcctgcttataatttaatataaattaactgatgcattcataagatttcaataatgaaatggttcccttttaaaaaataaaaatactttgtagattaaaaataaatcagaatttcaaatttaaaattgtccacacactaggaaatagaactgtgttaatatataagaaatttggggataattaagaatgaaggacttttctatcatttccattttataaattgccacctgtgaaaatggtttttgcacattatttgtatttttctttgtatatgaaataattttttgtactttgtaaaatatggagcccattgtaccttcagctatttgagactatacacagtgcttcttttgtaactggattactttaactttcgtgaaggcattacattgcctcacattcactaaccaccttgaattaaatttatttcttaagaaaaagcatccctcatttactgtgaactaaagttcattctgtagtgcacagcattcaggagggtaacactcaggattcatacatgggactaaaggttcaagaataaaacaaagcatgacccactttgttcc

SEQ ID NO: 375115 - DNA, 552 bp, Homo sapiens
tttactggcaagtttacaaaattaattttattggccatcctggaatggttagtgaacaaatttgctgtccaggtaaatttgtgaattagctatcatcagaaggaagtgcttttatcttagtaataggcctttttcagaactaaaattaatgacaatccatcctgcttatgccctaggtgacatccctggttcagttactcagtgatcccttttataggacacttgaaggcttccagatgttggttgaaaaagagtggctctcttttggtcacaaattcagtcagaggagcagcttgaccctcaactgtcaggggagtggttttgctccagtcttcttacagttcttagactgtgtacaccaggtaagtagagcaagcttgagttgacttgatatgaaggaaagaacacaacatactagcattgatggagcattgcgatggtgtgcccggtaccttcctgtcataactctgattaactcagccacaggacatgctgaaatcttagcagtagactccttgaggttcttctttttgtgggggggcaaaagtgata

SEQ ID NO: 375116 - DNA, 248 bp, Homo sapiens
ccaatggagtggagcgaagagcagccacgctctatagccagtatacatccaagaatgatgaaaacaggtgacatgctgaaccctgctcgctgtgctgaagacttccccacagcacctgaggctaaaccacaggtccctcaataagctaggcctgtgcagtacagccttttataaacttgaaatggatttgctttaatttttgtaatgttttagatgtttctttgaaaagacaaaaaacaaaaattaca

SEQ ID NO: 375117 - DNA, 313 bp, Homo sapiens
aaccactagcttgtactgaatggctgttcccaccaacactgacacattgctgtacaagattgactttcttgacccattggcagcctctgcagctatttggccccaaataactttgtcattatgcactgccccattggaaacatcactcttttacctatagcacttcatctgcctaattctctgaatcttcatccgcagaacttcaaggtagaatttgctttaaattgtgagtttgttcctgttgaatttcatgaaatccggcaagtgaaagccagttttaagaagctgatgagggcttgtatcccaagcacca

SEQ ID NO: 375118 - DNA, 427 bp, Homo sapiens
gagataataatgcctctcttgctataccgtagagattaaatgagattatgtttatttaaaaaaaaaaaaccctcgtctggtgtctggcacacagtaggtgctcggaaaagctggttcccttcccatctctacttatggtagggattcaggtatttgttgagtgaatgactgaatggtctcctgcatgtttcagttaagccttcagtggcctggcatccactttttgttctgtttgattcttactcttttctttgccttgtgtgtttcaggttcacaaccagtatccaactgagtttgaattcaatctctattacttaaagttcttggctttccactatgtgtctaatcgctttaaaacatttctcctggattcagactatgaaagattagagcacggtatgtgtctgtatgcccttgtttcatcttt

SEQ ID NO: 375119 - DNA, 4020 bp, Homo sapiens
gctagtattacaggcatgaggcactgtgcccattactaaacttataattctcattcttcatggatactgaaaaatataatataatcttgtttagaattacatcgttttggcatgatatacaaatattaattccaaatccagcttcagattttagtagacttatgaagtttctatttcatatctttaaatgtcatgttaaattgaccaaataagcagaagaatgttccttacttttttcatgaagccctgagaaattgcataactcagcatttgccttcctagactttattagtacctcctgccagcatgttttgttttcagtatcaatgtactgtttctgcttaagatcttagtatttacttttaaatcctgaatttacatcaaaatataaaataggattgatttgggggatttgctaggtcattctgaggctaagattgtgtgattttgaaatgctatattggataatgtttatgttacagaagtagcaaatgaccatatgacttacggtttttagattaatcagcttgctatgacctctaaaactgtagctccagagcatgcacctttttccttagttagtggcattcccacattagattatctcactccacgactttggcttttgtgaaggtgtgtgggcaagtcttcgctctagcactcgcttgatcagctctccaacatccttcattgatgttggcgcccggctggcaggcaaggatcactcggcctccttcagtaacagcagctacctacaaaaccagctcttgaaacggcaagcagccctttacatattggtgaaaagtcgcaactaaggaacttcaaggtagaatttgctttaaattgtgagtttgttcctgttgaatttcatgaaatccggcaagtgaaagccagttttaagaagctgatgagggcttgtatcccaagcaccatccctactgactcagaagtgaccttcctgaaagcgctgggagattctgagtggttcccacagcttcacaggataatgcagctggctgtggttgtatcagaagtacttgagaatggttcctcagttttggtctgtttggaggaaggctgggacatcactgcacaagtgacatccctggttcagttactcagtgatcccttttataggacacttgaaggcttccagatgttggttgaaaaagagtggctctcttttggtcacaaattcagtcagaggagcagcttgaccctcaactgtcaggggagtggttttgctccagtcttcttacagttcttagactgtgtacaccaggttcacaaccagtatccaactgagtttgaattcaatctctattacttaaagttcttggctttccactatgtgtctaatcgctttaaaacatttctcctggattcagactatgaaagattagagcacggaactttatttgatgataaaggagaaaagcatgccaaaaaaggagtctgtatttgggaatgtattgacagaatgcacaagaggagtcccattttctttaattatttatattcaccattggaaatagaggctctaaagcccaatgtaaacgtctctagcctcaagaagtgggattactacatagaagagaccctgtccacaggcccttcctatgactggatgatgctaacccccaagcacttcccctccgaagactctgacctggctggagaagctgggccacggagccagaggagaacagtgtggccatgctatgatgatgtcagctgtactcagcctgatgctctcaccagccttttcagtgaaattgaaaaattggagcacaaattgaaccaagcccctgagaagtggcagcagctgtgggaaagggtaaccgtggaccttaaagaagaaccaagaacagatcgctcccaaagacacctgtcgagatccccaggaattgtgtctaccaacctaccttcctatcagaagaggtctctgctacatctcccagacagcagcatgggggaggaacagaattccagcatctccccatccaatggagtggagcgaagagcagccacgctctatagccagtatacatccaagaatgatgaaaacaggtcctttgagggaacactttataaaagaggggctttgctgaaaggttggaagccccgttggtttgttttggatgtaacaaaacatcagctgcgctactatgactcaggtgaggacacaagctgtaaaggccacattgatctggctgaagtagaaatggtcatccctgctggccccagcatgggagccccaaagcacacaagtgacaaggctttctttgatctcaagaccagcaaacgtgtgtataacttctgcgcccaggatggacagagtgcccagcaatggatggacaagatccagagttgtatctctgatgcctgatgcccatggtcaacccacgcagaagaaacagaagaactcatgctgccagatagatagaaaaagaagcatggatccttgaggagctgacaacaagttatcccagggcctgaggttctcctgcccagtcccctcttgcaggggttgctatatctacttaacctgaataggtgtttcacacaggtctggtcaacagccccatgcactccctgtatcttgcactaaatttttctaacagggtcttagtggttaatgatcagaagatgtctcctgagccaactgtgaacctcacccaggcaaaatggctaccacctacttgggtccttcttcatgaaagctatagatccttttttgttctctgaggtcataatttcctcggagacctgtttaacaagcaaaaatcaaaaccctccaagattgtctcatattctacctggactaggtttcctatgagagacatctacttgtaatgcctgacctttgagatgctcagttctctggtgctgccaaaagatgcttccatggtccgtgctctgccagtggggttcacaacaagagacgtcattgttcagtagcaggcaaagagggagcacacagcattattctgatggaaaaagattatccagggaatggtacaacaatgaccagcccaatgcaggaaaacactacttccaaaacactgaattctctagaccagaggtgctctgaggatccagggccttgtgttcttatgtatcttctgcttcctgacagcttctttttcaaaataacatgcaaaaaaagctgaatgcactaactcacaaaacaaacacttgcactgaattcccaatgaagtgaagatgttggaaagacagaggccagctatttaggaccatacgcacctgtgacaagggctgtgttgaccacagtcacactgtggcatgactggatacccaaactacacttctacacatgaaaagtaagaactgtctttagattttctttactttgataacttgtgattgtttagcttaagacccaagaaatgctgtttgctcatggtaaacagaaacagcatcttcgctacaaccactgacaccagctggcgtcataggtagctagatcattgcatttgttttgaaatgttaatatgttaaatactaaactaatatttcaaaaatgtgtatatatgatttctatatccttgtttttcagatagcctgcttataatttaatataaattaactgatgcattcataagatttcaataatgaaatggttcccttttaaaaaataaaaatactttgtagattaaaaataaatcagaatttcaaatttaaaattgtccacacactaggaaatagaactgtgttaatatataagaaatttggggataattaagaatgaaggacttttctatcatttccattttataaattgccacctgtgaaaatggtttttgcacattatttgtatttttctttgtatatgaaataattttttgtactttgtaaaatatggagcccattgtaccttcagctatttgagactatacacagtgcttcttttgtaactggattactttaactttcgtgaaggcattacattgcctcacattcactaaccaccttgaattaaatttatttcttaagaaa

SEQ ID NO: 375120 - DNA, 360 bp, Homo sapiens
tgaaaatatgattccccaccccccaacccaaaccaaatgagactcattctggtttctgtcttctaaaatgatatccttttcattaagatgaatctggtcccaatccaaagtgcaatgatgactgacagtagtgtctagtataattggagcagtgatggaggtggggcaggtaaatgcaagagtggcagaaattaatctgcagtcagaaattaatctgaccccagactaatgctggggcaggagagagagatatatgagagtgccagaatatggtagatatggtagatgccagggcagggtgaaggcatccaggtgggagctgaaatccagccaggatactgctagacaagctgtttttct

SEQ ID NO: 375121 - DNA, 187 bp, Homo sapiens
gcgggtatgggaatctcgagctctgagaaggagggtgatgacaggcatggcagtacttagttaagtgtccacatgtcccgcgatccagcaattccactcccgggcgtgtatcccacagacatcctcacccaagtccagaagggaccatgtccaaggatattcactacagcctcatttacagtggctg

SEQ ID NO: 375122 - DNA, 631 bp, Homo sapiens
gaaccactaattttacaaagagagttgtcctaaactgtgacaaattttccagtacttaattctttttacaattcattcgttttttaaatgacaaaattgtatatatgttgtgtaaaacctttttagaaataggtagatggtggaatgattgcattgcgctcaggaacatatgcatacttactttttgtggtgagaacccttcttgattttcaagaatacgatacattaactgcagttaccatgttgtgcaatgtatctcttaaacttattcctcctgtctaactacacttttgaatgatttcaccgtctccccaaacccctgcctcccacccccggtaacctccattctactctctgcttctgtgagtagaagcaggaggctggagaattgcttgaactcaggaggcagaggttgcagtgagctgagatcgagccgctgcactccagcctgtgtgacagagcaagactctcaaaaaaacaaacaaacaaacaaaaaaaacagagaatccagaggtcagacattccttttagtaaggactccaatatggtttctcacctactcactccaacaaaattgctcttctcaaagcacaaacgatattgttaaattatgaattaaagcataattcct

SEQ ID NO: 375123 - DNA, 411 bp, Homo sapiens
ttgatattgtgatccctttgacacttgtagtcggatcagatggaaaagaattttaatattgtgattgcatccaggagatggggcaaaggtgcctgttatgacttcatgaagactgtcaggccttaggtcagcacagacaagtgactttgggcctagtgcaatgcctcacgcctgtaatccgagcacttcgggaggctgaggctgaggtgggaagatcacttgaggccaagagtttgagaccagcctgggcaacatggtaaaccccgtctctacaagaaataaaattagctggctgtggtggtgtgcacccgtagtcctagctacttaggagactgaggcaagaggatcacttgagcccaggagttagaggctgcagtgagctaggatcacactactgcacttcagcctggg

SEQ ID NO: 375124 - DNA, 351 bp, Homo sapiens
gcaaaacagttaactctttgctaatctgcgagtaaataaaatgattttgctaataaattgagttttacataaagcatgaaaatttaaaaggacaacttaaaaaggtaaagaatggttgattacaaagagaacaatcaaaagttctacaagatgaacgtcatgggctaacaagaacctcaaattatgactcattgctacgtaatttaaatttcatctgtaatacagtaagcactagttgtgaaatgtttccaaaattgtatttaaatagtttgtatattcactgaattccttacatttcatgtttctaactgtaaatgaaactcccaagcctgagtcatgtttttaatttaa

SEQ ID NO: 375125 - DNA, 392 bp, Homo sapiens
atgttcccctgggatactcccagttcgctcaagtagcaacgttcaccacctttctctggtactaactggaatcggcctgcttatactactccttccaaagcagtaataatggtgctaattatatggcctgactaagtgcctgccattcgacaccttcctcttagtaccatgcatccttatgacagcactgcagtatacaggttattatctagggcaaaagttacagtcagagctgggcacagtggctcacacctagaatcccagcttacttagggggcccaagcaggaagatcacctgagcgcaggagttaggaggccaaggcagcaagaccgcgtgagcccagaagtttgagttccacctggcaacatagcaagaccaccatttctttaaa

SEQ ID NO: 375126 - DNA, 582 bp, Homo sapiens
ggaaagggccagatcccagctgtcactcactgtagtcatgaaccgaagccatagcatcactatagtaagataaaagaggtaccaagaggacaggaggaaacaaaatcagtcttgagtcacatatgggcatcatgggtatttataaaaggcttagacggttccttcctaaatttgaatttatgtcaagagataatcatttcaggaagtgtgagttcctctcttcaaactgttttggacaatcccattctgatatgagctgcatagagccaagctcatttatagggaacatctgtgtgggaggaagggggggagtggaagagcatagaaaagagacctcctgaagctgaacttggacacctcttgtgtcttttcctggtttcctttgagttgtacatttgcttggttgtgtgacaaggaaggtctatgaaacttttatggtccattatgtgggtttatgtatataacatgaaaaagtgacacgtggaagaggagtttcactgaaatctgcactctttttgtgaatgtctgtgttccagaaggttcctagagttgttggatgatggctctgattactgactcctt

SEQ ID NO: 375127 - DNA, 153 bp, Homo sapiens
tcatttattgtgcagaggtatgctttaaattttaagatactcaagttccttttctttttgtggtttatgttttaaaatcttatgtaataagtacttccccactccaatgtcataaagatattattttctttcttccgaacttttacaatattg

SEQ ID NO: 375128 - DNA, 381 bp, Homo sapiens
  misc_feature (29)..(29): n is a, c, g, or t
cataaccttagatggtgctcttgactttnctgtcatctgcagtgacttcgtcaagagcaccataaccttagatgggggtgtcctggtacatgtgcagaaatgggatggaaaatcaaccaccataaagagaaaacgagaggatgataaactggtggtggaatgcgtcatgaaaggcgtcacttccacgagagtttatgagagagcataagccaagggacgttgacctggactgaagttcgcattgaactctacaacattctgtgggatatattgttcaaaaagatattgttgttttccatgatttagcaagcaactaattttctcccaagctgattttattcaatatggttacgttggttaaataaactttttttagattta

SEQ ID NO: 375129 - DNA, 325 bp, Homo sapiens
tctttggaatgaatattgttttattcccaacattcagagagacaataaataaatccatggtttaatccagtgattgaccaagaattgttttttgtgtctaggaatgcgtcatgaaaggcgtcacttccacgagagtttatgagagagcataagccaagggacgttgacctggactgaagttcgcattgaactctacaacattctgtgggatatattgttcaaaaagatattgttgttttccatgatttagcaagcaactaattttctcccaagctgattttattcaatatggttacgttggttaaataaactttttttagattta

SEQ ID NO: 375130 - DNA, 349 bp, Homo sapiens
gggaattcacatgttttattttgccacggcccatgatttcatcaatatcccattaaattttagtgtgacaactacatttagtttgttttcttacacagattcgagaggatgataaactggtggtggaatgcgtcatgaaaggcgtcacttccacgagagtttatgagagagcataagccaagggacgttgacctggactgaagttcgcattgaactctacaacattctgtgggatatattgttcaaaaagatattgttgttttccatgatttagcaagcaactaattttctcccaagctgattttattcaatatggttacgttggttaaataaactttttttagattta

SEQ ID NO: 375131 - DNA, 738 bp, Homo sapiens
ccaggagctgacacggcacaacgatacaaatccctgtggaaacagatgctgccgtgccggcgggctgtgagcacagcatgctgcatgtgcccatctggacacagcaccctcctgaaaactgcagcttccttctcaccttgaagaataatcctagaaaactcacaaaatgtgtgatgcttttgtaggtacctggaaacttgtctccagtgaaaactttgatgattatatgaaagaagtaggagtgggctttgccaccaggaaagtggctggcatggccaaacctaacatgatcatcagtgtgaatggggatgtgatcaccattaaatctgaaagtacctttaaaaatactgagatttccttcatactgggccaggaatttgacgaagtcactgcagatgacaggaaagtcaagagcaccataaccttagatgggggtgtcctggtacatgtgcagaaatgggatggaaaatcaaccaccataaagagaaaacgagaggatgataaactggtggtggaatgcgtcatgaaaggcgtcacttccacgagagtttatgagagagcataagccaagggacgttgacctggactgaagttcgcattgaactctacaacattctgtgggatatattgttcaaaaagatattgttgttttccatgatttagcaagcaactaattttctcccaagctgattttattcaatatggttacgttggttaaataaactttttttagattta

SEQ ID NO: 375132 - DNA, 897 bp, Homo sapiens
  misc_feature (764)..(764): n is a, c, g, or t
  misc_feature (766)..(766): n is a, c, g, or t
  misc_feature (768)..(768): n is a, c, g, or t
  misc_feature (783)..(783): n is a, c, g, or t
  misc_feature (785)..(785): n is a, c, g, or t
  misc_feature (788)..(788): n is a, c, g, or t
  misc_feature (794)..(794): n is a, c, g, or t
  misc_feature (798)..(798): n is a, c, g, or t
  misc_feature (800)..(800): n is a, c, g, or t
  misc_feature (804)..(804): n is a, c, g, or t
  misc_feature (807)..(807): n is a, c, g, or t
  misc_feature (811)..(811): n is a, c, g, or t
  misc_feature (823)..(823): n is a, c, g, or t
ccaggagctgacacggcacaacgatacaaatccctgtggaaacagatgctgccgtgccggcgggctgtgagcacagcatgctgcatgtgcccatctggacacagcaccctcctgaaaactgcagcttccttctcaccttgaagaataatcctagaaaactcacaaaatgtgtgatgcttttgtaggtacctggaaacttgtctccagtgaaaactttgatgattatatgaaagaagtaggagtgggctttgccaccaggaaagtggctggcatggccaaacctaacatgatcatcagtgtgaatggggatgtgatcaccattaaatctgaaagtacctttaaaaatactgagatttccttcatactgggccaggaatttgacgaagtcactgcagatgacaggaaagtcaagagcaccataaccttagatgggggtgtcctggtacatgtgcagaaatgggatggaaaatcaaccaccataaagagaaaacgagaggatgataaactggtggtggaatgcgtcatgaaaggcgtcacttccacgagagtttatgagagagcataagccaagggacgttgacctggactgaagttcgcattgaactctacaacattctgtgggatatattgttcaaaaagatattgttgttttccatgatttagcaagcaactaattttctcccaagctgattttattcaatatggttacgttggttaaataaactttttttagatttacgcaaacaaaaaaaaacaaaaaaaanantntgtgggggcgcccgngncanaaaaantttntnaaancancgtntgggggcggggnccaagaaagatccagaagggacaaggcggtacaaagacaaatcgggctacacgggcgggggattccacatagag

SEQ ID NO: 375133 - DNA, 785 bp, Homo sapiens
ccaggagctgacacggcacaacgatacaaatccctgtggaaacagatgctgccgtgccggcgggctgtgagcacagcatgctgcatgtgcccatctggacacagcaccctcctgaaaactgcagcttccttctcaccttgaagaataatcctagaaaactcacaaaatgtgtgatgcttttgtaggtacctggaaacttgtctccagtgaaaactttgatgattatatgaaagaagtaggagtgggctttgccaccaggaaagtggctggcatggccaaacctaacatgatcatcagtgtgaatggggatgtgatcaccattaaatctgaaagtacctttaaaaatactgagatttccttcatactgggccaggaatttgacgaagtcactgcagatgacaggaaagtcaagagcaccataaccttagatgggggtgtcctggtacatgtgcagaaatgggatggaaaatcaaccaccataaagagaaaacgagaggatgataaactggtggtggaatgcgtcatgaaaggcgtcacttccacgagagtttatgagagagcataagccaagggacgttgacctggactgaagttcgcattgaactctacaacattctgtgggatatattgttcaaaaagatattgttgttttccatgatttagcaagcaactaattttctcccaagctgattttattcaatatggttacgttggttaaataaactttttttagatttaacaacacacacaacgacagagaaacacaaacacaagcataaaaagag

SEQ ID NO: 375134 - DNA, 1294 bp, Homo sapiens
ccaggagctgacacggcacaacgatacaaatccctgtggaaacagatgctgccgtgccggcgggctgtgagcacagcatgctgcatgtgcccatctggacacagcaccctcctgaaaactgcagcttccttctcaccttgaagaataatcctagaaaactcacaaaatgtgtgatgcttttgtaggtacctggaaacttgtctccagtgaaaactttgatgattatatgaaagaagtaggagtgggctttgccaccaggaaagtggctggcatggccaaacctaacatgatcatcagtgtgaatggggatgtgatcaccattaaatctgaaagtacctttaaaaatactgagatttccttcatactgggccaggaatttgacgaagtcactgcagatgacaggaaagtcaagagcaccataaccttagatgggggtgtcctggtacatgtgcagaaatgggatggaaaatcaaccaccataaagagaaaacgagaggatgataaactggtggtggaatgcgtcatgaaaggcgtcacttccacgagagtttatgagagagcataagccaagggacgttgacctggactgaagttcgcattgaactctacaacattctgtgggatatattgttcaaaaagatattgttgttttccatgatttagcaagcaactaattttctcccaagctgattttattcaatatggttacgttggttaaataaactttttttagatttagaaggtgatgtaatgatgtattcattgtgcttatgatgtattcttagtcataactgagtgaaggaaatgggaaatttgcattatttctttgttctgatatgaataataacatatttcataataattcaaggtaaaaagggatatctatggatttccctaggtaggagataacaagtatgtaccattactgaatattaaatccttctttaccatagctacagttaagtaggtgtatctcagaaacctaaggtagttttaaatgtagtgaaattgtccacagcaagctggcccaagtgctcacattttatacccgctctgtcttagtgcgttgcaagagaggagtatatacagtagttcccccttatccacaggggtacattctaagacccccggtgggtgactgaaaccacagatagtaccgaatcttatacatactatgttttttttctaaacataaatacctacaataaagtttaatttttaaattaggcaccataattaataataaaacagaacagttataacaatatactataataaaattatgtgtatgtga

SEQ ID NO: 375135 - DNA, 985 bp, Homo sapiens
ccaggagctgacacggcacaacgatacaaatccctgtggaaacagatgctgccgtgccggcgggctgtgagcacagcatgctgcatgtgcccatctggacacagcaccctcctgaaaactgcagcttccttctcaccttgaagaataatcctagaaaactcacaaaatgtgtgatgcttttgtaggtacctggaaacttgtctccagtgaaaactttgatgattatatgaaagaagtaggagtgggctttgccaccaggaaagtggctggcatggccaaacctaacatgatcatcagtgtgaatggggatgtgatcaccattaaatctgaaagtacctttaaaaatactgagatttccttcatactgggccaggaatttgacgaagtcactgcagatgacaggaaagtcaagagcaccataaccttagatgggggtgtcctggtacatgtgcagaaatgggatggaaaatcaaccaccataaagagaaaacgagaggatgataaactggtggtggaatgcgtcatgaaaggcgtcacttccacgagagtttatgagagagcataagccaagggacgttgacctggactgaagttcgcattgaactctacaacattctgtgggatatattgttcaaaaagatattgttgttttccatgatttagcaagcaactaattttctcccaagctgattttattcaatatggttacgttggttaaataaactttttttagatttactaccacacaacaacacaaacacacaacacaaactttgtgggcccctcgggacccaggaaaagggctcttagaaccctgctttgtgggccggcgccccatagaggtaacgcaacatggcaaacccgttccaagaaaccggggacaggaaaagggcgggtatccccccaaataagaagccggggaaccgcggtctgacaacccaagtggctcgggaccaaggggccacacgggcccagagccaaaaac

SEQ ID NO: 375136 - DNA, 780 bp, Homo sapiens
ccaggagctgacacggcacaacgatacaaatccctgtggaaacagatgctgccgtgccggcgggctgtgagcacagcatgctgcatgtgcccatctggacacagcaccctcctgaaaactgcagcttccttctcaccttgaagaataatcctagaaaactcacaaaatgtgtgatgcttttgtaggtacctggaaacttgtctccagtgaaaactttgatgattatatgaaagaagtaggagtgggctttgccaccaggaaagtggctggcatggccaaacctaacatgatcatcagtgtgaatggggatgtgatcaccattaaatctgaaagtacctttaaaaatactgagatttccttcatactgggccaggaatttgacgaagtcactgcagatgacaggaaagtcaagagcaccataaccttagatgggggtgtcctggtacatgtgcagaaatgggatggaaaatcaaccaccataaagagaaaacgagaggatgataaactggtggtggaatgcgtcatgaaaggcgtcacttccacgagagtttatgagagagcataagccaagggacgttgacctggactgaagttcgcattgaactctacaacattctgtgggatatattgttcaaaaagatattgttgttttccatgatttagcaagcaactaattttctcccaagctgattttattcaatatggttacgttggttaaataaactttttttagatttaaaaaaacacacacagagcaccacacgaaaacaccgacaaaaa

SEQ ID NO: 375137 - DNA, 765 bp, Homo sapiens
cctcacaatcaaggacaaattcctgaatgcaacatttgcttttccgtcttcccgcttcacctcactcatccctgcagaagtacaagtattcctggcttcttcaagtctacgcctaagaattaagagccttggggagaagggcactgcatcgaccactgcatctcaatcattgtggcagacgtaccacagcactgggaagctggccttggcaagaatctcaggctattactacagagttgggaagaaggtttaggatcaagatagaggtgactgaccaagcatttctccttgttgccgccatgtgaagaaggacgtgtttgcttccccttctgccatgatcagaagtttcctgagtcctctccagccatgctgaactaaaacatgtcccaatccctggtgttgaggattctctggggagaagactcaccgtgaagaccttctcaggctgaccccgggctctcatgttggtgtcatgaattaacttcagaatcatccaagcttcatcatgttttccaacctaagaaatgagagtggacagtgaagcgctaggagtgacacacttaccctccctgattttccaatagccgtcttgcattgtcagatcaaatgaggtgtaattgtgcaaatgtatctcagtacatcccattggaacatacagactatttggatatcactgaatacatgagcagttcaaataatatggttataactagaaatagtatctccagatggtaagatttcgtctataaaacaataaaccatgtt

SEQ ID NO: 375138 - DNA, 672 bp, Homo sapiens
ccagagtgaaaaactttattaacaacaggtttcaacgagaaagcaaatgaatacccctagaaacatggacagcatctcccccagcagcaggcaggggaagggaggcaggaggggtaagcctagggtgttccctaggaaagggccaggttccctctatccagctgggggcaccgagacggcctcattcagggaagtccaggatggcagctgaaggcagcaggtttagcagccaaagcccaggcctagtggatagacagggtccaaaatgtgacccttctaggctggtatcaccatgggggcgtcatgggctgaggattctgcagataggacatcaccacggcagagatggacagcggcaagtctcacatgaagctactcatcatttgcttcgtgtcctccgagctccgagagttggcaaagctgatgaaggagcagtagacagcgacccaagcacaccacttcagctagggaaagcttaagcatgaggccgcacatgctgaagatcatgcccagcaggttcatgtagtccggcgtcgggtcgtccaaggccgggttacattcgctcggcgggggcttgtacctcagcactttgttcggcctccgtgggtccgacatattgttagtggacatagcgagtcgaaggccagatcacgcctcttccgctgcaggaat

SEQ ID NO: 375139 - DNA, 1475 bp, Homo sapiens
ggccagggcgcggtctggaggctcacgggagagaggctgtagccctgggcaatcccgggggtcgttacaggaaggtaggaaaatgccaccctcagggcactggttgggctaaaggtgacactggcgtctcacgggctatgaagacggaatgcctcttaatgccggaattccaagacggaatgcctcttaatgccgggcaagtctcacatgaagctactcatcatttgcttcgtgtcctccgagctccgagagttggcaaagctgatgaaggagcagtagacagcgacccaagcacaccacttcagctagggaaagaccgatttaaggctgcaaggaaggagtcctgggagcatggctttccctgagccaaagccgcggcctccagagctgccgcagaaacggttgaagacgctggactgcgggcagggggcagtgcgagccgtacgatttaatgtggatggcaattactgcctgacgtgcggcagtgacaagacgctgaagctgtggaacccgcttcgggggacgctgctgcggacgtacagcggccacggctacgaggtgctggatgcggccggctcctttgacaacagtagtctctgctccggcggcggggacaaggcggtggttctgtgggatgtggcatcagggcaggtcgtgcgcaaattccggggccacgcagggaaggtgaacacggtgcagtttaatgaagaggccacagttatcctgtccggctctattgattccagtatccgctgttgggattgccgctcacggaggcctgagccagtgcagacgctggatgaggccagagatggcgtgtccagtgtgaaggtgtcagaccacgagatcctggcaggctccgtggatggccgcgtgagacgctatgacctaaggatggggcagctcttctcagactacgtgggcagccccatcacctgcacctgcttcagccgggatgggcagtgcaccctggtgtccagcctggactccacattgcggctcctggacaaagacacaggggagctgctgggcgagtacaagggccataagaaccaggaatacaagctggactgctgcctgagcgagcgtgacacacatgtggtcagctgttctgaggacgggaaggtgttcttctgggacctggtggagggtgcgctggctctggccctgcctgtgggttccggtgtggtgcagtcgctggcctaccacccaacagagccctgcctgctgaccgccatgggaggcagcgtccagtgctggcgagaggaggcctatgaggcagaggatggagcaggctgaagccaggggacccaccaacaggaccaaggaccgagacacagacatggaaggacttcagataccatcttattctagagacgtagctgaccaaaaagtaggggaggggctgggtctgcaaattaataaatagaagagggggtaagaccttcctgggacgcagccgatcagtcctcgtt

SEQ ID NO: 375140 - DNA, 2573 bp, Homo sapiens
ggccagggcgcggtctggaggctcacgggagagaggctgtagccctgggcaatcccgggggtcgttacaggaaggtaggaaaatgccaccctcagggcactggttgggctaaaggtgacactggcgtctcacgggctatgaagacggaatgcctcttaatgccggaattccaagacggaatgcctcttaatgccgggcaagtctcacatgaagctactcatcatttgcttcgtgtcctccgagctccgagagttggcaaagctgatgaaggagcagtagacagcgacccaagcacaccacttcagctagggaaagaccgatttaaggctgcaaggaaggagtcctgggagcatggctttccctgagccaaagccgcggcctccagagctgccgcagaaacggttgaagacgctggactgcgggcagggggcagtgcgagccgtacgatttaatgtggatggcaattactgcctgacgtgcggcagtgacaagacgctgaagctgtggaacccgcttcgggggacgctgctgcggacgtacagcggccacggctacgaggtgctggatgcggccggctcctttgacaacagtagtctctgctccggcggcggggacaaggcggtggttctgtgggatgtggcatcagggcaggtcgtgcgcaaattccggggccacgcagggaaggtgaacacggtgcagtttaatgaagaggccacagttatcctgtccggctctattgattccagtatccgctgttgggattgccgctcacggaggcctgagccagtgcagacgctggatgaggccagagatggcgtgtccagtgtgaaggtgtcagaccacgagatcctggcagggtgagtggagccaggacctggtctcaccccaggtgctacggggaatcatagctgcccccatgctcagattaaaacctactctcagctgggcacagtggcacacagctgtaatcccagctacttgggaggctgaagtggaaggatcacttgagtccaagagttcgaggcaccattgcactccatgctgggtgaaagacagactgtctacaaaataataataatctggcgtgagccaccgcgcctggtggaaaaaatatattttctattcattaagtggaagtgaagagatcgtcataaagatcttcgtgttgagaaagcagaggaggaggaagaggagggattgatcttggtgtctcacagctgatagaggcagaagaaaatccacatataagtggacgcgttcagttcaaaccgtgttgttcatgggtcaactgtactttgaaaagtgctccctctggtggctgtggggggtgcagggagaccagaacagtctagatgctggtgctgggtagtggggaaagtggtgggactgagtactgaggaggaggagctggagaatgcaggaaaagggggaattgggccaggtggggtggctcacacctgtaatcccagcaccttgggaggctgaggtgggcggatcacctgaggttgggagttcgagaccagcctgaccaacatggagaaaccccgtctctactaaaaatacaaaattagcagggcgtggtggtgcatgcctgtattcccatctactcgggaggctgaggaaggagaatctcttgaacccgggaggcagaggttccggtgagccaagatcatgccattgcactccagcctgagcaacaagagcaaaactctgtctcaaacaaaaggaagaaaagggggaatcagaaggactccaagggcttggaaagggggtgtgggtcttggaaatgatggagtaggacgtaattggccctgggcctgagtctcaaggccagagcttcagaattccactcctgtgcactggaagagcaggcccactgggctgggaaggcacagggctgcctggagccatgtgagtgtagtcaaggttcccgctggatctaccctctcctgcagctccgtggatggccgcgtgagacgctatgacctaaggatggggcagctcttctcagactacgtgggcagccccatcacctgcacctgcttcagccgggatgggcagtgcaccctggtgtccagcctggactccacattgcggctcctggacaaagacacaggggagctgctgggcgagtacaagggccataagaaccaggaatacaagctggactgctgcctgagcgagcgtgacacacatgtggtcagctgttctgaggacgggaaggtgttcttctgggacctggtggagggtgcgctggctctggccctgcctgtgggttccggtgtggtgcagtcgctggcctaccacccaacagagccctgcctgctgaccgccatgggaggcagcgtccagtgctggcgagaggaggcctatgaggcagaggatggagcaggctgaagccaggggacccaccaacaggaccaaggaccgagacacagacatggaaggacttcagataccatcttattctagagacgtagctgaccaaaaagtaggggaggggctgggtctgcaaattaataaatagaagagggggtaagaccttcctgggacgcagccgatcagtcctcgtt

SEQ ID NO: 375141 - DNA, 1562 bp, Homo sapiens
ggccagggcgcggtctggaggctcacgggagagaggctgtagccctgggcaatcccgggggtcgttacaggaaggtaggaaaatgccaccctcagggcactggttgggctaaaggtgacactggcgtctcacgggctatgaagacggaatgcctcttaatgccggaattccaagacggaatgcctcttaatgccgggcaagtctcacatgaagctactcatcatttgcttcgtgtcctccgagctccgagagttggcaaagctgatgaaggagcagtagacagcgacccaagcacaccacttcagctagggaaagaccgatttaaggctgcaaggaaggagtcctgggagcatggctttccctgagccaaagccgcggcctccagagctgccgcagaaacggttgaagacgctggactgcgggcagggggcagtgcgagccgtacgatttaatgtggatggcaattactgcctgacgtgcggcagtgacaagacgctgaagctgtggaacccgcttcgggggacgctgctgcggacgtacagcggccacggctacgaggtgctggatgcggccggctcctttgacaacagtagtctctgctccggcggcggggacaaggcggtggttctgtgggatgtggcatcagggcaggtcgtgcgcaaattccggggccacgcagggaaggtgaacacggtgcagtttaatgaagaggccacagttatcctgtccggctctattgattccagtatccgctgttgggattgccgctcacggaggcctgagccagtgcagacgctggatgaggccagagatggcgtgtccagtgtgaaggtgtcagaccacgagatcctggcaggcagggcgtggtggtgcatgcctgtattcccatctactcgggaggctgaggaaggagaatctcttgaacccgggaggcagaggttccgctccgtggatggccgcgtgagacgctatgacctaaggatggggcagctcttctcagactacgtgggcagccccatcacctgcacctgcttcagccgggatgggcagtgcaccctggtgtccagcctggactccacattgcggctcctggacaaagacacaggggagctgctgggcgagtacaagggccataagaaccaggaatacaagctggactgctgcctgagcgagcgtgacacacatgtggtcagctgttctgaggacgggaaggtgttcttctgggacctggtggagggtgcgctggctctggccctgcctgtgggttccggtgtggtgcagtcgctggcctaccacccaacagagccctgcctgctgaccgccatgggaggcagcgtccagtgctggcgagaggaggcctatgaggcagaggatggagcaggctgaagccaggggacccaccaacaggaccaaggaccgagacacagacatggaaggacttcagataccatcttattctagagacgtagctgaccaaaaagtaggggaggggctgggtctgcaaattaataaatagaagagggggtaagaccttcctgggacgcagccgatcagtcctcgtt

SEQ ID NO: 375142 - DNA, 2536 bp, Homo sapiens
ggccagggcgcggtctggaggctcacgggagagaggctgtagccctgggcaatcccgggggtcgttacaggaaggtaggaaaatgccaccctcagggcactggttgggctaaaggtgacactggcgtctcacgggctatgaagacggaatgcctcttaatgccggaattccaagacggaatgcctcttaatgccgggcaagtctcacatgaagctactcatcatttgcttcgtgtcctccgagctccgagagttggcaaagctgatgaaggagcagtagacagcgacccaagcacaccacttcagctagggaaagaccgatttaaggctgcaaggaaggagtcctgggagcatggctttccctgagccaaagccgcggcctccagagctgccgcagaaacggttgaagacgctggactgcgggcagggggcagtgcgagccgtacgatttaatgtggatggcaattactgcctgacgtgcggcagtgacaagacgctgaagctgtggaacccgcttcgggggacgctgctgcggacgtacagcggccacggctacgaggtgctggatgcggccggctcctttgacaacagtagtctctgctccggcggcggggacaaggcggtggttctgtgggatgtggcatcagggcaggtcgtgcgcaaattccggggccacgcagggaaggtgaacacggtgcagtttaatgaagaggccacagttatcctgtccggctctattgattccagtatccgctgttgggattgccgctcacggaggcctgagccagtgcagacgctggatgaggccagagatggcgtgtccagtgtgaaggtgtcagaccacgagatcctggcagggtgagtggagccaggacctggtctcaccccaggtgctacggggaatcatagctgcccccatgctcagattaaaacctactctcagctgggcacagtggcacacagctgtaatcccagctacttgggaggctgaagtggaaggatcacttgagtccaagagttcgaggcaccattgcactccatgctgggtgaaagacagactgtctacaaaataataataatctggcgtgagccaccgcgcctggtggaaaaaatatattttctattcattaagtggaagtgaagagatcgtcataaagatcttcgtgttgagaaagcagaggaggaggaagaggagggattgatcttggtgtctcacagctgatagaggcagaagaaaatccacatataagtggacgcgttcagttcaaaccgtgttgttcatgggtcaactgtactttgaaaagtgctccctctggtggctgtggggggtgcagggagaccagaacagtctagatgctggtgctgggtagtggggaaagtggtgggactgagtactgaggaggaggagctggagaatgcaggaaaagggggaattgggccaggtggggtggctcacacctgtaatcccagcaccttgggaggctgaggtgggcggatcacctgaggttgggagttcgagaccagcctgaccaacatggagaaaccccgtctctactaaaaatacaaaattagcagggcgtggtggtgcatgcctgtattcccatctactcgggaggctgaggaaggagaatctcttgaacccgggaggcagaggttccggtgagccaagatcatgccattgcactccagcctgagcaacaagagcaaaactctgtctcaaacaaaaggaagaaaagggggaatcagaaggactccaagggcttggaaagggggtgtgggtcttggaaatgatggagtaggacgtaattggccctgggcctgagtctcaaggccagagcttcagaattccactcctgtgcactggaagagcaggcccactgggctgggaaggcacagggctgcctggagccatgtgagtgtagtcaaggttcccgctggatctaccctctcctgcagctccgtggatggccgcgtgagacgctatgacgccccatcacctgcacctgcttcagccgggatgggcagtgcaccctggtgtccagcctggactccacattgcggctcctggacaaagacacaggggagctgctgggcgagtacaagggccataagaaccaggaatacaagctggactgctgcctgagcgagcgtgacacacatgtggtcagctgttctgaggacgggaaggtgttcttctgggacctggtggagggtgcgctggctctggccctgcctgtgggttccggtgtggtgcagtcgctggcctaccacccaacagagccctgcctgctgaccgccatgggaggcagcgtccagtgctggcgagaggaggcctatgaggcagaggatggagcaggctgaagccaggggacccaccaacaggaccaaggaccgagacacagacatggaaggacttcagataccatcttattctagagacgtagctgaccaaaaagtaggggaggggctgggtctgcaaattaataaatagaagagggggtaagaccttcctgggacgcagccgatcagtcctcgtt

SEQ ID NO: 375143 - DNA, 1382 bp, Homo sapiens
ggccagggcgcggtctggaggctcacgggagagaggctgtagccctgggcaatcccgggggtcgttacaggaaggtaggaaaatgccaccctcagggcactggttgggctaaaggtgacactggcgtctcacgggctatgaagacggaatgcctcttaatgccggaattccaagacggaatgcctcttaatgccgggcaagtctcacatgaagctactcatcatttgcttcgtgtcctccgagctccgagagttggcaaagctgatgaaggagcagtagacagcgacccaagcacaccacttcagctagggaaagaccgatttaaggctgcaaggaaggagtcctgggagcatggctttccctgagccaaagccgcggcctccagagctgccgcagaaacggttgaagacgctggactgcgggcagggggcagtgcgagccgtacgatttaatggtgagcgccttcgtcttcattccgggtcctcctcccgcctcctgagatcgacggcccagtaacccccgcctggtgttccccagtggatggcaattactgcctgacgtgcggcagtgacaagacgctgaagctgtggaacccgcttcgggggacgctgctgcggacgtacagcggccacggctacgaggtgctggatgcggccggctcctttgacaacagtagtctctgctccggcggcggggacaaggcggtggttctgtgggatgtggcatcagggcaggtcgtgcgcaaattccggggccacgcagggctccgtggatggccgcgtgagacgctatgacctaaggatggggcagctcttctcagactacgtgggcagccccatcacctgcacctgcttcagccgggatgggcagtgcaccctggtgtccagcctggactccacattgcggctcctggacaaagacacaggggagctgctgggcgagtacaagggccataagaaccaggaatacaagctggactgctgcctgagcgagcgtgacacacatgtggtcagctgttctgaggacgggaaggtgttcttctgggacctggtggagggtgcgctggctctggccctgcctgtgggttccggtgtggtgcagtcgctggcctaccacccaacagagccctgcctgctgaccgccatgggaggcagcgtccagtgctggcgagaggaggcctatgaggcagaggatggagcaggctgaagccaggggacccaccaacaggaccaaggaccgagacacagacatggaaggacttcagataccatcttattctagagacgtagctgaccaaaaagtaggggaggggctgggtctgcaaattaataaatagaagagggggtaagaccttcctgggacgcagccgatcagtcctcgtt

SEQ ID NO: 375144 - DNA, 1908 bp, Homo sapiens
ggccagggcgcggtctggaggctcacgggagagaggctgtagccctgggcaatcccgggggtcgttacaggaaggtaggaaaatgccaccctcagggcactggttgggctaaaggtgacactggcgtctcacgggctatgaagacggaatgcctcttaatgccggaattccaagacggaatgcctcttaatgccgggcaagtctcacatgaagctactcatcatttgcttcgtgtcctccgagctccgagagttggcaaagctgatgaaggagcagtagacagcgacccaagcacaccacttcagctagggaaagaccgatttaaggctgcaaggaaggagtcctgggagcatggctttccctgagccaaagccgcggcctccagagctgccgcagaaacggttgaagacgctggactgcgggcagggggcagtgcgagccgtacgatttaatgtggatggcaattactgcctgacgtgcggcagtgacaagacgctgaagctgtggaacccgcttcgggggacgctgctgcggacgtacagcggccacggctacgaggtgctggatgcggccggctcctttgacaacagtagtctctgctccggcggcggggacaaggcggtggttctgtgggatgtggcatcagggcaggtcgtgcgcaaattccggggccacgcagggaaggtgaacacggtgcagtttaatgaagaggccacagttatcctgtccggctctattgattccagtatccgctgttgggattgccgctcacggaggcctgagccagtgcagacgctggatgaggccagagatggcgtgtccagtgtgaaggtgtcagaccacgagatcctggcaggctccgtggatggccgcgtgagacgctatgacctaaggatggggcagctcttctcagactacgtgggcagccccatcacctgcacctgcttcagccgggatgggcagtgcaccctggtgtccagcctggactccacattgcggctcctggacaaagacacaggggagctgctgggcgagtacaagggccataagaaccaggaatacaagacagaagtacgggaaggcgaagaaaagaatagagaagatagggaaattagaagataaaaacatacttttagaagaaaaaagataaatttaaacctgaaaagtaggaagcagaagaaaaaagacaagctaggaaacaaaaagctaagggcaaaatgtacaaacttagaagaaaattggaagatagaaacaagataaaaaaaaaaaaaaaaaaaaaaaaaaaatttggggccggcctcgggccatcataagaaaaggcgttctaagaaacacacattggcttgaggacgccgcggagcccagtcaggtggaaagtaacacattggcgtaaatagagggtaaccaagagagatcccggggcatgcactctagcgcttgagatctgctacccaaattataaaaccgcccggggggaaacgagagcgtttggcaacaaaagcacagagaggaggaggcagacagaagcatacgaggggtcatttacaacacaagggagcagaacgagagcaccaggtattaaaatacgccaccacacgggtgaaaagcacagggagaaagaacaaagacagcgagaaaaaagacacaaaacacacacaaacaaccacagagagacaggcaagcctcagcgaacgaccaccgacgcaagcgcagcaccaccaccagaacaaccagggaacgagacaaagaaaagaagagaacaaaaaaaaacaaataaaaaaaagcagaaagcgagcaaaaagagagagaaaaaagcgaggaaacacacctacccccatgagcaagaacccggaagcaagaagagacagagaaacgagaaaagagcaggaagccgccgacagacaaccg

SEQ ID NO: 375145 - DNA, 1558 bp, Homo sapiens
ggccagggcgcggtctggaggctcacgggagagaggctgtagccctgggcaatcccgggggtcgttacaggaaggtaggaaaatgccaccctcagggcactggttgggctaaaggtgacactggcgtctcacgggctatgaagacggaatgcctcttaatgccggaattccaagacggaatgcctcttaatgccgggcaagtctcacatgaagctactcatcatttgcttcgtgtcctccgagctccgagagttggcaaagctgatgaaggagcagtagacagcgacccaagcacaccacttcagctagggaaagaccgatttaaggctgcaaggaaggagtcctgggagcatggctttccctgagccaaagccgcggcctccagagctgccgcagaaacggttgaagacgctggactgcgggcagggggcagtgcgagccgtacgatttaatggtgagcgccttcgtcttcattccgggtcctcctcccgcctcctgagatcgacggcccagtaacccccgcctggtgttccccagtggatggcaattactgcctgacgtgcggcagtgacaagacgctgaagctgtggaacccgcttcgggggacgctgctgcggacgtacagcggccacggctacgaggtgctggatgcggccggctcctttgacaacagtagtctctgctccggcggcggggacaaggcggtggttctgtgggatgtggcatcagggcaggtcgtgcgcaaattccggggccacgcagggaaggtgaacacggtgcagtttaatgaagaggccacagttatcctgtccggctctattgattccagtatccgctgttgggattgccgctcacggaggcctgagccagtgcagacgctggatgaggccagagatggcgtgtccagtgtgaaggtgtcagaccacgagatcctggcaggctccgtggatggccgcgtgagacgctatgacctaaggatggggcagctcttctcagactacgtgggcagccccatcacctgcacctgcttcagccgggatgggcagtgcaccctggtgtccagcctggactccacattgcggctcctggacaaagacacaggggagctgctgggcgagtacaagggccataagaaccaggaatacaagctggactgctgcctgagcgagcgtgacacacatgtggtcagctgttctgaggacgggaaggtgttcttctgggacctggtggagggtgcgctggctctggccctgcctgtgggttccggtgtggtgcagtcgctggcctaccacccaacagagccctgcctgctgaccgccatgggaggcagcgtccagtgctggcgagaggaggcctatgaggcagaggatggagcaggctgaagccaggggacccaccaacaggaccaaggaccgagacacagacatggaaggacttcagataccatcttattctagagacgtagctgaccaaaaagtaggggaggggctgggtctgcaaattaataaatagaagagggggtaagaccttcctgggacgcagccgatcagtcctcgtt

SEQ ID NO: 375146 - DNA, 2969 bp, Homo sapiens
ggccagggcgcggtctggaggctcacgggagagaggctgtagccctgggcaatcccgggggtcgttacaggaaggtaggaaaatgccaccctcagggcactggttgggctaaaggtgacactggcgtctcacgggctatgaagacggaatgcctcttaatgccggaattccaagacggaatgcctcttaatgccgggcaagtctcacatgaagctactcatcatttgcttcgtgtcctccgagctccgagagttggcaaagctgatgaaggagcagtagacagcgacccaagcacaccacttcagctagggaaagaccgatttaaggctgcaaggaaggagtcctgggagcatggctttccctgagccaaagccgcggcctccagagctgccgcagaaacggttgaagacgctggactgcgggcagggggcagtgcgagccgtacgatttaatgtggatggcaattactgcctgacgtgcggcagtgacaagacgctgaagctgtggaacccgcttcgggggacgctgctgcggacgtacagcggccacggctacgaggtgctggatgcggccggctcctttgacaacagtagtctctgctccggcggcggggacaaggcggtggttctgtgggatgtggcatcagggcaggtcgtgcgcaaattccggggccacgcagggaaggtgaacacggtgcagtttaatgaagaggccacagttatcctgtccggctctattgattccagtatccgctgttgggattgccgctcacggaggcctgagccagtgcagacgctggatgaggccagagatggcgtgtccagtgtgaaggtgtcagaccacgagatcctggcagggtgagtggagccaggacctggtctcaccccaggtgctacggggaatcatagctgcccccatgctcagattaaaacctactctcagctgggcacagtggcacacagctgtaatcccagctacttgggaggctgaagtggaaggatcacttgagtccaagagttcgaggcaccattgcactccatgctgggtgaaagacagactgtctacaaaataataataatctggcgtgagccaccgcgcctggtggaaaaaatatattttctattcattaagtggaagtgaagagatcgtcataaagatcttcgtgttgagaaagcagaggaggaggaagaggagggattgatcttggtgtctcacagctgatagaggcagaagaaaatccacatataagtggacgcgttcagttcaaaccgtgttgttcatgggtcaactgtactttgaaaagtgctccctctggtggctgtggggggtgcagggagaccagaacagtctagatgctggtgctgggtagtggggaaagtggtgggactgagtactgaggaggaggagctggagaatgcaggaaaagggggaattgggccaggtggggtggctcacacctgtaatcccagcaccttgggaggctgaggtgggcggatcacctgaggttgggagttcgagaccagcctgaccaacatggagaaaccccgtctctactaaaaatacaaaattagcagggcgtggtggtgcatgcctgtattcccatctactcgggaggctgaggaaggagaatctcttgaacccgggaggcagaggttccggtgagccaagatcatgccattgcactccagcctgagcaacaagagcaaaactctgtctcaaacaaaaggaagaaaagggggaatcagaaggactccaagggcttggaaagggggtgtgggtcttggaaatgatggagtaggacgtaattggccctgggcctgagtctcaaggccagagcttcagaattccactcctgtgcactggaagagcaggcccactgggctgggaaggcacagggctgcctggagccatgtgagtgtagtcaaggttcccgctggatctaccctctcctgcagctccgtggatggccgcgtgagacgctatgacgccccatcacctgcacctgcttcagccgggatgggcagtgcaccctggtgtccagcctggactccacattgcggctcctggacaaagacacaggggagctgctgggcgagtacaagggccataagaaccaggaatacaagacagaagtacgggaaggcgaagaaaagaatagagaagatagggaaattagaagataaaaacatacttttagaagaaaaaagataaatttaaacctgaaaagtaggaagcagaagaaaaaagacaagctaggaaacaaaaagctaagggcaaaatgtacaaacttagaagaaaattggaagatagaaacaagataaaaaaaaaaaaaaaaaaaaaaaaaaaatttggggccggcctcgggccatcataagaaaaggcgttctaagaaacacacattggcttgaggacgccgcggagcccagtcaggtggaaagtaacacattggcgtaaatagagggtaaccaagagagatcccggggcatgcactctagcgcttgagatctgctacccaaattataaaaccgcccggggggaaacgagagcgtttggcaacaaaagcacagagaggaggaggcagacagaagcatacgaggggtcatttacaacacaagggagcagaacgagagcaccaggtattaaaatacgccaccacacgggtgaaaagcacagggagaaagaacaaagacagcgagaaaaaagacacaaaacacacacaaacaaccacagagagacaggcaagcctcagcgaacgaccaccgacgcaagcgcagcaccaccaccagaacaaccagggaacgagacaaagaaaagaagagaacaaaaaaaaacaaataaaaaaaagcagaaagcgagcaaaaagagagagaaaaaagcgaggaaacacacctacccccatgagcaagaacccggaagcaagaagagacagagaaacgagaaaagagcaggaagccgccgacagacaaccg

SEQ ID NO: 375147 - DNA, 338 bp, Homo sapiens
agggccacagggtattttccacgaggaatttagaaatagctgtcggcagagccttggtaggcaggctccctgtacccaggaccctcacacccacgtcccaattgccccaccaagggggcctgtgacttcccaagggactttccccccagggggactccacgccccccttctctctctgcatgcccagggtagagttgtggcccccaaaattcacatgttgaagtccaggacctcagaatgggaccttattgggaaataggatcactgctgactatacttagttacgatgaggccgtgttgtgtggtgggccctatcctcgacgacagttgccccacag

SEQ ID NO: 375148 - DNA, 351 bp, Homo sapiens
gcgccacaccgtaggagtccataacaagaagggctggcctctgttgcccgttgatgcatgagccatctcagcagagcaggccgtccccagttattccttgtcccagatgcctctgctggtttgtcctagtgcctgctaaccctcagctgttgccacttggatattatgtcaagcttttcttcccagaatttctgatttacgactgggtatgaagtcaaggcctacctgcatagacagacccctgtacttgggactcccacgaactgtggtcatggaaacaagcaccaaggactacctgacccttctaatgtcacttttctgcagagattaggaggagagactaagaaagcc

SEQ ID NO: 375149 - DNA, 213 bp, Homo sapiens
caagacccaatgaatgtagaactgggccacagtttgtcttggttcttaagcacgctggcccacacatgataggttatcattaaatgtctgatgagtaagtgaatgaatgtcaggaacctgagaggctttagaggtcatttacctcagctgaaattcaggcatccctttccctcagccctccttaaataccagcagtcctggggatcccaccac

SEQ ID NO: 375150 - DNA, 246 bp, Homo sapiens
aattacctggataattgcatttatgtaggccagactttaagtccctcttctctaacacaacacagcacaatacaacagacatttaaatttgtttctttgcttttaaaactttgttcttggcccggcatggtggcttatgcctgtaatcctagcacttttgggaggccaaggcaggtggattacttgagcccaggagtttaagaccaacctgagaaacatggcaaaaacctgtttctacaaaaagta

SEQ ID NO: 375151 - DNA, 348 bp, Homo sapiens
agacagtgaagtgtggagtggtttttgactttgatcctgagtgtctagccttccattgttgcttctggttttctgagccagtgtttgaaagcatcccacagttctatatgctaacacaattaactcttaaaaaattctgtttttctttaaatcccccagagttagcttctgttgccttcaactaaaaaccttgacaagtacagtagataaggcatggtttgggatcacaacttgattttttttattttgggaatacaaatttaacttgtggagagactgatgttctctatctcaccaaaaattgtttttgttataagctgtattcataagtgagctgtaatgttaaag

SEQ ID NO: 375152 - DNA, 423 bp, Homo sapiens
aagctctgctgactgtctttcagagtcacccttgagtggggttgtagggcagtagctacatattttcagctggtacacaaatactgagccgatctatcaatgagctaaatttgagatttttccttctatgccagctgatcataaggaatacttccccttccatgtgcccattggtgtcagttaaggaagaagcaccagtgcatcagttgtggatgacataggtgtctggaccacctgtttctgtagcttacttgggtcttttggcctgctagcacccaatcctgctggatgtaccactttatcttacaataaattgctgctggggcctgcccaaccttatgatggggtgggtctgacagacccaagctcatgataagcaatactgggaacacggttacttgatatccaaagggcaagtactca

SEQ ID NO: 375153 - DNA, 420 bp, Homo sapiens
tgaaactgaacattgttttttggggttctcgatgcctgggctcaagacaaaccaaaacctttgcaaaatgagggccctaatagaactctccgtaaagctggggccccaaagggtgacaccctctgtgaactaatagcaaatctgccctcctggcatcccatacaaaagttaaaccttgccacttactggactgaaaaaaaggtcttccttgagaactgagccaaccttcatgtgggtttttgtacatgagaatccaagaatttaagtggtcccactggtcccagaatgttggaagtctcaaacacttgatagaagaaaatgtagatcctacctggacaaagctttattcatatcagctctcaaagaattctccctgataaagtttcaagacatatgagaatcttagggcctactcagtga

SEQ ID NO: 375154 - DNA, 353 bp, Homo sapiens
attctaggaaaagaccttggtttcatattggctcctaaagtagacaagttcccatgccccaaggggcattggcatcctttatttgtcaaaggaaggaaataactacatatctactatacagtgatgttgggaaaaaggtctgtgaataatttatatagactgtaatgaaaagtaagtgacagttattattctcctagttatacaaattgtttgtcagttacttcatttaagtgaaattaaattatttgagttaatagggttgaatttgaaaattacattttgtttctgaagcttttatttttttaaatttattttattttttgagacggagtttcgctcttgttgcccaggct

SEQ ID NO: 375155 - DNA, 487 bp, Homo sapiens
ttcttttttttgagacagagtctcagtctgtagcacaggctggagtgcagtggtgcgatcttggctcgtcgcaagctccacctcctgggttcaagcaatactcctgcctcagcctcctgagtagctgggactacaagtgcctgctaccacacctggctaatttttgtctttttagtagagacaggttttctccatgttggccaggctggtctcaaactcctggactcaggtgatctgcccaccttggcctcccaaagtgctgggattacaggccctcaagtgacattttcaactgcagaatcccttggctctcttccttaagtcacgaaatccatgctgtgattgacattctctcagttttcagcttcacactgagaaagtacccagaccggtcaactacattaaaatctcaggcattgtgtttgctcatttcagcattaatattttcacatcattattctactgaatgtattacttactataagtc

SEQ ID NO: 375156 - DNA, 1693 bp, Homo sapiens
tatccccatccttagcagggaggtgctggtcatgtgacccgatgttgaaattgacaagctgctagctagtccgggccttttccccccccctttccttttttttttttcctcctctcccctccctcccggcttcctttctttgtagccacctcaggggaagcaacagatcgtcactcggtgttctcaccgaaagcacgtaatcgccggtgtaactcatgttggctggggggcctcccggcgcgcgcggagaggctggggtgcgcccccatgcagcatgcttgtgctcaattgcagggtcctcgttctcgagtgtgcagagggcggtgagagctcaactctcgtccccacctcccacccgcagctccccgggtgggtgagggatgccctggactggggatagccaggtgggagtccgtcgctgtgtggcctgtggtctcggagtctgttctcctggagtctcgcatttgcacccccttcttcgcagtccccctcccatagacttgctctgggaagcgcctctgcctccgaccctagccggaaccccttcggggccagagtttgaagccgtggatgtgcctgcctggtggcttgtccgatttgcacggtgacttgattacactctctcattcatggtcacttccgaagcgctttagtgccttccgtccctaaaccgcctacagccagaacggcttctccccgcggtttgtcactgatccgcagggcccggaagggccttcgtcttacccgggatccacctctcccctcatcttccctgcctacctcttcatcccaccttctgtccttggagaaactccctcctcctcgctgcctgccgggcttcggagtgactcggcagagacagaggcacaggggctgccctgctgctcaccggtccacccatctgcctggtcttctggagctgaggactcgggaaaccatgcaattgaggcaagccttgggctgctttagaggcgctgacatccgaggagacttctcctgggaggtccaacagccgagcttagcccaccgggctctgggaaagacccgactgaggctaaagccgccccggaaggccaagtccgagttccatttcttgaagaggccggcgcgcgtaaggctgtgacattggccctggcgactggcttcccaggagctgttctttctcaggagctccacagcgcgggccatctccagaaaactgtcttcagagtgtatttccttttatcgtcaacccagagccccaccgcggctaatgcaagaggccaaaaaatgtttggaggaagaaaaacaaaggcaggaagtggcggcggcctgacggtgcgtgtgtgtctgcagagaagggagggagccggctcagtctcttcttgtttttccaaacttcaaggtccaggcagccctctgcagggccgggccccattgctccccgcgcggcattggaggtggccgccggagaggagaaggccaacgcctgcgccaggcttgtcaggcggaaacggctaacaaggagatttggtcagcaaaacagacccagcctttccgaggcttcgtctgacttggcccgaaaggttggggagggggggcttgcgcagagcctcagggaccctcctctctggggactaccatccctgagccttacgcttctttccacagcctttgcaggcggaatatcggaataaagtgggtccaggcgcca

SEQ ID NO: 375157 - DNA, 1265 bp, Homo sapiens
gggggtgtgcgctgttccgcataaccactgcctcccatgtcctcctcgagggccgaaccgagagggtgctggcagggctggatcccacgggtgtccgcaggagacaaaggcgaattccggagaaaaggctggggctgagaaaggcgctccgggagcggctggcagggcaattcggcaggctgcaccgaagccgagtgcccggagggacttgccgcccggaagggggtgtgtgggggcgctgccgtgaagatggatgagggaaaaggtttttgatatcagcagaagggaaaacgcctggagtggccgaacacttttagttgcccagcaggaataggagacgggtactcagctccccaaggctgcgcaatatcccagctttgcccgctcctgccctcgtgttcggaatatgctggcggtgtgaatgtgaaggtttctccaggcaggcggctggggcgaggggtgggcgcagctctgaggatcagaccaaatctaggggaaaaaggggaggcagaccttcgggtccttggttttgactttgctctgagcctatgattgactcttccgctttgcaggaggtccaacagccgagcttagcccaccgggctctgggaaagacccgactgaggctaaagccgccccggaaggccaagtccgagttccatttcttgaagaggccggcgcgcgtaaggctgtgacattggccctggcgactggcttcccaggagctgttctttctcaggagctccacagcgcgggccatctccagaaaactgtcttcagagtgtatttccttttatcgtcaacccagagccccaccgcggctaatgcaagaggccaaaaaatgtttggaggaagaaaaacaaaggcaggaagtggcggcggcctgacggtgcgtgtgtgtctgcagagaagggagggagccggctcagtctcttcttgtttttccaaacttcaaggtccaggcagccctctgcagggccgggccccattgctccccgcgcggcattggaggtggccgccggagaggagaaggccaacgcctgcgccaggcttgtcaggcggaaacggctaacaaggagatttggtcagcaaaacagacccagcctttccgaggcttcgtctgacttggcccgaaaggttggggagggggggcttgcgcagagcctcagggaccctcctctctggggactaccatccctgagccttacgcttctttccacagcctttgcaggcggaatatcggaataaagtgggtccaggcgcca

SEQ ID NO: 375158 - DNA, 1174 bp, Homo sapiens
tatccccatccttagcagggaggtgctggtcatgtgacccgatgttgaaattgacaagctgctagctagtccgggccttttccccccccctttccttttttttttttcctcctctcccctccctcccggcttcctttctttgtagccacctcaggggaagcaacagatcgtcactcggtgttctcaccgaaagcacgtaatcgccggtgtaactcatgttggctggggggcctcccggcgcgcgcggagaggctggggtgcgcccccatgcagcatgcttgtgctcaattgcagggtcctcgttctcgagtgtgcagagggcggtgagagctcaactctcgtccccacctcccacccgcagctccccgggtgggtgagggatgccctggactggggatagccaggtgggagtccgtcgctgtgtggcctgtggtctcggagtctgttctcctggagtctcgcatttgcacccccttcttcgcagtccccctcccatagacttgctctgggaagcgcctctgcctccgaccctagccggaaccccttcggggccagagtttgaagccgtggatgtgcctgcctggtggcttgtccgatttgcacggtgacttgattacactctctcattcatggtcacttccgaagcgctttagtgccttccgtccctaaaccgcctacagccagaacggcttctccccgcggtttgtcactgatccgcagggcccggaagggccttcgtcttacccgggatccacctctcccctcatcttccctgcctacctcttcatcccaccttctgtccttggagaaactccctcctcctcgctgcctgccgggcttcggagtgactcggcagagacagaggcacaggggctgccctgctgctcaccggtccacccatctgcctggtcttctggagctgaggactcgggaaaccatgcaattgaggcaagccttgggctgctttagaggcgctgacatccgaggagacttctcctgggattgaaggagcaatgtttggaggaagcgaaagaaaggagaggacacagagcacagagcagccaggcagagccaggagctgagaagggcccagacctgaggcctcccaacaactctcttcttggaaggatctgggatgttgctgaaggaaaataaaaaaatatgtaaaaagata

SEQ ID NO: 375159 - DNA, 897 bp, Homo sapiens
gtctaggaaaaccgaaaacagttctagacagacctgcggttttatagcagttttggcagtcaacttcagcttgtgcctgagcagacggggttgtggtggcccgccagcgggggatgccaggccacctcccccagcggcacgcagcccctctcttaattagatcggttttcccctggtgtccgggagagcggtcccggcagaaaggaggtccaacagccgagcttagcccaccgggctctgggaaagacccgactgaggctaaagccgccccggaaggccaagtccgagttccatttcttgaagaggccggcgcgcgtaaggctgtgacattggccctggcgactggcttcccaggagctgttctttctcaggagctccacagcgcgggccatctccagaaaactgtcttcagagtgtatttccttttatcgtcaacccagagccccaccgcggctaatgcaagaggccaaaaaatgtttggaggaagaaaaacaaaggcaggaagtggcggcggcctgacggtgcgtgtgtgtctgcagagaagggagggagccggctcagtctcttcttgtttttccaaacttcaaggtccaggcagccctctgcagggccgggccccattgctccccgcgcggcattggaggtggccgccggagaggagaaggccaacgcctgcgccaggcttgtcaggcggaaacggctaacaaggagatttggtcagcaaaacagacccagcctttccgaggcttcgtctgacttggcccgaaaggttggggagggggggcttgcgcagagcctcagggaccctcctctctggggactaccatccctgagccttacgcttctttccacagcctttgcaggcggaatatcggaataaagtgggtccaggcgcca

SEQ ID NO: 375160 - DNA, 918 bp, Homo sapiens
gggggtgtgcgctgttccgcataaccactgcctcccatgtcctcctcgagggccgaaccgagagggtgctggcagggctggatcccacgggtgtccgcaggagacaaaggcgaattccggagaaaaggctggggctgagaaaggcgctccgggagcggctggcagggcaattcggcaggctgcaccgaagccgagtgcccggagggacttgccgcccggaagggggaggtccaacagccgagcttagcccaccgggctctgggaaagacccgactgaggctaaagccgccccggaaggccaagtccgagttccatttcttgaagaggccggcgcgcgtaaggctgtgacattggccctggcgactggcttcccaggagctgttctttctcaggagctccacagcgcgggccatctccagaaaactgtcttcagagtgtatttccttttatcgtcaacccagagccccaccgcggctaatgcaagaggccaaaaaatgtttggaggaagaaaaacaaaggcaggaagtggcggcggcctgacggtgcgtgtgtgtctgcagagaagggagggagccggctcagtctcttcttgtttttccaaacttcaaggtccaggcagccctctgcagggccgggccccattgctccccgcgcggcattggaggtggccgccggagaggagaaggccaacgcctgcgccaggcttgtcaggcggaaacggctaacaaggagatttggtcagcaaaacagacccagcctttccgaggcttcgtctgacttggcccgaaaggttggggagggggggcttgcgcagagcctcagggaccctcctctctggggactaccatccctgagccttacgcttctttccacagcctttgcaggcggaatatcggaataaagtgggtccaggcgcca

SEQ ID NO: 375161 - DNA, 1127 bp, Homo sapiens
ccagagcagagaaactggtagagactcctataagactgaaatcaaggtgtcagccggccttgatttcagtcttatgggacccagagcagagaaactggtagagactcctatacttctgatgtacagaactgtggggtcataactgtgtgtggttctaagctgctaagtttatggtagtttgttacagcagcaatgtggggtagggaacattacactgttctttgagtgtggaaagctcttccttacagctgctgcttcaagttagtaaaatataatttctccagcaagacctcctttgaccactggggagatagcctccactaacttccaacacgtgcatgccatcactatcatattatcctacattttttattggtaactgttactaactgaaaatacttatgcttactgtctttgtctctaatcctatttcacacccattagaaagttctttacagctagggactttatgtgcacttcacaaccatgcaagattcatgagacttctgaaaaacccaacatcatgagaggcacccagagaagaagcagagtgattcccatcaaagaaaaccattgattcaggagactgagtagagctttagaaagtctcgatcccagaagacatggtagccaccaaattttagtgactttaaacaacacacattaatgaccttgtagtttctttcaggcttagctgggtcctctgcttcagggacccacagggctgcaatgaaggtgttggtcaggactgtggtctcatctgaggcttgttggggaaggatccacttctcagctcacatggtggttgggcaacattcagtttcttacagatggctggacagagggcctcagttcttgccatctgttggctggaggttgccctcagttccttgccatgtaggcattccagtgtggctgcttgcttcctcaaagccggcaggggagagacgcctttccaagtagcacagatgttactatcttctgtaatgtaatcacacaggcaacactttgtcatctttgctgtattctgtagggtgagagcaagacacaggtccttcccactcttagggaagggtattaaaaatgacaactaccaggaggtagggatcatggagcctgcttcagaa

SEQ ID NO: 375162 - DNA, 1302 bp, Homo sapiens
tgagacgttgatgatgctcctatcaccatggttatgtgattgggtatatcttgccctcggtcctaactgccactgtctgtgctgagtttttcaaagttcatagcaggttgaacatgcttgctgtcattttcacagattctggtctttcttatggggaacctgagttcctgcattaaagttcccccagaagatcaatggaaggtggattccaaagagtgggcaagtgaggaccccttctctgttaccaaggtgaccccaaggaacacagtaaatgaaattttaagaagatatagcctctacaccaagaggcacatgacacaacctggactctgggcaaaccaccgggtgcactcacatgaagtggcggcttatttggcctccccaggacggactggagcatcagtagtgcctgagttcatcaaaggacagatgctcaagacaccttgatcaccattaggtggaattgaaggagccaaaaatgggcgcagtggctcctcagcagagacgctcctgaatgtatagacatgggaaccactttcagcatcaaaaaaggaaacgttctgcatgcccatatccagaaaaatccccactcgctgtaacttgcggtctactaagaggaaagtcagcggcaccgtgctggcagagaggcggcttccatccctcaaactcacagtccagaatccaagctctgtggtcagctggatcttccctttgcagtgaacagattctctgcagactcccaggtcccattctgtgcttgttcccacgtccacctcccagtagtggcggccacaggtaaagcgaggggagcccaggatgcaaacggacacgtcaaatctctcggcaaggtcttgccgattctgtgtgatgagcccacttcggacgctcctgaggtcgtcagaaatgaggaggaagttgttggctgtgtcggcatccaaggtcatatccactgtgaaaaggaaaacaagttgctcagcaagtggacagaagccaaccccatgcctctcttctacttcaaaggcccaaatatctcctgactttagtttctttaattctgtttcttcctccaaaatcaaaacttttcatgaggaaacttccctatttcaaattttcataggtatgctttgtggcaatacgtgactcttattcacagtagcaattcttattttactttacgtcacgtgtttgcttcactgaacttttcttcatttagagtggagggtctctgaaggcagacaccatgcccccctttctaccaccttgatgtgtgaacaaataaatgataattaagacaaaaaaagt

SEQ ID NO: 375163 - DNA, 1215 bp, Homo sapiens
tgagacgttgatgatgctcctatcaccatggttatgtgattgggtatatcttgccctcggtcctaactgccactgtctgtgctgagtttttcaaagttcatagcaggttgaacatgcttgctgtcattttcacagattctggtctttcttatggggaacctgagttcctgcattaaagttcccccagaagatcaatggaaggtggattccaaagagtgggcaagtgaggaccccttctctgttaccaaggtgaccccaaggaacacagtaaatgtggcggcttatttggcctccccaggacggactggagcatcagtagtgcctgagttcatcaaaggacagatgctcaagacaccttgatcaccattaggtggaattgaaggagccaaaaatgggcgcagtggctcctcagcagagacgctcctgaatgtatagacatgggaaccactttcagcatcaaaaaaggaaacgttctgcatgcccatatccagaaaaatccccactcgctgtaacttgcggtctactaagaggaaagtcagcggcaccgtgctggcagagaggcggcttccatccctcaaactcacagtccagaatccaagctctgtggtcagctggatcttccctttgcagtgaacagattctctgcagactcccaggtcccattctgtgcttgttcccacgtccacctcccagtagtggcggccacaggtaaagcgaggggagcccaggatgcaaacggacacgtcaaatctctcggcaaggtcttgccgattctgtgtgatgagcccacttcggacgctcctgaggtcgtcagaaatgaggaggaagttgttggctgtgtcggcatccaaggtcatatccactgtgaaaaggaaaacaagttgctcagcaagtggacagaagccaaccccatgcctctcttctacttcaaaggcccaaatatctcctgactttagtttctttaattctgtttcttcctccaaaatcaaaacttttcatgaggaaacttccctatttcaaattttcataggtatgctttgtggcaatacgtgactcttattcacagtagcaattcttattttactttacgtcacgtgtttgcttcactgaacttttcttcatttagagtggagggtctctgaaggcagacaccatgcccccctttctaccaccttgatgtgtgaacaaataaatgataattaagacaaaaaaagt

SEQ ID NO: 375164 - DNA, 1188 bp, Homo sapiens
gtacaaccacagggctccccatgaggtgatgtcatcgaattttcctggctgaagagtcgtcctttgtgtacacacatgggagtttattttttcatctgcatatggacgattctggtctttcttatggggaacctgagttcctgcattaaagttcccccagaagatcaatggaaggtggattccaaagagtgggcaagtgaggaccccttctctgttaccaaggtgaccccaaggaacacagtaaatgtggcggcttatttggcctccccaggacggactggagcatcagtagtgcctgagttcatcaaaggacagatgctcaagacaccttgatcaccattaggtggaattgaaggagccaaaaatgggcgcagtggctcctcagcagagacgctcctgaatgtatagacatgggaaccactttcagcatcaaaaaaggaaacgttctgcatgcccatatccagaaaaatccccactcgctgtaacttgcggtctactaagaggaaagtcagcggcaccgtgctggcagagaggcggcttccatccctcaaactcacagtccagaatccaagctctgtggtcagctggatcttccctttgcagtgaacagattctctgcagactcccaggtcccattctgtgcttgttcccacgtccacctcccagtagtggcggccacaggtaaagcgaggggagcccaggatgcaaacggacacgtcaaatctctcggcaaggtcttgccgattctgtgtgatgagcccacttcggacgctcctgaggtcgtcagaaatgaggaggaagttgttggctgtgtcggcatccaaggtcatatccactgtgaaaaggaaaacaagttgctcagcaagtggacagaagccaaccccatgcctctcttctacttcaaaggcccaaatatctcctgactttagtttctttaattctgtttcttcctccaaaatcaaaacttttcatgaggaaacttccctatttcaaattttcataggtatgctttgtggcaatacgtgactcttattcacagtagcaattcttattttactttacgtcacgtgtttgcttcactgaacttttcttcatttagagtggagggtctctgaaggcagacaccatgcccccctttctaccaccttgatgtgtgaacaaataaatgataattaagacaaaaaaagt

SEQ ID NO: 375165 - DNA, 2780 bp, Homo sapiens
ctccctctgcggcgggggcggccccagcggatgaatgaagcggcgcgtggctgccggggaggccagagcgtggagcgctgcgcggcgcggcggccgggccctcgagacggggacggacacaccagcccctcggataccacttggccactcccgctgaggccactcccactgcgtggctgaagcctcgaggtcaccaggcggaggcgcggagatgcccctgcatcagctgggggacaagccgctcaccttccccagccccaactcagccatggaaaacgggcttgaccacaccccacccagcaggagggcatccccgggcacacccctgagccccggctccctccgctccgctgcccatagccccctggacaccagcaagcagcccctctgccagctctgggccgagaagcatggcgcccgggggacccatgaggtgcggtacgtctcggccgggcagagcgtggcgtgcggctggtgggccttcgcaccgccgtgcctgcaggtcctcaacacgcccaagggcatcctgttcttcctgtgtgcggccgcattcctgcaggggatgactgtgaatggcttcatcaacacagtcatcacctccctggagcgccgctatgacctgcacagctaccagagcgggctcatcgccagctcctacgacattgccgcctgcctctgcctcaccttcgtcagctacttcgggggctcagggcacaagccgcgctggctgggctggggcgtgctgcttatgggcacggggtcgctggtgttcgcgctgccccacttcacggctggccgctatgaggtggagttggacgcgggtgtcaggacgtgccctgccaaccccggcgcggtgtgtgcggacagcacctcgggcctgtcccgctaccagctggtcttcatgctgggccagttcctgcatggcgtgggtgccacacccctctacacgctgggcgtcacctacctggatgagaacgtcaagtccagctgctcgcccgtctacattgccatcttctacacagcggccatcctgggcccagctgccggctacctgattggaggtgccctgctgaatatctacacggaaatgggccgacggacggagctgaccaccgagagcccactgtgggtcggcgcctggtgggtcggcttcctgggctctggggccgctgctttcttcaccgccgttcccatccttggttaccctcggcagctgccaggctcccagcgctacgcggtcatgagagcggcggaaatgcaccagttgaaggacagcagccgtggggaggcgagcaacccggactttgggaaaaccatcagagacctgcctctctccatctggctcctgctgaagaaccccacgttcatcctgctctgcctggccggggccaccgaggccactctcatcaccggcatgtccacgttcagccccaagttcttggagtcccagttcagcctgagtgcctcagaagctgccaccttgtttgggtacctggtggtgccagcgggtggtggcggcaccttcctgggcggcttctttgtgaacaagctcaggctccggggctccgcggtcatcaagttctgcctgttctgcaccgttgtcagcctgctgggcatcctcgtcttctcactgcactgccccagtgtgcccatggcgggcgtcacagccagctacggcgggagcctcctgcccgaaggccacctgaacctaacggctccctgcaacgctgcctgcagctgccagccagaacactacagccctgtgtgcggctcggacggcctcatgtacttctcactgtgccacgcagggtgccctgcagccacggagacgaatgtggacggccagaaggtgtaccgagactgtagctgtatccctcagaatctttcctctggttttggccatgccactgcagggaaatgcacttcaacttgtcagagaaagcccctccttctggttttcatattcgttgtaattttctttacattcctcagcagcattcctgcactaacggcaactctacgatgtgtccgtgaccctcagagatcctttgccctgggaatccagtggattgtagttagaatactagggggcatcccggggcccatcgccttcggctgggtgatcgacaaggcctgtctgctgtggcaggaccagtgtggccagcagggctcctgcttggtgtaccagaattcggccatgagccgctacatactcatcatggggctcctgtacaaggtgctgggcgtcctcttctttgccatagcctgcttcttatacaagcccctgtcggagtcttcagatggcctggaaacttgtctgcccagccagtcctcagcccctgacagtgccacagatagccagctccagagcagcgtctgaccaccgcccgcgcccacccggccacggcgggcactcagcatttcctgatgacagaacagtgccgttgggtgatgcaatcacacgggaacttctatttgacctgcaaccttctacttaacctgtggtttaaagtcggctgtgacctcctgtccccagagctgtacggccctgcagtgggtgggaggaacttgcataaatatatatttatggacacacagtttgcatcagaacgtgtttatagaatgtgttttatacccgatcgtgtgtggtgtgcgtgaggacaaactccgcaggggctgtgaatcccactgggagggcggcgggcctgcagcccgaggaaggcttgtgtgtcctcagttaaaactgtgcatatcgaaatatattttgttatttaagcctg

SEQ ID NO: 375166 - DNA, 464 bp, Homo sapiens
ggctcctgtacaaggtgctgggcgtcctcttctttgccatagccagctccagagcagcgtctgaccaccgcccgcgcccacccggccacggcgggcactcagcatttcctgatgacagaacagtgccgttgggtgatgcaatcacacgggaacttctatttgacctgcaaccttctacttaacctgtggtttaaagtcggctgtgacctcctgtccccagagctgtacggccctgcagtgggtgggaggaacttgcataaatatatatttatggacacacagtttgcatcagaacgtgtttatagaatgtgttttatacccgatcgtgtgtggtgtgcgtgaggacaaactccgcaggggctgtgaatcccactgggagggcggcgggcctgcagcccgaggaaggcttgtgtgtcctcagttaaaactgtgcatatcgaaatatattttgttatttaagcctg

SEQ ID NO: 375167 - DNA, 547 bp, Homo sapiens
gaactagggaaaggggctgtgcatcaggcggacggtgctggggggcatgggtgtgccttccttgcgtgaggaggaaaaaccattctatcaccagaaggcagtgcccagtggtgccctgcagccacggagacgaatgtggacggccagaagcattcctgcactaacggcaactctacgatgtgtccgtgaccctcagagatcctttgccctgggaatccagtggattgtagttagaatactagggggcatcccggggcccatcgccttcggctgggtgatcgacaaggcctgtctgctgtggcaggaccagtgtggccagcagggctcctgcttggtgtaccagaattcggccatgagccgctacatactcatcatggggctcctgtacaaggctcccctgctgaggattcatcccaccttggatggaaaatgcagtttttgtgggagatggaactggagggtacggagggctgactgcacatacaaatatacatacatgagtgtacatatgttcttatataaacgtgtcacagtaaaattgttcctc

SEQ ID NO: 375168 - DNA, 3412 bp, Homo sapiens
ctccctctgcggcgggggcggccccagcggatgaatgaagcggcgcgtggctgccggggaggccagagcgtggagcgctgcgcggcgcggcggccgggccctcgagacggggacggacacaccagcccctcggataccacttggccactcccgctgaggccactcccactgcgtggctgaagcctcgaggtcaccaggcggaggcgcggagatgcccctgcatcagctgggggacaagccgctcaccttccccagccccaactcagccatggaaaacgggcttgaccacaccccacccagcaggagggcatccccgggcacacccctgagccccggctccctccgctccgctgcccatagccccctggacaccagcaagcagcccctctgccagctctgggccgagaagcatggcgcccgggggacccatgaggtgcggtacgtctcggccgggcagagcgtggcgtgcggctggtgggccttcgcaccgccgtgcctgcaggtcctcaacacgcccaagggcatcctgttcttcctgtgtgcggccgcattcctgcaggggatgactgtgaatggcttcatcaacacagtcatcacctccctggagcgccgctatgacctgcacagctaccagagcgggctcatcgccagctcctacgacattgccgcctgcctctgcctcaccttcgtcagctacttcgggggctcagggcacaagccgcgctggctgggctggggcgtgctgcttatgggcacggggtcgctggtgttcgcgctgccccacttcacggctggccgctatgaggtggagttggacgcgggtgtcaggacgtgccctgccaaccccggcgcggtgtgtgcggacagcacctcgggcctgtcccgctaccagctggtcttcatgctgggccagttcctgcatggcgtgggtgccacacccctctacacgctgggcgtcacctacctggatgagaacgtcaagtccagctgctcgcccgtctacattgccatcttctacacagcggccatcctgggcccagctgccggctacctgattggaggtgccctgctgaatatctacacggaaatgggccgacggacggagctgaccaccgagagcccactgtgggtcggcgcctggtgggtcggcttcctgggctctggggccgctgctttcttcaccgccgttcccatccttggttaccctcggcagctgccaggctcccagcgctacgcggtcatgagagcggcggaaatgcaccagttgaaggacagcagccgtggggaggcgagcaacccggactttgggaaaaccatcagagacctgcctctctccatctggctcctgctgaagaaccccacgttcatcctgctctgcctggccggggccaccgaggccactctcatcaccggcatgtccacgttcagccccaagttcttggagtcccagttcagcctgagtgcctcagaagctgccaccttgtttgggtacctggtggtgccagcgggtggtggcggcaccttcctgggcggcttctttgtgaacaagctcaggctccggggctccgcggtcatcaagttctgcctgttctgcaccgttgtcagcctgctgggcatcctcgtcttctcactgcactgccccagtgtgcccatggcgggcgtcacagccagctacggcgggagcctcctgcccgaaggccacctgaacctaacggctccctgcaacgctgcctgcagctgccagccagaacactacagccctgtgtgcggctcggacggcctcatgtacttctcactgtgccacgcagggtgccctgcagccacggagacgaatgtggacggccagaaggtgtaccgagactgtagctgtatccctcagaatctttcctctggttttggccatgccactgcagggaaatgcacttcaacttgtcagagaaagcccctccttctggttttcatattcgttgtaattttctttacattcctcagcagcattcctgcactaacggcaactctacgatgtgtccgtgaccctcagagatcctttgccctgggaatccagtggattgtagttagaatactagggggcatcccggggcccatcgccttcggctgggtgatcgacaaggcctgtctgctgtggcaggaccagtgtggccagcagggctcctgcttggtgtaccagaattcggccatgagccgctacatactcatcatggggctcctgtacaagtttcagttaccagaggtccaccacagtctgaatgtattaaataggaaattccagaagcaaacagttcataacctttaaagcacgcgccgttctgcacagtctggtgagatcttgatctgtcctgcccaggactcggattctccctttgtccaactttggaagaaggcaaggtcagaacttattctgcagggagctttggggatattggatactaaggcccaagccctctgtgatacgcctttcgctttggcataaaataacggttgactctctgttaggcgcgtctctgctcagggagtggtggtgtttggggaagcccaaaggcacatgagcatcaggaaattgaccatttgacttcataagacataacctttgtccagcgtgtccaggctattcatgccaccacctgttgatcacttagcagccggtgtggttcccacatcccccatcaccatatcacagtgccatgttcaagccactcttatttacctaatcatggccccaaagcaccggagcactcacgccgccgttcagctctgccaatgggaagccggaggcgcctccttcagcgagaaggtgtagttccttggctgggcttagtactacccttagactcacgcgtccacaggggtctcagtgtctgcggatgagggggctgctgtactttcccagggagccgtccccagactctctctttgctgtgttggatgcatcccttagctgggagcagcaggctgagagccctccacacgcagccatcccctgggctcagcacagccagcgggagccgtatccagagggtcagagttggcctcagcagcgcatgcgtccatgttaattgtagcgggggagcacacggtgtctccttataaacaccctcgcattccactttgtcctgcaccgagtcaaaacagcctcactccctgaatgcaggctcagggccatcagccaggctgacactccaggaggcacagtgggtgtttctggtccacacccagcgtggaaatcatagtggtgcacatgtactctgcgtgggcattgcggcagcatccgtgcttggacctcaccgcctttggggcccacgtgggattcctgccacatcgtcctcttgccctgcaaagtcggtgcagcccctcattgttgacaaagaaaccaagaccctgaaggttcagaact

SEQ ID NO: 375169 - DNA, 3805 bp, Homo sapiens
ctccctctgcggcgggggcggccccagcggatgaatgaagcggcgcgtggctgccggggaggccagagcgtggagcgctgcgcggcgcggcggccgggccctcgagacggggacggacacaccagcccctcggataccacttggccactcccgctgaggccactcccactgcgtggctgaagcctcgaggtcaccaggcggaggcgcggagatgcccctgcatcagctgggggacaagccgctcaccttccccagccccaactcagccatggaaaacgggcttgaccacaccccacccagcaggagggcatccccgggcacacccctgagccccggctccctccgctccgctgcccatagccccctggacaccagcaagcagcccctctgccagctctgggccgagaagcatggcgcccgggggacccatgaggtgcggtacgtctcggccgggcagagcgtggcgtgcggctggtgggccttcgcaccgccgtgcctgcaggtcctcaacacgcccaagggcatcctgttcttcctgtgtgcggccgcattcctgcaggggatgactgtgaatggcttcatcaacacagtcatcacctccctggagcgccgctatgacctgcacagctaccagagcgggctcatcgccagctcctacgacattgccgcctgcctctgcctcaccttcgtcagctacttcgggggctcagggcacaagccgcgctggctgggctggggcgtgctgcttatgggcacggggtcgctggtgttcgcgctgccccacttcacggctggccgctatgaggtggagttggacgcgggtgtcaggacgtgccctgccaaccccggcgcggtgtgtgcggacagcacctcgggcctgtcccgctaccagctggtcttcatgctgggccagttcctgcatggcgtgggtgccacacccctctacacgctgggcgtcacctacctggatgagaacgtcaagtccagctgctcgcccgtctacattgccatcttctacacagcggccatcctgggcccagctgccggctacctgattggaggtgccctgctgaatatctacacggaaatgggccgacggacggagctgaccaccgagagcccactgtgggtcggcgcctggtgggtcggcttcctgggctctggggccgctgctttcttcaccgccgttcccatccttggttaccctcggcagctgccaggctcccagcgctacgcggtcatgagagcggcggaaatgcaccagttgaaggacagcagccgtggggaggcgagcaacccggactttgggaaaaccatcagagacctgcctctctccatctggctcctgctgaagaaccccacgttcatcctgctctgcctggccggggccaccgaggccactctcatcaccggcatgtccacgttcagccccaagttcttggagtcccagttcagcctgagtgcctcagaagctgccaccttgtttgggtacctggtggtgccagcgggtggtggcggcaccttcctgggcggcttctttgtgaacaagctcaggctccggggctccgcggtcatcaagttctgcctgttctgcaccgttgtcagcctgctgggcatcctcgtcttctcactgcactgccccagtgtgcccatggcgggcgtcacagccagctacggcgggagcctcctgcccgaaggccacctgaacctaacggctccctgcaacgctgcctgcagctgccagccagaacactacagccctgtgtgcggctcggacggcctcatgtacttctcactgtgccacgcagggtgccctgcagccacggagacgaatgtggacggccagaaggtgagtggagccgctgcctaccgcccctgtcctcccctggaccctgggaaggggcccccgtgccttccccttgtaatcggagctattgttgggcttcccaggtgtaccgagactgtagctgtatccctcagaatctttcctctggttttggccatgccactgcagggaaatgcacttcaacttgtcagagaaagcccctccttctggttttcatattcgttgtaattttctttacattcctcagcagcattcctgcactaacggcaactctacggtaagctggggtcgggtgtgcgcttgtccagagctttccttgcagcaccctgaggcggagctctgcagatcctgagacaggagcactccaggaaacacccaggtctaagcgggcctgtctgtcactggtggcaggagagacctcactgtctctgatctctgacgaggggcttcccacttgggggggggtgatgatgtggctggggactggtccaggaggccactggcctagggggtgacttggcatgcaaccccacttctgtgggtgctgacgctgtggttttctattgcagatgtgtccgtgaccctcagagatcctttgccctgggaatccagtggattgtagttagaatactagggggcatcccggggcccatcgccttcggctgggtgatcgacaaggcctgtctgctgtggcaggaccagtgtggccagcagggctcctgcttggtgtaccagaattcggccatgagccgctacatactcatcatggggctcctgtacaagtttcagttaccagaggtccaccacagtctgaatgtattaaataggaaattccagaagcaaacagttcataacctttaaagcacgcgccgttctgcacagtctggtgagatcttgatctgtcctgcccaggactcggattctccctttgtccaactttggaagaaggcaaggtcagaacttattctgcagggagctttggggatattggatactaaggcccaagccctctgtgatacgcctttcgctttggcataaaataacggttgactctctgttaggcgcgtctctgctcagggagtggtggtgtttggggaagcccaaaggcacatgagcatcaggaaattgaccatttgacttcataagacataacctttgtccagcgtgtccaggctattcatgccaccacctgttgatcacttagcagccggtgtggttcccacatcccccatcaccatatcacagtgccatgttcaagccactcttatttacctaatcatggccccaaagcaccggagcactcacgccgccgttcagctctgccaatgggaagccggaggcgcctccttcagcgagaaggtgtagttccttggctgggcttagtactacccttagactcacgcgtccacaggggtctcagtgtctgcggatgagggggctgctgtactttcccagggagccgtccccagactctctctttgctgtgttggatgcatcccttagctgggagcagcaggctgagagccctccacacgcagccatcccctgggctcagcacagccagcgggagccgtatccagagggtcagagttggcctcagcagcgcatgcgtccatgttaattgtagcgggggagcacacggtgtctccttataaacaccctcgcattccactttgtcctgcaccgagtcaaaacagcctcactccctgaatgcaggctcagggccatcagccaggctgacactccaggaggcacagtgggtgtttctggtccacacccagcgtggaaatcatagtggtgcacatgtactctgcgtgggcattgcggcagcatccgtgcttggacctcaccgcctttggggcccacgtgggattcctgccacatcgtcctcttgccctgcaaagtcggtgcagcccctcattgttgacaaagaaaccaagaccctgaaggttcagaact

SEQ ID NO: 375170 - DNA, 2583 bp, Homo sapiens
ctccctctgcggcgggggcggccccagcggatgaatgaagcggcgcgtggctgccggggaggccagagcgtggagcgctgcgcggcgcggcggccgggccctcgagacggggacggacacaccagcccctcggataccacttggccactcccgctgaggccactcccactgcgtggctgaagcctcgaggtcaccaggcggaggcgcggagatgcccctgcatcagctgggggacaagccgctcaccttccccagccccaactcagccatggaaaacgggcttgaccacaccccacccagcaggagggcatccccgggcacacccctgagccccggctccctccgctccgctgcccatagccccctggacaccagcaagcagcccctctgccagctctgggccgagaagcatggcgcccgggggacccatgaggtgcggtacgtctcggccgggcagagcgtggcgtgcggctggtgggccttcgcaccgccgtgcctgcaggtcctcaacacgcccaagggcatcctgttcttcctgtgtgcggccgcattcctgcaggggatgactgtgaatggcttcatcaacacagtcatcacctccctggagcgccgctatgacctgcacagctaccagagcgggctcatcgccagctcctacgacattgccgcctgcctctgcctcaccttcgtcagctacttcgggggctcagggcacaagccgcgctggctgggctggggcgtgctgcttatgggcacggggtcgctggtgttcgcgctgccccacttcacggctggccgctatgaggtggagttggacgcgggtgtcaggacgtgccctgccaaccccggcgcggtgtgtgcggacagcacctcgggcctgtcccgctaccagctggtcttcatgctgggccagttcctgcatggcgtgggtgccacacccctctacacgctgggcgtcacctacctggatgagaacgtcaagtccagctgctcgcccgtctacattgccatcttctacacagcggccatcctgggcccagctgccggctacctgattggaggtgccctgctgaatatctacacggaaatgggccgacggacggagctgaccaccgagagcccactgtgggtcggcgcctggtgggtcggcttcctgggctctggggccgctgctttcttcaccgccgttcccatccttggttaccctcggcagctgccaggctcccagcgctacgcggtcatgagagcggcggaaatgcaccagttgaaggacagcagccgtggggaggcgagcaacccggactttgggaaaaccatcagagacctgcctctctccatctggctcctgctgaagaaccccacgttcatcctgctctgcctggccggggccaccgaggccactctcatcaccggcatgtccacgttcagccccaagttcttggagtcccagttcagcctgagtgcctcagaagctgccaccttgtttgggtacctggtggtgccagcgggtggtggcggcaccttcctgggcggcttctttgtgaacaagctcaggctccggggctccgcggtcatcaagttctgcctgttctgcaccgttgtcagcctgctgggcatcctcgtcttctcactgcactgccccagtgtgcccatggcgggcgtcacagccagctacggcgggagcctcctgcccgaaggccacctgaacctaacggctccctgcaacgctgcctgcagctgccagccagaacactacagccctgtgtgcggctcggacggcctcatgtacttctcactgtgccacgcagggtgccctgcagccacggagacgaatgtggacggccagaaggtgtaccgagactgtagctgtatccctcagaatctttcctctggttttggccatgccactgcagggaaatgcacttcaacttgtcagagaaagcccctccttctggttttcatattcgttgtaattttctttacattcctcagcagcattcctgcactaacggcaactctacgatgtgtccgtgaccctcagagatcctttgccctgggaatccagtggattgtagttagaatactagggggcatcccggggcccatcgccttcggctgggtgatcgacaaggcctgtctgctgtggcaggaccagtgtggccagcagggctcctgcttggtgtaccagaattcggccatgagccgctacatactcatcatggggctcctgtacaaggaagaagagaatgaatttagaaggctgtaaaccccatctgagccttacacatagatctccttgaattggattttcaccaaggccgtgatggatgtggagtctcggctttctgacaacgtcttccagagcaggctttctctagagggtggactgcctgtgttctcctgggagagaatgcatttgcttccgatgcccagggcacgaaagaggtggacgaaacaacggaagtggagggggtggattctctacctgggaaacccagcatggcacactcatatagaattaagatcttataataagtgtgcagatgcgcccgttctaaggaaataaagggttctgccctccta

SEQ ID NO: 375171 - DNA, 1694 bp, Homo sapiens
  misc_feature (1118)..(1118): n is a, c, g, or t
ctccctctgcggcgggggcggccccagcggatgaatgaagcggcgcgtggctgccggggaggccagagcgtggagcgctgcgcggcgcggcggccgggccctcgagacggggacggacacaccagcccctcggataccacttggccactcccgctgaggccactcccactgcgtggctgaagcctcgaggtcaccaggcggaggcgcggagatgcccctgcatcagctgggggacaagccgctcaccttccccagccccaactcagccatggaaaacgggcttgaccacaccccacccagcaggagggcatccccgggcacacccctgagccccggctccctccgctccgctgcccatagccccctggacaccagcaagcagcccctctgccagctctgggccgagaagcatggcgcccgggggacccatgaggtgcggtacgtctcggccgggcagagcgtggcgtgcggctggtgggccttcgcaccgccgtgcctgcaggtcctcaacacgcccaagggcatcctgttcttcctgtgtgcggccgcattcctgcaggggatgactgtgaatggcttcatcaacacagtcatcacctccctggagcgccgctatgacctgcacagctaccagagcgggctcatcgccagctcctacgacattgccgcctgcctctgcctcaccttcgtcagctacttcgggggctcagggcacaagccgcgctggctgggctggggcgtgctgcttatgggcacggggtcgctggtgttcgcgctgccccacttcacggctggccgctatgaggtggagttggacgcgggtgtcaggacgtgccctgccaaccccggcgcggtgtgtgcggacagcacctcgggcctgtcccgctaccagctggtcttcatgctgggccagttcctgcatggcgtgggtgccacaccccccacaaaaagaagacctacaaaacattcaaaaaaaaaaaaaaaaaacaaaaacaccaaaaaaaacaagaaaaagaaacccgagagcgagcactaaagcgcgcgggtcgcgggacaaaagcggcgtcataagacacggcgccaccgatggcgccaaaacgcgggtaccacgggacccncgggttttctgggagcacaggggggaaaatcccgcgcggggagcgactccccccaataaaggagagcggaggcgaccgaaataaactctcgcgcaaaaaggcgccgcgaggggtttaaaccggcgccacatataaagaaaccccggccgaacaagactggacgagcacacaaacacaccgcgacaccacacagagagacaccgacccaaaaccacacacagaacgcgaccgacgaacacagacacagataacaacaacacaacgcgcgggcgcacggcaaggcgaccagcaagagacaaaaacagagcaaggcaacgcgaccgagcccggcccaggaagcaaagccaacagagacaaacacaaagtcgatggaacaaggaaagacaaaacccgccgaaaaacaggacgaaaggagacgggagagaaagaggaggcagacagcacaggaagggaaagaggaacgggaaagaggatcgaagcgcggacacaggcggaagaggacgggagaggacacaagcggggtgggacggcagcaggcagggaacggagacacagacgaggcgaggcgaaagaagc

SEQ ID NO: 375172 - DNA, 831 bp, Homo sapiens
aaaggtcccattcactggtgtctggcactgttcaacccatgacaagcccctcagtcctgtgcctctgtttttagtcaaagggtgtgtttcattccctctaacaatattggcgtctgctctacaaaccggttatatgggaaagataccctctcagagcaggatgggtttccgtggacctggtgagggtgctgcaggctggggcagggacaggactgggacaggcccaccagtatccaaaggctctggccgagctccccacgaggtccagcgggctcctctctccccaggtgctgggcgtcctcttctttgccatagcctgcttcttatacaagcccctgtcggagtcttcagatggcctggaaacttgtctgcccagccagtcctcagcccctgacagtgccacagatagccagctccagagcagcgtctgaccaccgcccgcgcccacccggccacggcgggcactcagcatttcctgatgacagaacagtgccgttgggtgatgcaatcacacgggaacttctatttgacctgcaaccttctacttaacctgtggtttaaagtcggctgtgacctcctgtccccagagctgtacggccctgcagtgggtgggaggaacttgcataaatatatatttatggacacacagtttgcatcagaacgtgtttatagaatgtgttttatacccgatcgtgtgtggtgtgcgtgaggacaaactccgcaggggctgtgaatcccactgggagggcggcgggcctgcagcccgaggaaggcttgtgtgtcctcagttaaaactgtgcatatcgaaatatattttgttatttaagcctg

SEQ ID NO: 375173 - DNA, 337 bp, Homo sapiens
tctcttctccacacccccacctctgcccagctccatctggctcctgctgaagaaccccacgttcatcctgctctgcctggccggggccaccgaggccactctcatcaccggcatgtccacgttcagccccaagttcttggagtcccagttcagcctgagtgcctcagaagctgccaccttgtttggtgagaaaactgaatcttgggggtcctctgcttttatgtcagttctcagaaacagagtcttcaagggcatcttctagaaagacccagacagggcacatggcagtgagtgccctcccacccccgctgccagagcaggtgtggagagcgccacg

SEQ ID NO: 375174 - DNA, 3173 bp, Homo sapiens
ctccctctgcggcgggggcggccccagcggatgaatgaagcggcgcgtggctgccggggaggccagagcgtggagcgctgcgcggcgcggcggccgggccctcgagacggggacggacacaccagcccctcggataccacttggccactcccgctgaggccactcccactgcgtggctgaagcctcgaggtcaccaggcggaggcgcggagatgcccctgcatcagctgggggacaagccgctcaccttccccagccccaactcagccatggaaaacgggcttgaccacaccccacccagcaggagggcatccccgggcacacccctgagccccggctccctccgctccgctgcccatagccccctggacaccagcaagcagcccctctgccagctctgggccgagaagcatggcgcccgggggacccatgaggtgcggtacgtctcggccgggcagagcgtggcgtgcggctggtgggccttcgcaccgccgtgcctgcaggtcctcaacacgcccaagggcatcctgttcttcctgtgtgcggccgcattcctgcaggggatgactgtgaatggcttcatcaacacagtcatcacctccctggagcgccgctatgacctgcacagctaccagagcgggctcatcgccagctcctacgacattgccgcctgcctctgcctcaccttcgtcagctacttcgggggctcagggcacaagccgcgctggctgggctggggcgtgctgcttatgggcacggggtcgctggtgttcgcgctgccccacttcacggctggccgctatgaggtggagttggacgcgggtgtcaggacgtgccctgccaaccccggcgcggtgtgtgcggacagcacctcgggcctgtcccgctaccagctggtcttcatgctgggccagttcctgcatggcgtgggtgccacacccctctacacgctgggcgtcacctacctggatgagaacgtcaagtccagctgctcgcccgtctacattgccatcttctacacagcggccatcctgggcccagctgccggctacctgattggaggtgccctgctgaatatctacacggaaatgggccgacggacggagctgaccaccgagagcccactgtgggtcggcgcctggtgggtcggcttcctgggctctggggccgctgctttcttcaccgccgttcccatccttggttaccctcggcagctgccaggctcccagcgctacgcggtcatgagagcggcggaaatgcaccagttgaaggacagcagccgtggggaggcgagcaacccggactttgggaaaaccatcagagacctgcctctctccatctggctcctgctgaagaaccccacgttcatcctgctctgcctggccggggccaccgaggccactctcatcaccggcatgtccacgttcagccccaagttcttggagtcccagttcagcctgagtgcctcagaagctgccaccttgtttgggtacctggtggtgccagcgggtggtggcggcaccttcctgggcggcttctttgtgaacaagctcaggctccggggctccgcggtcatcaagttctgcctgttctgcaccgttgtcagcctgctgggcatcctcgtcttctcactgcactgccccagtgtgcccatggcgggcgtcacagccagctacggcgggagcctcctgcccgaaggccacctgaacctaacggctccctgcaacgctgcctgcagctgccagccagaacactacagccctgtgtgcggctcggacggcctcatgtacttctcactgtgccacgcagggtgccctgcagccacggagacgaatgtggacggccagaaggtgagtggagccgctgcctaccgcccctgtcctcccctggaccctgggaaggggcccccgtgccttccccttgtaatcggagctattgttgggcttcccaggtgtaccgagactgtagctgtatccctcagaatctttcctctggttttggccatgccactgcagggaaatgcacttcaacttgtcagagaaagcccctccttctggttttcatattcgttgtaattttctttacattcctcagcagcattcctgcactaacggcaactctacggtaagctggggtcgggtgtgcgcttgtccagagctttccttgcagcaccctgaggcggagctctgcagatcctgagacaggagcactccaggaaacacccaggtctaagcgggcctgtctgtcactggtggcaggagagacctcactgtctctgatctctgacgaggggcttcccacttgggggggggtgatgatgtggctggggactggtccaggaggccactggcctagggggtgacttggcatgcaaccccacttctgtgggtgctgacgctgtggttttctattgcagatgtgtccgtgaccctcagagatcctttgccctgggaatccagtggattgtagttagaatactagggggcatcccggggcccatcgccttcggctgggtgatcgacaaggcctgtctgctgtggcaggaccagtgtggccagcagggctcctgcttggtgtaccagaattcggccatgagccgctacatactcatcatggggctcctgtacaaggtgctgggcgtcctcttctttgccatagcctgcttcttatacaagcccctgtcggagtcttcagatggcctggaaacttgtctgcccagccagtcctcagcccctgacagtgccacagatagccagctccagagcagcgtctgaccaccgcccgcgcccacccggccacggcgggcactcagcatttcctgatgacagaacagtgccgttgggtgatgcaatcacacgggaacttctatttgacctgcaaccttctacttaacctgtggtttaaagtcggctgtgacctcctgtccccagagctgtacggccctgcagtgggtgggaggaacttgcataaatatatatttatggacacacagtttgcatcagaacgtgtttatagaatgtgttttatacccgatcgtgtgtggtgtgcgtgaggacaaactccgcaggggctgtgaatcccactgggagggcggcgggcctgcagcccgaggaaggcttgtgtgtcctcagttaaaactgtgcatatcgaaatatattttgttatttaagcctg

SEQ ID NO: 375175 - DNA, 3098 bp, Homo sapiens
ctccctctgcggcgggggcggccccagcggatgaatgaagcggcgcgtggctgccggggaggccagagcgtggagcgctgcgcggcgcggcggccgggccctcgagacggggacggacacaccagcccctcggataccacttggccactcccgctgaggccactcccactgcgtggctgaagcctcgaggtcaccaggcggaggcgcggagatgcccctgcatcagctgggggacaagccgctcaccttccccagccccaactcagccatggaaaacgggcttgaccacaccccacccagcaggagggcatccccgggcacacccctgagccccggctccctccgctccgctgcccatagccccctggacaccagcaagcagcccctctgccagctctgggccgagaagcatggcgcccgggggacccatgaggtgcggtacgtctcggccgggcagagcgtggcgtgcggctggtgggccttcgcaccgccgtgcctgcaggtcctcaacacgcccaagggcatcctgttcttcctgtgtgcggccgcattcctgcaggggatgactgtgaatggcttcatcaacacagtcatcacctccctggagcgccgctatgacctgcacagctaccagagcgggctcatcgccagctcctacgacattgccgcctgcctctgcctcaccttcgtcagctacttcgggggctcagggcacaagccgcgctggctgggctggggcgtgctgcttatgggcacggggtcgctggtgttcgcgctgccccacttcacggctggccgctatgaggtggagttggacgcgggtgtcaggacgtgccctgccaaccccggcgcggtgtgtgcggacagcacctcgggcctgtcccgctaccagctggtcttcatgctgggccagttcctgcatggcgtgggtgccacacccctctacacgctgggcgtcacctacctggatgagaacgtcaagtccagctgctcgcccgtctacattgccatcttctacacagcggccatcctgggcccagctgccggctacctgattggaggtgccctgctgaatatctacacggaaatgggccgacggacggagctgaccaccgagagcccactgtgggtcggcgcctggtgggtcggcttcctgggctctggggccgctgctttcttcaccgccgttcccatccttggttaccctcggcagctgccaggctcccagcgctacgcggtcatgagagcggcggaaatgcaccagttgaaggacagcagccgtggggaggcgagcaacccggactttgggaaaaccatcagagacctgcctctctccatctggctcctgctgaagaaccccacgttcatcctgctctgcctggccggggccaccgaggccactctcatcaccggcatgtccacgttcagccccaagttcttggagtcccagttcagcctgagtgcctcagaagctgccaccttgtttgggtacctggtggtgccagcgggtggtggcggcaccttcctgggcggcttctttgtgaacaagctcaggctccggggctccgcggtcatcaagttctgcctgttctgcaccgttgtcagcctgctgggcatcctcgtcttctcactgcactgccccagtgtgcccatggcgggcgtcacagccagctacggcgggagcctcctgcccgaaggccacctgaacctaacggctccctgcaacgctgcctgcagctgccagccagaacactacagccctgtgtgcggctcggacggcctcatgtacttctcactgtgccacgcagggtgccctgcagccacggagacgaatgtggacggccagaaggtgtaccgagactgtagctgtatccctcagaatctttcctctggttttggccatgccactgcagggaaatgcacttcaacttgtcagagaaagcccctccttctggttttcatattcgttgtaattttctttacattcctcagcagcattcctgcactaacggcaactctacgatgtgtccgtgaccctcagagatcctttgccctgggaatccagtggattgtagttagaatactagggggcatcccggggcccatcgccttcggctgggtgatcgacaaggcctgtctgctgtggcaggaccagtgtggccagcagggctcctgcttggtgtaccagaattcggccatgagccgctacatactcatcatggggctcctgtacaaggtgctgggcgtcctcttctttgccatagcctgcttcttatacaagcccctgtcggagtcttcagatggcctggaaacttgtctgcccagccagtcctcagcccctgacagtgccacagatagccagctccagagcagcgtctgaccaccgcccgcgcccacccggccacggcgggcactcagcatttcctgatgacagaacagtgccgttgggtgatgcaatcacacgggaacttctatttgacctgcaaccttctacttaacctgtggtttaaagtcggctgtgacctcctgtccccagagctgtacggccctgcagtgggtgggaggaacttgcataaatatatatttatggacacacagtttgcatcagaacgtgtttatagaatgtgttttatacccgatcgtgtgtggtgtgcgtgaggacaaactccgcaggggctgtgaatcccactgggagggcggcgggcctgcagcccgaggaaggcttgtgtgtcctcagttaaaactgtgcatatcgaaatatattttgttatttaagcctgcgtccccgtaccgcgtgctttatttctatgagtttgcagagtttggtggtctcgccatccttggcccacgtcctgtagtcagccctgtggaatccgtggatatgaaaagttggccttccttatccacaggctcccccgtaagtcggccttccttatccacaggctcccctgctgaggattcatcccaccttggatggaaaatgcagtttttgtgggagatggaactggagggtacggagggctgactgcacatacaaatatacatacatgagtgtacatatgttcttatataaacgtgtcacagtaaaattgttcctc

SEQ ID NO: 375176 - DNA, 2607 bp, Homo sapiens
ctccctctgcggcgggggcggccccagcggatgaatgaagcggcgcgtggctgccggggaggccagagcgtggagcgctgcgcggcgcggcggccgggccctcgagacggggacggacacaccagcccctcggataccacttggccactcccgctgaggccactcccactgcgtggctgaagcctcgaggtcaccaggcggaggcgcggagatgcccctgcatcagctgggggacaagccgctcaccttccccagccccaactcagccatggaaaacgggcttgaccacaccccacccagcaggagggcatccccgggcacacccctgagccccggctccctccgctccgctgcccatagccccctggacaccagcaagcagcccctctgccagctctgggccgagaagcatggcgcccgggggacccatgaggtgcggtacgtctcggccgggcagagcgtggcgtgcggctggtgggccttcgcaccgccgtgcctgcaggtcctcaacacgcccaagggcatcctgttcttcctgtgtgcggccgcattcctgcaggggatgactgtgaatggcttcatcaacacagtcatcacctccctggagcgccgctatgacctgcacagctaccagagcgggctcatcgccagctcctacgacattgccgcctgcctctgcctcaccttcgtcagctacttcgggggctcagggcacaagccgcgctggctgggctggggcgtgctgcttatgggcacggggtcgctggtgttcgcgctgccccacttcacggctggccgctatgaggtggagttggacgcgggtgtcaggacgtgccctgccaaccccggcgcggtgtgtgcggacagcacctcgggcctgtcccgctaccagctggtcttcatgctgggccagttcctgcatggcgtgggtgccacacccctctacacgctgggcgtcacctacctggatgagaacgtcaagtccagctgctcgcccgtctacattgccatcttctacacagcggccatcctgggcccagctgccggctacctgattggaggtgccctgctgaatatctacacggaaatgggccgacggacggagctgaccaccgagagcccactgtgggtcggcgcctggtgggtcggcttcctgggctctggggccgctgctttcttcaccgccgttcccatccttggttaccctcggcagctgccaggctcccagcgctacgcggtcatgagagcggcggaaatgcaccagttgaaggacagcagccgtggggaggcgagcaacccggactttgggaaaaccatcagagacctgcctctctccatctggctcctgctgaagaaccccacgttcatcctgctctgcctggccggggccaccgaggccactctcatcaccggcatgtccacgttcagccccaagttcttggagtcccagttcagcctgagtgcctcagaagctgccaccttgtttgggtacctggtggtgccagcgggtggtggcggcaccttcctgggcggcttctttgtgaacaagctcaggctccggggctccgcggtcatcaagttctgcctgttctgcaccgttgtcagcctgctgggcatcctcgtcttctcactgcactgccccagtgtgcccatggcgggcgtcacagccagctacggcgggagcctcctgcccgaaggccacctgaacctaacggctccctgcaacgctgcctgcagctgccagccagaacactacagccctgtgtgcggctcggacggcctcatgtacttctcactgtgccacgcagggtgccctgcagccacggagacgaatgtggacggccagaagatgtgtccgtgaccctcagagatcctttgccctgggaatccagtggattgtagttagaatactagggggcatcccggggcccatcgccttcggctgggtgatcgacaaggcctgtctgctgtggcaggaccagtgtggccagcagggctcctgcttggtgtaccagaattcggccatgagccgctacatactcatcatggggctcctgtacaaggtgctgggcgtcctcttctttgccatagcctgcttcttatacaagcccctgtcggagtcttcagatggcctggaaacttgtctgcccagccagtcctcagcccctgacagtgccacagatagccagctccagagcagcgtctgaccaccgcccgcgcccacccggccacggcgggcactcagcatttcctgatgacagaacagtgccgttgggtgatgcaatcacacgggaacttctatttgacctgcaaccttctacttaacctgtggtttaaagtcggctgtgacctcctgtccccagagctgtacggccctgcagtgggtgggaggaacttgcataaatatatatttatggacacacagtttgcatcagaacgtgtttatagaatgtgttttatacccgatcgtgtgtggtgtgcgtgaggacaaactccgcaggggctgtgaatcccactgggagggcggcgggcctgcagcccgaggaaggcttgtgtgtcctcagttaaaactgtgcatatcgaaatatattttgttatttaagcctg

SEQ ID NO: 375177 - DNA, 1882 bp, Homo sapiens
tgcccagcgtgctgggggcggtgcaagcttggcaagtttgtagacccgaaatgcaggctgcatggggacgagccccatggctgaccctgtgcctgctgggcgccagcatggctctggcctggaccctaccactcgcttgtcccccctctgcagcctcctgcccgaaggccacctgaacctaacggctccctgcaacgctgcctgcagctgccagccagaacactacagccctgtgtgcggctcggacggcctcatgtacttctcactgtgccacgcagggtgccctgcagccacggagacgaatgtggacggccagaaggtgtaccgagactgtagctgtatccctcagaatctttcctctggttttggccatgccactgcagggaaatgcacttcaacttgtcagagaaagcccctccttctggttttcatattcgttgtaattttctttacattcctcagcagcattcctgcactaacggcaactctacgatgtgtccgtgaccctcagagatcctttgccctgggaatccagtggattgtagttagaatactagggggcatcccggggcccatcgccttcggctgggtgatcgacaaggcctgtctgctgtggcaggaccagtgtggccagcagggctcctgcttggtgtaccagaattcggccatgagccgctacatactcatcatggggctcctgtacaagtttcagttaccagaggtccaccacagtctgaatgtattaaataggaaattccagaagcaaacagttcataacctttaaagcacgcgccgttctgcacagtctggtgagatcttgatctgtcctgcccaggactcggattctccctttgtccaactttggaagaaggcaaggtcagaacttattctgcagggagctttggggatattggatactaaggcccaagccctctgtgatacgcctttcgctttggcataaaataacggttgactctctgttaggcgcgtctctgctcagggagtggtggtgtttggggaagcccaaaggcacatgagcatcaggaaattgaccatttgacttcataagacataacctttgtccagcgtgtccaggctattcatgccaccacctgttgatcacttagcagccggtgtggttcccacatcccccatcaccatatcacagtgccatgttcaagccactcttatttacctaatcatggccccaaagcaccggagcactcacgccgccgttcagctctgccaatgggaagccggaggcgcctccttcagcgagaaggtgtagttccttggctgggcttagtactacccttagactcacgcgtccacaggggtctcagtgtctgcggatgagggggctgctgtactttcccagggagccgtccccagactctctctttgctgtgttggatgcatcccttagctgggagcagcaggctgagagccctccacacgcagccatcccctgggctcagcacagccagcgggagccgtatccagagggtcagagttggcctcagcagcgcatgcgtccatgttaattgtagcgggggagcacacggtgtctccttataaacaccctcgcattccactttgtcctgcaccgagtcaaaacagcctcactccctgaatgcaggctcagggccatcagccaggctgacactccaggaggcacagtgggtgtttctggtccacacccagcgtggaaatcatagtggtgcacatgtactctgcgtgggcattgcggcagcatccgtgcttggacctcaccgcctttggggcccacgtgggattcctgccacatcgtcctcttgccctgcaaagtcggtgcagcccctcattgttgacaaagaaaccaagaccctgaaggttcagaact

SEQ ID NO: 375178 - DNA, 4173 bp, Homo sapiens
gaccggaagtccctccgcctccactcgccctcgtgctcccttcagccccttcgcagctccgtgcgcaaggtcgtgtcccggaagtgaaggggccatgttgatgggtgacccggggagaggtacccggccagaggcgagtcctgcggagtggtagcgcgcacggcctgcggtgtgacacccagcccctgccagtcccccatggccccgtggagccgagaggcggtgctgagtctctatcgggctctgttgcgccagggccgacagcttcgctacactgatcgagacttctactttgcctccatccgccgtgaattccgaaaaaatcagaagctagaggacgctgaggcccgggagaggcagctggagaagggcctggtctttctcaacggcaaattggggaggatcatttaggatcctccaagggaaagaggacaaaggtgccttctgtagacactcctgctctcttccatccccatcttacagatgtattaagaagcctcagatgagcaatggcaggcgctggtgagcgcaaaggcaagaaggatgacaatggcattggcacggccattgactttgtgctctccaatgcccggctggtgctgggggtgggtggagcggccatgctgggcatcgccacgctggcagttaagcggatgtacgatcgggcgatcagtgcccctaccagccccacccgcctgagccattcggggaaaaggagctgggaagaacccaactggatgggctccccacgactgctgaacagggacatgaagacgggcctgagccggtccttgcagacccttcccacagactcctccaccttcgacacagatacattctgcccgccccggcccaagccagtggccaggaagggccaggtagacttgaagaagtcacgactccgcatgtccctgcaggagaaacttcttacttactaccggaaccgggcagccatccctgctggagagcaggctcgggccaagcaagctgctgtggacatatgtgccgagctccggagcttcctgcgggccaagttgcctgacatgccgcttcgggacatgtacttgagtggcagcctctacgatgacctgcaggtggtgacagctgaccacatccaactcattgtgccccttgtgctggagcagaacctgtggtcatgtattcctggtgaagacaccatcatgaatgtccctggcttcttcctggtgcgtcgtgagaatccagagtactttcctcgtgggagcagttactgggaccgctgtgtagtagggggctacctctctccaaagacagtcgcagatacatttgagaaggtagtggctggctccatcaattggccagccatagggtccctcttggactatgtgatccgcccggccccacccccagaagccctcacactggaggtgcagtatgagcgtgacaaacatctcttcattgacttcctgccatcagtgaccctcggtgacacagtcttggtggccaaaccacaccggctagcccagtatgacaacctgtggcggctgagcctgcgtcccgcggagacggcacgcctgcgggctctggaccaggctgactcgggctgccgatctctgtgcctcaagatcctcaaggccatatgcaagtccaccccggctctgggccacctcactgccagccagctaaccaatgtcatcctccacttggcccaggaggaggctgactggtctccggatatgctggccgaccgtttcctgcaggccttgaggggacttatcagctacttagaggctggagtcctgcccagtgccctaaaccccaaggtgaacttatttgcagagctcacccctgaagaaatagacgaattaggatacactctgtattgctcattgtctgagccagaggtgctgctgcagacgtagggcaggtgaaggccaaagcgggtgttggtggtcaggccctggattctccgttagatacacttggctacctagttggtgcctcacagggttcctgctgcctggtgtcttgctgatcatcaccctggtcacttcatgctgattagaatgacatctctttcgtctcctattttgttacccaactcttcctatttttgttaccaatcactgtgctctctgccgccccctggctccaggctaatttttctggaatgaattgagaaggtggcgtgctggcctgagctgatggaccacttggtgttttgcgttttggcccatgtttgctgcctctatctggtctgccttgcccgtttgcctgttcctattcagtgtcttttctattttttcctctctcgttcatgccttctgttttgctcttgtccctggagcatatctgcctaattaagatgttgccttttagttgaatgccactgaagagctgtgatagcatgtttcaaagctgaactctacagagcgagtgctgagacagtatttagggtttctgggagtgaggctggtagaagagttggcctttgaccacggttcctggagtagaagtccatcctccccccaacctcctgacccattcataaatgctgagaatgtctctcatgggaacactgttaatgacccacacaggataagctgaatgcaaagttatttgcaggttgaatttcttggtggctattagcagaagtgcagagtagggaaccagagctggttaagggcctagtgaagggtttgtgtgcccagtgtctgctcgtcatctgtggctgcaggggtcagacagacaaggatggggactgccagggcaccacttcatcatgaatgctggttttcacaccttttccttattttattgccaatcaggacaaggccttgaaggaacgcagccttagacatcaggtgaggatgatggaggtagacagtcgactgaatgtcagctggaaaatccagtcactagttggggtttggtggccatgttttctacccagacaggccctgcttttctaggatgtggccttagagcaagaacagacccaacagccagcccttcatcctccagcgtctgccataggaatgtgagaggggtgtttgctgagcgctccgggcacggccagagggcaagtgagcatgcacggacctcttccccctgtcctgtttctcacccagcacctggggagatcggtgctaccaaggaagagagcacacagataagacagaggggaggaggtgggcatttcctacattcctccttgtttgccgctgctgagattgcagtatttattgcaatgtaaatgtatcctgaaggtggggaggaatgtttaatctaccatgtccgtgtgtcatcttggtttgtgtttttccctgtttgtagcaagactctgatgataattctgtttctcatctgcccattcagtattttgttttccttccgtcaagttgtcttattttttcaatgactacctctccatcattgaggttctggtgaagctctctgcagctgtctcattccttcccaacgatagtaacaggaaatgactctttagcatcgatacctcaacatcaatttagggtagagattcctgcccctcttttgtcacagattaggaaattgagaactagggttaaccttgactatatttagaggtctttttgcctcttttccccttaacaaggatttcttatggtggtttcagtttcatttgcataaaggtattgagagggaacaaaaaacataaagctgagaatcttgagagagctcatctaccctgtctgttggtcagactcaaatgagagttaaaaaaaaaaatctgtatgcctgagtaccatcctggatgaatctagaaggtatggggtagagcttgacagggttcctgtgtacccactgggtatccgttagaggtaagggagaggagaggattgatagagtgttgcaaaagtatagattattcattgagataaaggatttggtttccctgccatgagtattaaaaaaatttaagttttcccaagcttgcatctctgaccaaatttcacataaaacattggaaggaggctgggtgcggtggctcatgcttgtaatcccagcactgggaagctaaggcgggtggatcacttgaggtcaggagttcgagaccagcctggccaacatggtgaaaccccgtctccacgaaaaagataaaaataagctgggcgtggtggcaggcgcctataatcccagctactcgggagg

SEQ ID NO: 375179 - DNA, 4422 bp, Homo sapiens
acgtgagtgtgttagagggaggcgaggaaggggctgggagagatttcccagtgaaggggggcatttgaggtagactttgaaggaagggtaggagtttgccagaagccatggggcctggggagtaggaacagcatggagggatgaaaagaaggcgatctgagaaaatgggttttgaggagctctgaatattagtgttagaattccctcaggtaccccagggccccagccagagatcagcatatacagtacaggaggctggccaggtaccccgacaggctaaggggttgccagcagccccttcgcagctccgtgcgcaaggtcgtgtcccggaagtgaaggggccatgttgatgggtgacccggggagaggtacccggccagaggcgagtcctgcggagtggtagcgcgcacggcctgcggtgtgacacccagcccctgccagtcccccatggccccgtggagccgagaggcggtgctgagtctctatcgggctctgttgcgccagggccgacagcttcgctacactgatcgagacttctactttgcctccatccgccgtgaattccgaaaaaatcagaagctagaggacgctgaggcccgggagaggcagctggagaagggcctggtctttctcaacggcaaattggggaggatcatttaggatcctccaagggaaagaggacaaaggtgccttctgtagacactcctgctctcttccatccccatcttacagatgtattaagaagcctcagatgagcaatggcaggcgctggtgagcgcaaaggcaagaaggatgacaatggcattggcacggccattgactttgtgctctccaatgcccggctggtgctgggggtgggtggagcggccatgctgggcatcgccacgctggcagttaagcggatgtacgatcgggcgatcagtgcccctaccagccccacccgcctgagccattcggggaaaaggagctgggaagaacccaactggatgggctccccacgactgctgaacagggacatgaagacgggcctgagccggtccttgcagacccttcccacagactcctccaccttcgacacagatacattctgcccgccccggcccaagccagtggccaggaagggccaggtagacttgaagaagtcacgactccgcatgtccctgcaggagaaacttcttacttactaccggaaccgggcagccatccctgctggagagcaggctcgggccaagcaagctgctgtggacatatgtgccgagctccggagcttcctgcgggccaagttgcctgacatgccgcttcgggacatgtacttgagtggcagcctctacgatgacctgcaggtggtgacagctgaccacatccaactcattgtgccccttgtgctggagcagaacctgtggtcatgtattcctggtgaagacaccatcatgaatgtccctggcttcttcctggtgcgtcgtgagaatccagagtactttcctcgtgggagcagttactgggaccgctgtgtagtagggggctacctctctccaaagacagtcgcagatacatttgagaaggtagtggctggctccatcaattggccagccatagggtccctcttggactatgtgatccgcccggccccacccccagaagccctcacactggaggtgcagtatgagcgtgacaaacatctcttcattgacttcctgccatcagtgaccctcggtgacacagtcttggtggccaaaccacaccggctagcccagtatgacaacctgtggcggctgagcctgcgtcccgcggagacggcacgcctgcgggctctggaccaggctgactcgggctgccgatctctgtgcctcaagatcctcaaggccatatgcaagtccaccccggctctgggccacctcactgccagccagctaaccaatgtcatcctccacttggcccaggaggaggctgactggtctccggatatgctggccgaccgtttcctgcaggccttgaggggacttatcagctacttagaggctggagtcctgcccagtgccctaaaccccaaggtgaacttatttgcagagctcacccctgaagaaatagacgaattaggatacactctgtattgctcattgtctgagccagaggtgctgctgcagacgtagggcaggtgaaggccaaagcgggtgttggtggtcaggccctggattctccgttagatacacttggctacctagttggtgcctcacagggttcctgctgcctggtgtcttgctgatcatcaccctggtcacttcatgctgattagaatgacatctctttcgtctcctattttgttacccaactcttcctatttttgttaccaatcactgtgctctctgccgccccctggctccaggctaatttttctggaatgaattgagaaggtggcgtgctggcctgagctgatggaccacttggtgttttgcgttttggcccatgtttgctgcctctatctggtctgccttgcccgtttgcctgttcctattcagtgtcttttctattttttcctctctcgttcatgccttctgttttgctcttgtccctggagcatatctgcctaattaagatgttgccttttagttgaatgccactgaagagctgtgatagcatgtttcaaagctgaactctacagagcgagtgctgagacagtatttagggtttctgggagtgaggctggtagaagagttggcctttgaccacggttcctggagtagaagtccatcctccccccaacctcctgacccattcataaatgctgagaatgtctctcatgggaacactgttaatgacccacacaggataagctgaatgcaaagttatttgcaggttgaatttcttggtggctattagcagaagtgcagagtagggaaccagagctggttaagggcctagtgaagggtttgtgtgcccagtgtctgctcgtcatctgtggctgcaggggtcagacagacaaggatggggactgccagggcaccacttcatcatgaatgctggttttcacaccttttccttattttattgccaatcaggacaaggccttgaaggaacgcagccttagacatcaggtgaggatgatggaggtagacagtcgactgaatgtcagctggaaaatccagtcactagttggggtttggtggccatgttttctacccagacaggccctgcttttctaggatgtggccttagagcaagaacagacccaacagccagcccttcatcctccagcgtctgccataggaatgtgagaggggtgtttgctgagcgctccgggcacggccagagggcaagtgagcatgcacggacctcttccccctgtcctgtttctcacccagcacctggggagatcggtgctaccaaggaagagagcacacagataagacagaggggaggaggtgggcatttcctacattcctccttgtttgccgctgctgagattgcagtatttattgcaatgtaaatgtatcctgaaggtggggaggaatgtttaatctaccatgtccgtgtgtcatcttggtttgtgtttttccctgtttgtagcaagactctgatgataattctgtttctcatctgcccattcagtattttgttttccttccgtcaagttgtcttattttttcaatgactacctctccatcattgaggttctggtgaagctctctgcagctgtctcattccttcccaacgatagtaacaggaaatgactctttagcatcgatacctcaacatcaatttagggtagagattcctgcccctcttttgtcacagattaggaaattgagaactagggttaaccttgactatatttagaggtctttttgcctcttttccccttaacaaggatttcttatggtggtttcagtttcatttgcataaaggtattgagagggaacaaaaaacataaagctgagaatcttgagagagctcatctaccctgtctgttggtcagactcaaatgagagttaaaaaaaaaaatctgtatgcctgagtaccatcctggatgaatctagaaggtatggggtagagcttgacagggttcctgtgtacccactgggtatccgttagaggtaagggagaggagaggattgatagagtgttgcaaaagtatagattattcattgagataaaggatttggtttccctgccatgagtattaaaaaaatttaagttttcccaagcttgcatctctgaccaaatttcacataaaacattggaaggaggctgggtgcggtggctcatgcttgtaatcccagcactgggaagctaaggcgggtggatcacttgaggtcaggagttcgagaccagcctggccaacatggtgaaaccccgtctccacgaaaaagataaaaataagctgggcgtggtggcaggcgcctataatcccagctactcgggagg

SEQ ID NO: 375180 - DNA, 4042 bp, Homo sapiens
gaccggaagtccctccgcctccactcgccctcgtgctcccttcagccccttcgcagctccgtgcgcaaggtcgtgtcccggaagtgaaggggccatgttgatgggtgacccggggagaggtacccggccagaggcgagtcctgcggagtggtagcgcgcacggcctgcggtgtgacacccagcccctgccagtcccccatggccccgtggagccgagaggcggtgctgagtctctatcgggctctgttgcgccagggccgacagcttcgctacactgatcgagacttctactttgcctccatccgccgtgaattccgaaaaaatcagaagctagaggacgctgaggcccgggagaggcagctggagaagggcctggtctttctcaacggcaaattggggaggatcatttaggatcctccaagggaaagaggacaaaggtgccttctgtagacactcctgctctcttccatccccatcttacagatgtattaagaagcctcagatgagcaatggcaggcgctggtgagcgcaaaggcaagaaggatgacaatggcattggcacggccattgactttgtgctctccaatgcccggctggtgctgggggtgggtggagcggccatgctgggcatcgccacgctggcagttaagcggatgtacgatcgggcgatcagtgcccctaccagccccacccgcctgagccattcggggaaaaggagctgggaagaacccaactggatgggctccccacgactgctgaacagggacatgaagacgggcctgagccggtccttgcagacccttcccacagactcctccaccttcgacacagatacattctgcccgccccggcccaagccagtggccaggaagggccaggtagacttgaagaagtcacgactccgcatgtccctgcaggagaaacttcttacttactaccggaaccgggcagccatccctgctggagagcaggctcgggccaagcaagctgctgtggacatatgtgccgagctccggagcttcctgcgggccaagttgcctgacatgccgcttcgggacatgtacttgagtggcagcctctacgatgacctgcaggtggtgacagctgaccacatccaactcattgtgccccttgtgctggagcagaacctgtggtcatgtattcctggtgaagacaccatcatgaatgtccctggcttcttcctggtgcgtcgtgagaatccagagtactttcctcgtgggagcagttactgggaccgctgtgtagtagggggctacctctctccaaagacagtcgcagatacatttgagaaggtagtggctggctccatcaattggccagccatagggtccctcttggactatgtgatccgcccggccccacccccagaagccctcacactggaggtgcagtatgagcgtgacaaacatctcttcattgacttcctgccatcagtgaccctcggtgacacagtcttggtggccaaaccacaccggctagcccagtatgacaacctgtggcggctgagcctgcgtcccgcggagacggcacgcctgcgggctctggaccaggctgactcgggctgccgatctctgtgcctcaagatcctcaaggccatatgcaagtccaccccggctctgggccacctcactgccagccagctaaccaatgtcatcctccacttggcccaggaggaggctgactggtctccggatatgctggccgaccgtttcctgcaggccttgaggggacttatcagctacttagaggctggagtcctgcccagtgccctaaaccccaaggtgaacttatttgcagagctcacccctgaagaaatagacgaattaggatacactctgtattgctcattgtctgagccagaggtgctgctgcagacgtagggcaggtgaaggccaaagcgggtgttggtggtcaggccctggattctccgttagatacacttggctacctagttggtgcctcacagggttcctgctgcctggtgtcttgctgatcatcaccctggtcacttcatgctgattagaatgacatctctttcgtctcctattttgttacccaactcttcctatttttgttaccaatcactgtgctctctgccgccccctggctccaggctaatttttctggaatgaattgagaaggtggcgtgctggcctgagctgatggaccacttggtgttttgcgttttggcccatgtttgctgcctctatctggtctgccttgcccgtttgcctgttcctattcagtgtcttttctattttttcctctctcgttcatgccttctgttttgctcttgtccctggagcatatctgcctaattaagatgttgccttttagttgaatgccactgaagagctgtgatagcatgtttcaaagctgaactctacagagcgagtgctgagacagtatttagggtttctgggagtgaggctggtagaagagttggcctttgaccacggttcctggagtagaagtccatcctccccccaacctcctgacccattcataaatgctgagaatgtctctcatgggaacactgttaatgacccacacaggataagctgaatgcaaagttatttgcaggttgaatttcttggtggctattagcagaagtgcagagtagggaaccagagctggttaagggcctagtgaagggtttgtgtgcccagtgtctgctcgtcatctgtggctgcaggggtcagacagacaaggatggggactgccagggcaccacttcatcatgaatgctggttttcacaccttttccttattttattgccaatcaggacaaggccttgaaggaacgcagccttagacatcaggtgaggatgatggaggtagacagtcgactgaatgtcagctggaaaatccagtcactagttggggtttggtggccatgttttctacccagacaggccctgcttttctaggatgtggccttagagcaagaacagacccaacagccagcccttcatcctccagcgtctgccataggaatgtgagaggggtgtttgctgagcgctccgggcacggccagagggcaagtgagcatgcacggacctcttccccctgtcctgtttctcacccagcacctggggagatcggtgctaccaaggaagagagcacacagataagacagaggggaggaggtgggcatttcctacattcctccttgtttgccgctgctgagattgcagtatttattgcaatgtaaatgtatcctgaaggtggggaggaatgtttaatctaccatgtccgtgtgtcatcttggtttgtgtttttccctgtttgtagcaagactctgatgataattctgtttctcatctgcccattcagtattttgttttccttccgtcaagttgtcttattttttcaatgactacctctccatcattgaggttctggtgaagctctctgcagctgtctcattccttcccaacgatagtaacaggaaatgactctttagcatcgatacctcaacatcaatttagggtagagattcctgcccctcttttgtcacagattaggaaattgagaactaggagagctcatctaccctgtctgttggtcagactcaaatgagagttaaaaaaaaaaatctgtatgcctgagtaccatcctggatgaatctagaaggtatggggtagagcttgacagggttcctgtgtacccactgggtatccgttagaggtaagggagaggagaggattgatagagtgttgcaaaagtatagattattcattgagataaaggatttggtttccctgccatgagtattaaaaaaatttaagttttcccaagcttgcatctctgaccaaatttcacataaaacattggaaggaggctgggtgcggtggctcatgcttgtaatcccagcactgggaagctaaggcgggtggatcacttgaggtcaggagttcgagaccagcctggccaacatggtgaaaccccgtctccacgaaaaagataaaaataagctgggcgtggtggcaggcgcctataatcccagctactcgggagg

SEQ ID NO: 375181 - DNA, 3446 bp, Homo sapiens
gaccggaagtccctccgcctccactcgccctcgtgctcccttcagccccttcgcagctccgtgcgcaaggtcgtgtcccggaagtgaaggggccatgttgatgggtgacccggggagaggtacccggccagaggcgagtcctgcggagtggtagcgcgcacggcctgcggtgtgacacccagcccctgccagtcccccatggccccgtggagccgagaggcggtgctgagtctctatcgggctctgttgcgccagggccgacagcttcgctacactgatcgagacttctactttgcctccatccgccgtgaattccgaaaaaatcagaagctagaggacgctgaggcccgggagaggcagctggagaagggcctggtctttctcaacggcaaattggggaggatcatttaggatcctccaagggaaagaggacaaaggtgccttctgtagacactcctgctctcttccatccccatcttacagatgtattaagaagcctcagatgagcaatggcaggcgctggtgagcgcaaaggcaagaaggatgacaatggcattggcacggccattgactttgtgctctccaatgcccggctggtgctgggggtgggtggagcggccatgctgggcatcgccacgctggcagttaagcggatgtacgatcgggcgatcagtgcccctaccagccccacccgcctgagccattcggggaaaaggagctgggaagaacccaactggatgggctccccacgactgctgaacagggacatgaagacgggcctgagccggtccttgcagacccttcccacagactcctccaccttcgacacagatacattctgcccgccccggcccaagccagtggccaggaagggccaggtagacttgaagaagtcacgactccgcatgtccctgcaggagaaacttcttacttactaccggaaccgggcagccatccctgctggagagcaggctcgggccaagcaagctgctgtggacatatgtgccgagctccggagcttcctgcgggccaagttgcctgacatgccgcttcgggacatgtacttgagtggcagcctctacgatgacctgcaggtggtgacagctgaccacatccaactcattgtgccccttgtgctggagcagaacctgtggtcatgtattcctggtgaagacaccatcatgaatgtccctggcttcttcctggtgcgtcgtgagaatccagagtactttcctcgtgggagcagttactgggaccgctgtgtagtagggggctacctctctccaaagacagtcgcagatacatttgagaaggtagtggctggctccatcaattggccagccatagggtccctcttggactatgtgatccgcccggccccacccccagaagccctcacactggaggtgcagtatgagcgtgacaaacatctcttcattgacttcctgccatcagtgaccctcggtgacacagtcttggtggccaaaccacaccggctagcccagtatgacaacctgtggcggctgagcctgcgtcccgcggagacggcacgcctgcgggctctggaccaggctgactcgggctgccgatctctgtgcctcaagatcctcaaggccatatgcaagtccaccccggctctgggccacctcactgccagccagctaaccaatgtcatcctccacttggcccaggaggaggctgactggtctccggatatgctggccgaccgtttcctgcaggccttgaggggacttatcagctacttagaggctggagtcctgcccagtgccctaaaccccaaggtgaacttatttgcagagctcacccctgaagaaatagacgaattaggatacactctgtattgctcattgtctgagccagaggtgctgctgcagacgtagggcaggtgaaggccaaagcgggtgttggtggtcaggccctggattctccgttagatacacttggctacctagttggtgcctcacagggttcctgctgcctggtgtcttgctgatcatcaccctggtcacttcatgctgattagaatgacatctctttcgtctcctattttgttacccaactcttcctatttttgttaccaatcactgtgctctctgccgccccctggctccaggctaatttttctggaatgaattgagaaggtggcgtgctggcctgagctgatggaccacttggtgttttgcgttttggcccatgtttgctgcctctatctggtctgccttgcccgtttgcctgttcctattcagtgtcttttctattttttcctctctcgttcatgccttctgttttgctcttgtccctggagcatatctgcctaattaagatgttgccttttagttgaatgccactgaagagctgtgatagcatgtttcaaagctgaactctacagagcgagtgctgagacagtatttagggtttctgggagtgaggctggtagaagagttggcctttgaccacggttcctggagtagaagtccatcctccccccaacctcctgacccattcataaatgctgagaatgtctctcatgggaacactgttaatgacccacacaggataagctgaatgcaaagttatttgcaggttgaatttcttggtggctattagcagaagtgcagagtagggaaccagagctggttaagggcctagtgaagggtttgtgtgcccagtgtctgctcgtcatctgtggctgcaggggtcagacagacaaggatggggactgccagggcaccacttcatcatgaatgctggttttcacaccttttccttattttattgccaatcaggacaaggccttgaaggaacgcagccttagacatcaggtgaggatgatggaggtagacagtcgactgaatgtcagctggaaaatccagtcactagttggggtttggtggccatgttttctacccagacaggccctgcttttctaggatgtggccttagagcaagaacagacccaacagccagcccttcatcctccagcgtctgccataggaatgtgagaggggtgtttgctgagcgctccgggcacggccagagggcaagtgagcatgcacggacctcttccccctgtcctgtttctcacccagcacctggggagatcggtgctaccaaggaagagagcacacagataagacagaggggaggaggtgggcatttcctacattcctccttgtttgccgctgctgagattgcagtatttattgcaatgtaaatgtatcctgaaggtggggaggaatgtttaatctaccatgtccgtgtgtcatcttggtttgtgtttttccctgatgggagaagatgcgtcttgctcccatcaggacatgaaaaaaatattaatgtttcacttttactcaaagggcatcatttgcgatatatgcacgaagcaaaaaagcagaaaaaagagtacctctgatgggacagcagac

SEQ ID NO: 375182 - DNA, 4087 bp, Homo sapiens
gaccggaagtccctccgcctccactcgccctcgtgctcccttcagccccttcgcagctccgtgcgcaaggtcgtgtcccggaagtgaaggggccatgttgatgggtgacccggggagaggtacccggccagaggcgagtcctgcggagtggtagcgcgcacggcctgcggtgtgacacccagcccctgccagtcccccatggccccgtggagccgagaggcggtgctgagtctctatcgggctctgttgcgccagggccgacagcttcgctacactgatcgagacttctactttgcctccatccgccgtgaattccgaaaaaatcagaagctagaggacgctgaggcccgggagaggcagctggagaagggcctggtctttctcaacggcaaattggggaggatcatttaggatcctccaagggaaagaggacaaaggtgccttctgtagacactcctgctctcttccatccccatcttacagatgtattaagaagcctcagatgagcaatggcaggcgctggtgagcgcaaaggcaagaaggatgacaatggcattggcacggccattgactttgtgctctccaatgcccggctggtgctgggggtgggtggagcggccatgctgggcatcgccacgctggcagttaagcggatgtacgatcgggcgatcagtgcccctaccagccccacccgcctgagccattcggggaaaaggagctgggaagaacccaactggatgggctccccacgactgctgaacagggacatgaagacgggcctgagccggtccttgcagacccttcccacagactcctccaccttcgacacaggagaaacttcttacttactaccggaaccgggcagccatccctgctggagagcaggctcgggccaagcaagctgctgtggacatatgtgccgagctccggagcttcctgcgggccaagttgcctgacatgccgcttcgggacatgtacttgagtggcagcctctacgatgacctgcaggtggtgacagctgaccacatccaactcattgtgccccttgtgctggagcagaacctgtggtcatgtattcctggtgaagacaccatcatgaatgtccctggcttcttcctggtgcgtcgtgagaatccagagtactttcctcgtgggagcagttactgggaccgctgtgtagtagggggctacctctctccaaagacagtcgcagatacatttgagaaggtagtggctggctccatcaattggccagccatagggtccctcttggactatgtgatccgcccggccccacccccagaagccctcacactggaggtgcagtatgagcgtgacaaacatctcttcattgacttcctgccatcagtgaccctcggtgacacagtcttggtggccaaaccacaccggctagcccagtatgacaacctgtggcggctgagcctgcgtcccgcggagacggcacgcctgcgggctctggaccaggctgactcgggctgccgatctctgtgcctcaagatcctcaaggccatatgcaagtccaccccggctctgggccacctcactgccagccagctaaccaatgtcatcctccacttggcccaggaggaggctgactggtctccggatatgctggccgaccgtttcctgcaggccttgaggggacttatcagctacttagaggctggagtcctgcccagtgccctaaaccccaaggtgaacttatttgcagagctcacccctgaagaaatagacgaattaggatacactctgtattgctcattgtctgagccagaggtgctgctgcagacgtagggcaggtgaaggccaaagcgggtgttggtggtcaggccctggattctccgttagatacacttggctacctagttggtgcctcacagggttcctgctgcctggtgtcttgctgatcatcaccctggtcacttcatgctgattagaatgacatctctttcgtctcctattttgttacccaactcttcctatttttgttaccaatcactgtgctctctgccgccccctggctccaggctaatttttctggaatgaattgagaaggtggcgtgctggcctgagctgatggaccacttggtgttttgcgttttggcccatgtttgctgcctctatctggtctgccttgcccgtttgcctgttcctattcagtgtcttttctattttttcctctctcgttcatgccttctgttttgctcttgtccctggagcatatctgcctaattaagatgttgccttttagttgaatgccactgaagagctgtgatagcatgtttcaaagctgaactctacagagcgagtgctgagacagtatttagggtttctgggagtgaggctggtagaagagttggcctttgaccacggttcctggagtagaagtccatcctccccccaacctcctgacccattcataaatgctgagaatgtctctcatgggaacactgttaatgacccacacaggataagctgaatgcaaagttatttgcaggttgaatttcttggtggctattagcagaagtgcagagtagggaaccagagctggttaagggcctagtgaagggtttgtgtgcccagtgtctgctcgtcatctgtggctgcaggggtcagacagacaaggatggggactgccagggcaccacttcatcatgaatgctggttttcacaccttttccttattttattgccaatcaggacaaggccttgaaggaacgcagccttagacatcaggtgaggatgatggaggtagacagtcgactgaatgtcagctggaaaatccagtcactagttggggtttggtggccatgttttctacccagacaggccctgcttttctaggatgtggccttagagcaagaacagacccaacagccagcccttcatcctccagcgtctgccataggaatgtgagaggggtgtttgctgagcgctccgggcacggccagagggcaagtgagcatgcacggacctcttccccctgtcctgtttctcacccagcacctggggagatcggtgctaccaaggaagagagcacacagataagacagaggggaggaggtgggcatttcctacattcctccttgtttgccgctgctgagattgcagtatttattgcaatgtaaatgtatcctgaaggtggggaggaatgtttaatctaccatgtccgtgtgtcatcttggtttgtgtttttccctgtttgtagcaagactctgatgataattctgtttctcatctgcccattcagtattttgttttccttccgtcaagttgtcttattttttcaatgactacctctccatcattgaggttctggtgaagctctctgcagctgtctcattccttcccaacgatagtaacaggaaatgactctttagcatcgatacctcaacatcaatttagggtagagattcctgcccctcttttgtcacagattaggaaattgagaactagggttaaccttgactatatttagaggtctttttgcctcttttccccttaacaaggatttcttatggtggtttcagtttcatttgcataaaggtattgagagggaacaaaaaacataaagctgagaatcttgagagagctcatctaccctgtctgttggtcagactcaaatgagagttaaaaaaaaaaatctgtatgcctgagtaccatcctggatgaatctagaaggtatggggtagagcttgacagggttcctgtgtacccactgggtatccgttagaggtaagggagaggagaggattgatagagtgttgcaaaagtatagattattcattgagataaaggatttggtttccctgccatgagtattaaaaaaatttaagttttcccaagcttgcatctctgaccaaatttcacataaaacattggaaggaggctgggtgcggtggctcatgcttgtaatcccagcactgggaagctaaggcgggtggatcacttgaggtcaggagttcgagaccagcctggccaacatggtgaaaccccgtctccacgaaaaagataaaaataagctgggcgtggtggcaggcgcctataatcccagctactcgggagg

SEQ ID NO: 375183 - DNA, 4321 bp, Homo sapiens
gaccggaagtccctccgcctccactcgccctcgtgctcccttcagccccttcgcagctccgtgcgcaaggtcgtgtcccggaagtgaaggggccatgttgatgggtgacccggggagaggtacccggccagaggcgagtcctgcggagtggtagcgcgcacggcctgcggtgtgacacccagcccctgccagtcccccatggccccgtggagccgagaggcggtgctgagtctctatcgggctctgttgcgccagggccgacagcttcgctacactgatcgagacttctactttgcctccatccgccgtgaattccgaaaaaatcagaagctagaggacgctgaggcccgggagaggcagctggagaagggcctggtctttctcaacggcaaattggggaggatcatttaggatcctccaagggaaagaggacaaaggtgccttctgtagacactcctgctctcttccatccccatcttacagatgtattaagaagcctcaggacacgggatattatagaggagagtggcagcatgctgagtggtattccgatctgaatcacactgtcatcctttatccggctcaggcccagggttctaactccacaggaatgggcttatctggggactgctgctgctgcagtcaggaagactccactgtagtcgggagcagcactggcctgagcactgcactggaggccagcctcttcgctgtggtgcccaagtacttctttcagatgagcaatggcaggcgctggtgagcgcaaaggcaagaaggatgacaatggcattggcacggccattgactttgtgctctccaatgcccggctggtgctgggggtgggtggagcggccatgctgggcatcgccacgctggcagttaagcggatgtacgatcgggcgatcagtgcccctaccagccccacccgcctgagccattcggggaaaaggagctgggaagaacccaactggatgggctccccacgactgctgaacagggacatgaagacgggcctgagccggtccttgcagacccttcccacagactcctccaccttcgacacaggagaaacttcttacttactaccggaaccgggcagccatccctgctggagagcaggctcgggccaagcaagctgctgtggacatatgtgccgagctccggagcttcctgcgggccaagttgcctgacatgccgcttcgggacatgtacttgagtggcagcctctacgatgacctgcaggtggtgacagctgaccacatccaactcattgtgccccttgtgctggagcagaacctgtggtcatgtattcctggtgaagacaccatcatgaatgtccctggcttcttcctggtgcgtcgtgagaatccagagtactttcctcgtgggagcagttactgggaccgctgtgtagtagggggctacctctctccaaagacagtcgcagatacatttgagaaggtagtggctggctccatcaattggccagccatagggtccctcttggactatgtgatccgcccggccccacccccagaagccctcacactggaggtgcagtatgagcgtgacaaacatctcttcattgacttcctgccatcagtgaccctcggtgacacagtcttggtggccaaaccacaccggctagcccagtatgacaacctgtggcggctgagcctgcgtcccgcggagacggcacgcctgcgggctctggaccaggctgactcgggctgccgatctctgtgcctcaagatcctcaaggccatatgcaagtccaccccggctctgggccacctcactgccagccagctaaccaatgtcatcctccacttggcccaggaggaggctgactggtctccggatatgctggccgaccgtttcctgcaggccttgaggggacttatcagctacttagaggctggagtcctgcccagtgccctaaaccccaaggtgaacttatttgcagagctcacccctgaagaaatagacgaattaggatacactctgtattgctcattgtctgagccagaggtgctgctgcagacgtagggcaggtgaaggccaaagcgggtgttggtggtcaggccctggattctccgttagatacacttggctacctagttggtgcctcacagggttcctgctgcctggtgtcttgctgatcatcaccctggtcacttcatgctgattagaatgacatctctttcgtctcctattttgttacccaactcttcctatttttgttaccaatcactgtgctctctgccgccccctggctccaggctaatttttctggaatgaattgagaaggtggcgtgctggcctgagctgatggaccacttggtgttttgcgttttggcccatgtttgctgcctctatctggtctgccttgcccgtttgcctgttcctattcagtgtcttttctattttttcctctctcgttcatgccttctgttttgctcttgtccctggagcatatctgcctaattaagatgttgccttttagttgaatgccactgaagagctgtgatagcatgtttcaaagctgaactctacagagcgagtgctgagacagtatttagggtttctgggagtgaggctggtagaagagttggcctttgaccacggttcctggagtagaagtccatcctccccccaacctcctgacccattcataaatgctgagaatgtctctcatgggaacactgttaatgacccacacaggataagctgaatgcaaagttatttgcaggttgaatttcttggtggctattagcagaagtgcagagtagggaaccagagctggttaagggcctagtgaagggtttgtgtgcccagtgtctgctcgtcatctgtggctgcaggggtcagacagacaaggatggggactgccagggcaccacttcatcatgaatgctggttttcacaccttttccttattttattgccaatcaggacaaggccttgaaggaacgcagccttagacatcaggtgaggatgatggaggtagacagtcgactgaatgtcagctggaaaatccagtcactagttggggtttggtggccatgttttctacccagacaggccctgcttttctaggatgtggccttagagcaagaacagacccaacagccagcccttcatcctccagcgtctgccataggaatgtgagaggggtgtttgctgagcgctccgggcacggccagagggcaagtgagcatgcacggacctcttccccctgtcctgtttctcacccagcacctggggagatcggtgctaccaaggaagagagcacacagataagacagaggggaggaggtgggcatttcctacattcctccttgtttgccgctgctgagattgcagtatttattgcaatgtaaatgtatcctgaaggtggggaggaatgtttaatctaccatgtccgtgtgtcatcttggtttgtgtttttccctgtttgtagcaagactctgatgataattctgtttctcatctgcccattcagtattttgttttccttccgtcaagttgtcttattttttcaatgactacctctccatcattgaggttctggtgaagctctctgcagctgtctcattccttcccaacgatagtaacaggaaatgactctttagcatcgatacctcaacatcaatttagggtagagattcctgcccctcttttgtcacagattaggaaattgagaactagggttaaccttgactatatttagaggtctttttgcctcttttccccttaacaaggatttcttatggtggtttcagtttcatttgcataaaggtattgagagggaacaaaaaacataaagctgagaatcttgagagagctcatctaccctgtctgttggtcagactcaaatgagagttaaaaaaaaaaatctgtatgcctgagtaccatcctggatgaatctagaaggtatggggtagagcttgacagggttcctgtgtacccactgggtatccgttagaggtaagggagaggagaggattgatagagtgttgcaaaagtatagattattcattgagataaaggatttggtttccctgccatgagtattaaaaaaatttaagttttcccaagcttgcatctctgaccaaatttcacataaaacattggaaggaggctgggtgcggtggctcatgcttgtaatcccagcactgggaagctaaggcgggtggatcacttgaggtcaggagttcgagaccagcctggccaacatggtgaaaccccgtctccacgaaaaagataaaaataagctgggcgtggtggcaggcgcctataatcccagctactcgggagg

SEQ ID NO: 375184 - DNA, 3768 bp, Homo sapiens
gaccggaagtccctccgcctccactcgccctcgtgctcccttcagccccttcgcagctccgtgcgcaaggtcgtgtcccggaagtgaaggggccatgttgatgggtgacccggggagaggtacccggccagaggcgagtcctgcggagtggtagcgcgcacggcctgcggtgtgacacccagcccctgccagtcccccatggccccgtggagccgagaggcggtgctgagtctctatcgggctctgttgcgccagggccgacagcttcgctacactgatcgagacttctactttgcctccatccgccgtgaattccgaaaaaatcagaagctagaggacgctgaggcccgggagaggcagctggagaagggcctggtctttctcaacggcaaattggggaggatcatttaggatcctccaagggaaagaggacaaaggtgccttctgtagacactcctgctctcttccatccccatcttacagatgtattaagaagcctcagatgagcaatggcaggcgctggtgagcgcaaaggcaagaaggatgacaatggcattggcacggccattgactttgtgctctccaatgcccggctggtgctgggggtgggtggagcggccatgctgggcatcgccacgctggcagttaagcggatgtacgatcgggcgatcagtgcccctaccagccccacccgcctgagccattcggggaaaaggagctgggaagaacccaactggatgggctccccacgactgctgaacagggacatgaagacgggcctgagccggtccttgcagacccttcccacagactcctccaccttcgacacagatacattctgcccgccccggcccaagccagtggccaggaagggccaggtagacttgaagaagtcacgactccgcatgtccctgcaggagaaacttcttacttactaccggaaccgggcagccatccctgctggagagcaggctcgggccaagcaagctgctgtggacatatgtgccgagctccggagcttcctgcgggccaagttgcctgacatgccgcttcgggacatgtacttgagtggcagcctctacgatgacctgcaggtggtgacagctgaccacatccaactcattgtgccccttgtgctggagcagaacctgtggtcatgtattcctggtgaagacaccatcatgaatgtccctggcttcttcctggtgcgtcgtgagaatccagagtactttcctcgtgggagcagttactgggaccgctgtgtagtagggggctacctctctccaaagacagtcgcagatacatttgagaaggtagtggctggctccatcaattggccagccatagggtccctcttggactatgtgatccgcccggccccacccccagaccccaaggtgaacttatttgcagagctcacccctgaagaaatagacgaattaggatacactctgtattgctcattgtctgagccagaggtgctgctgcagacgtagggcaggtgaaggccaaagcgggtgttggtggtcaggccctggattctccgttagatacacttggctacctagttggtgcctcacagggttcctgctgcctggtgtcttgctgatcatcaccctggtcacttcatgctgattagaatgacatctctttcgtctcctattttgttacccaactcttcctatttttgttaccaatcactgtgctctctgccgccccctggctccaggctaatttttctggaatgaattgagaaggtggcgtgctggcctgagctgatggaccacttggtgttttgcgttttggcccatgtttgctgcctctatctggtctgccttgcccgtttgcctgttcctattcagtgtcttttctattttttcctctctcgttcatgccttctgttttgctcttgtccctggagcatatctgcctaattaagatgttgccttttagttgaatgccactgaagagctgtgatagcatgtttcaaagctgaactctacagagcgagtgctgagacagtatttagggtttctgggagtgaggctggtagaagagttggcctttgaccacggttcctggagtagaagtccatcctccccccaacctcctgacccattcataaatgctgagaatgtctctcatgggaacactgttaatgacccacacaggataagctgaatgcaaagttatttgcaggttgaatttcttggtggctattagcagaagtgcagagtagggaaccagagctggttaagggcctagtgaagggtttgtgtgcccagtgtctgctcgtcatctgtggctgcaggggtcagacagacaaggatggggactgccagggcaccacttcatcatgaatgctggttttcacaccttttccttattttattgccaatcaggacaaggccttgaaggaacgcagccttagacatcaggtgaggatgatggaggtagacagtcgactgaatgtcagctggaaaatccagtcactagttggggtttggtggccatgttttctacccagacaggccctgcttttctaggatgtggccttagagcaagaacagacccaacagccagcccttcatcctccagcgtctgccataggaatgtgagaggggtgtttgctgagcgctccgggcacggccagagggcaagtgagcatgcacggacctcttccccctgtcctgtttctcacccagcacctggggagatcggtgctaccaaggaagagagcacacagataagacagaggggaggaggtgggcatttcctacattcctccttgtttgccgctgctgagattgcagtatttattgcaatgtaaatgtatcctgaaggtggggaggaatgtttaatctaccatgtccgtgtgtcatcttggtttgtgtttttccctgtttgtagcaagactctgatgataattctgtttctcatctgcccattcagtattttgttttccttccgtcaagttgtcttattttttcaatgactacctctccatcattgaggttctggtgaagctctctgcagctgtctcattccttcccaacgatagtaacaggaaatgactctttagcatcgatacctcaacatcaatttagggtagagattcctgcccctcttttgtcacagattaggaaattgagaactagggttaaccttgactatatttagaggtctttttgcctcttttccccttaacaaggatttcttatggtggtttcagtttcatttgcataaaggtattgagagggaacaaaaaacataaagctgagaatcttgagagagctcatctaccctgtctgttggtcagactcaaatgagagttaaaaaaaaaaatctgtatgcctgagtaccatcctggatgaatctagaaggtatggggtagagcttgacagggttcctgtgtacccactgggtatccgttagaggtaagggagaggagaggattgatagagtgttgcaaaagtatagattattcattgagataaaggatttggtttccctgccatgagtattaaaaaaatttaagttttcccaagcttgcatctctgaccaaatttcacataaaacattggaaggaggctgggtgcggtggctcatgcttgtaatcccagcactgggaagctaaggcgggtggatcacttgaggtcaggagttcgagaccagcctggccaacatggtgaaaccccgtctccacgaaaaagataaaaataagctgggcgtggtggcaggcgcctataatcccagctactcgggagg

SEQ ID NO: 375185 - DNA, 2891 bp, Homo sapiens
gaccggaagtccctccgcctccactcgccctcgtgctcccttcagccccttcgcagctccgtgcgcaaggtcgtgtcccggaagtgaaggggccatgttgatgggtgacccggggagaggtacccggccagaggcgagtcctgcggagtggtagcgcgcacggcctgcggtgtgacacccagcccctgccagtcccccatggccccgtggagccgagaggcggtgctgagtctctatcgggctctgttgcgccagggccgacagcttcgctacactgatcgagacttctactttgcctccatccgccgtgaattccgaaaaaatcagaagctagaggacgctgaggcccgggagaggcagctggagaagggcctggtctttctcaacggcaaattggggaggatcatttaggatcctccaagggaaagaggacaaaggtgccttctgtagacactcctgctctcttccatccccatcttacagatgtattaagaagcctcagatgagcaatggcaggcgctggtgagcgcaaaggcaagaaggatgacaatggcattggcacggccattgactttgtgctctccaatgcccggctggtgctgggggtgggtggagcggccatgctgggcatcgccacgctggcagttaagcggatgtacgatcgggcgatcagtgcccctaccagccccacccgcctgagccattcggggaaaaggagctgggaagaacccaactggatgggctccccacgactgtgattagaatgacatctctttcgtctcctattttgttacccaactcttcctatttttgttaccaatcactgtgctctctgccgccccctggctccaggctaatttttctggaatgaattgagaaggtggcgtgctggcctgagctgatggaccacttggtgttttgcgttttggcccatgtttgctgcctctatctggtctgccttgcccgtttgcctgttcctattcagtgtcttttctattttttcctctctcgttcatgccttctgttttgctcttgtccctggagcatatctgcctaattaagatgttgccttttagttgaatgccactgaagagctgtgatagcatgtttcaaagctgaactctacagagcgagtgctgagacagtatttagggtttctgggagtgaggctggtagaagagttggcctttgaccacggttcctggagtagaagtccatcctccccccaacctcctgacccattcataaatgctgagaatgtctctcatgggaacactgttaatgacccacacaggataagctgaatgcaaagttatttgcaggttgaatttcttggtggctattagcagaagtgcagagtagggaaccagagctggttaagggcctagtgaagggtttgtgtgcccagtgtctgctcgtcatctgtggctgcaggggtcagacagacaaggatggggactgccagggcaccacttcatcatgaatgctggttttcacaccttttccttattttattgccaatcaggacaaggccttgaaggaacgcagccttagacatcaggtgaggatgatggaggtagacagtcgactgaatgtcagctggaaaatccagtcactagttggggtttggtggccatgttttctacccagacaggccctgcttttctaggatgtggccttagagcaagaacagacccaacagccagcccttcatcctccagcgtctgccataggaatgtgagaggggtgtttgctgagcgctccgggcacggccagagggcaagtgagcatgcacggacctcttccccctgtcctgtttctcacccagcacctggggagatcggtgctaccaaggaagagagcacacagataagacagaggggaggaggtgggcatttcctacattcctccttgtttgccgctgctgagattgcagtatttattgcaatgtaaatgtatcctgaaggtggggaggaatgtttaatctaccatgtccgtgtgtcatcttggtttgtgtttttccctgtttgtagcaagactctgatgataattctgtttctcatctgcccattcagtattttgttttccttccgtcaagttgtcttattttttcaatgactacctctccatcattgaggttctggtgaagctctctgcagctgtctcattccttcccaacgatagtaacaggaaatgactctttagcatcgatacctcaacatcaatttagggtagagattcctgcccctcttttgtcacagattaggaaattgagaactagggttaaccttgactatatttagaggtctttttgcctcttttccccttaacaaggatttcttatggtggtttcagtttcatttgcataaaggtattgagagggaacaaaaaacataaagctgagaatcttgagagagctcatctaccctgtctgttggtcagactcaaatgagagttaaaaaaaaaaatctgtatgcctgagtaccatcctggatgaatctagaaggtatggggtagagcttgacagggttcctgtgtacccactgggtatccgttagaggtaagggagaggagaggattgatagagtgttgcaaaagtatagattattcattgagataaaggatttggtttccctgccatgagtattaaaaaaatttaagttttcccaagcttgcatctctgaccaaatttcacataaaacattggaaggaggctgggtgcggtggctcatgcttgtaatcccagcactgggaagctaaggcgggtggatcacttgaggtcaggagttcgagaccagcctggccaacatggtgaaaccccgtctccacgaaaaagataaaaataagctgggcgtggtggcaggcgcctataatcccagctactcgggagg

SEQ ID NO: 375186 - DNA, 3148 bp, Homo sapiens
ctccatctcaaaacaaacaaacaaacaaacaaacaaacaccctgcaatatcaatccaagagatcctggaatgcctcttgccctgtgaaacctggcagagccctgaggtttgggtcagtgccccctgccgtgggtctctggcctacaaaggcaccatggtgtgacacccagcccctgccagtcccccatggccccgtggagccgagaggcggtgctgagtctctatcgggctctgttgcgccagggccgacagcttcgctacactgatcgagacttctactttgcctccatccgccgtgaattccgaaaaaatcagaagctagaggacgctgaggcccgggagaggcagctggagaagggcctggtctttctcaacggcaaattggggaggatcatttaggatcctccaagggaaagaggacaaaggtgccttctgtagacactcctgctctcttccatccccatcttacagatgtattaagaagcctcagatgagcaatggcaggcgctggtgagcgcaaaggcaagaaggatgacaatggcattggcacggccattgactttgtgctctccaatgcccggctggtgctgggggtgggtggagcggccatgctgggcatcgccacgctggcagttaagcggatgtacgatcgggcgatcagtgcccctaccagccccacccgcctgagccattcggggaaaaggagctgggaagaacccaactggatgggctccccacgactgctgaacagggacatgaagacgggcctgagccggtccttgcagacccttcccacagactcctccaccttcgacacagatacattctgcccgccccggcccaagccagtggccaggaagggccaggtagacttgaagaagtcacgactccgcatgtccctgcaggagaaacttcttacttactaccggaaccgggcagccatccctgctggagagcaggctcgggccaagcaagctgctgtggacatatgtgccgagctccggagcttcctgcgggccaagttgcctgacatgccgcttcgggacatgtacttgagtggcagcctctacgatgacctgcaggtggtgacagctgaccacatccaactcattgtgccccttgtgctggagcagaacctgtggtcatgtattcctggtgaagacaccatcatgaatgtccctggcttcttcctggtgcgtcgtgagaatccagagtactttcctcgtgggagcagttactgggaccgctgtgtagtagggggctacctctctccaaagacagtcgcagatacatttgagaaggtagtggctggctccatcaattggccagccatagggtccctcttggactatgtgatccgcccggccccacccccagaagccctcacactggaggtgcagtatgagcgtgacaaacatctcttcattgacttcctgccatcagtgaccctcggtgacacagtcttggtggccaaaccacaccggctagcccagtatgacaacctgtggcggctgagcctgcgtcccgcggagacggcacgcctgcgggctctggaccaggctgactcgggctgccgatctctgtgcctcaagatcctcaaggccatatgcaagtccaccccggctctgggccacctcactgccagccagctaaccaatgtcatcctccacttggcccaggaggaggctgactggtctccggatatgctggccgaccgtttcctgcaggccttgaggggacttatcagctacttagaggctggagtcctgcccagtgccctaagacaaggccttgaaggaacgcagccttagacatcaggtgaggatgatggaggtagacagtcgactgaatgtcagctggaaaatccagtcactagttggggtttggtggccatgttttctacccagacaggccctgcttttctaggatgtggccttagagcaagaacagacccaacagccagcccttcatcctccagcgtctgccataggaatgtgagaggggtgtttgctgagcgctccgggcacggccagagggcaagtgagcatgcacggacctcttccccctgtcctgtttctcacccagcacctggggagatcggtgctaccaaggaagagagcacacagataagacagaggggaggaggtgggcatttcctacattcctccttgtttgccgctgctgagattgcagtatttattgcaatgtaaatgtatcctgaaggtggggaggaatgtttaatctaccatgtccgtgtgtcatcttggtttgtgtttttccctgtttgtagcaagactctgatgataattctgtttctcatctgcccattcagtattttgttttccttccgtcaagttgtcttattttttcaatgactacctctccatcattgaggttctggtgaagctctctgcagctgtctcattccttcccaacgatagtaacaggaaatgactctttagcatcgatacctcaacatcaatttagggtagagattcctgcccctcttttgtcacagattaggaaattgagaactagggttaaccttgactatatttagaggtctttttgcctcttttccccttaacaaggatttcttatggtggtttcagtttcatttgcataaaggtattgagagggaacaaaaaacataaagctgagaatcttgagagagctcatctaccctgtctgttggtcagactcaaatgagagttaaaaaaaaaaatctgtatgcctgagtaccatcctggatgaatctagaaggtatggggtagagcttgacagggttcctgtgtacccactgggtatccgttagaggtaagggagaggagaggattgatagagtgttgcaaaagtatagattattcattgagataaaggatttggtttccctgccatgagtattaaaaaaatttaagttttcccaagcttgcatctctgaccaaatttcacataaaacattggaaggaggctgggtgcggtggctcatgcttgtaatcccagcactgggaagctaaggcgggtggatcacttgaggtcaggagttcgagaccagcctggccaacatggtgaaaccccgtctccacgaaaaagataaaaataagctgggcgtggtggcaggcgcctataatcccagctactcgggagg

SEQ ID NO: 375187 - DNA, 1290 bp, Homo sapiens
ttctaatcacaaggaagatggagaaaatgcagaacaagtggtcaagaacagggagataataaatagaatatttatgggctgaggaaaacaattaccaggggaaagcccaagaagcaaagatgaacagagaacgtgctgactgcgctcgtttggaaaggcctcatggccaaaggaggagaggcattatgaggagcagtgaccgagtgggcaggacccccggggatcaggaaaggtgcacggggggagatgagaggcctgagcggcttcccaccgaaggtttttgaagcacggtttgattttctctctccccctcaccatccccagattttagttgtgactatctccaggtacatggcttgcgacaggcggtgtataaaaactaatgtgagtttaattttaaaaccttagccattttctggaacttaaatatcaaagagaaaatgtccacatatgatgttaattgaggtttgtctcactggtgatttgtgctgattcaattcctgtttctttttttttttcttaaggggtcagttttagaattgggagataggtgtataacatatgactatacagcgcaggttggttttttaacatagaaatatctgcccttaaatgagaactgaaaacggagcttcttggaggccacctgctggtggcagtgatctgaccgctgtttaagctttctttgaactcctttttttaaaacagcctccataatcaatggtgtacgatctactctcgtggtaaaacttactcagtgaagagtgtgttttattttctgaggagctgaactgttccaacctgagtattctgaataaggacagtggtcgagcatgagtgatgccatctgggcttagaaataagtgggcctaaaatctgattgttttcatacattgttcagatattgacgcaaatagcaatttattttgtaaaaaatgattggtatccggaacttgcaacagctgtgtgtggcttgaagggagatgaagtggtgaaggcctggtttccaccgaagctctcacagcccagcctttcactgtgtggccgggggaagggtgctccgggtgggggacgggaatggtgggaatggggatgccacgggacaaggctgctggcctggaaggtagtcacgtggagaaccgcaggagatgagattggaaagtagtaataagccatgtggataagaacagaggagcgggttttaaggggacgtcctgaaatgctgctcatgtcgtttcagttccatagaccacaggaaatgcaggtgagagggcacccggtggagaagga

SEQ ID NO: 375188 - DNA, 412 bp, Homo sapiens
cccctccctcttccccctcctgtctcaaaccctccaatgtaaacttcagtctcaccttaaatgtcacttcctctggagcccttttcatggtccctggtttaaatttagtccatacagcaaactgtgattgtcctccaaaccacttcaaagaactgtaatcatttaattatctatttataagtatctgatgtctgggttcttcactagactgtaaacttcatgatggcaggaaccataattgttctggttactcttgctctcaagagtgtaagagtgccacattgtgcctggcacatagcaggaactttatgatgattgttggttggaagacaggttgcctgacaggccagtcatctcaactactgtacttggatgtgtggttggaaataaaatggatccgtttaggagaggc

SEQ ID NO: 375189 - DNA, 382 bp, Homo sapiens
tttggattacttaggcaaggaggagctaatcaggccttaggaagaatgagaactggggacgctctagggcagtcagtagcaggaatttacagacagtttctctagactacagcactgctgtcaggaagttttggctcaggctgccttttatccttggatggctgctcaagattcaaagtcctgtgagagggggtctgtttggtctttattgccaaatagatcatttccttcatgggtgaatggtgtactaggtttgagcctgcttgagtgttggccacccctgtggtcagctggggagtaagctactgtatttcatgcctgcttagacctcacagaataagggaaaagaatttccctaattgaaaagtgaaatgtgttacag

SEQ ID NO: 375190 - DNA, 291 bp, Homo sapiens
tcccatgcagcatggtactggactgaatgctgtaggcagctggaacacgatggtaagtttctgtgtatctaaccatagctaaacatagaaaaggtacagcaaaaatatggtatagaagatttttgttaatggggtacctctatcgtgcacttattacaaacagaacttgtaggcctgaggttgggcatggtggctcacacctgtaatcccagcattttgggaggccaaggcaggcggatcacttgaggtcaggagttcgagaccagcctggtcaacatggtgaaactccat

SEQ ID NO: 375191 - DNA, 206 bp, Homo sapiens
tgatttttctgcatgcttccaatttaagaggtataaaatagtccttcgatgtggtttttattttgcctttctttgactgtgaatgaccttggccatttcctcatattttttggttattgtatttgcacttgcacaccttgtctctctagcttttgcctcttttttttttcctgttggtatctttattgatttattttatgagttct

SEQ ID NO: 375192 - DNA, 558 bp, Homo sapiens
tagagattcaactctaaagtggaacagagaaagcccactgctggacagctagtgttggccagcgttcattcattctcctctctctgcacagtggcaacacggagcgctctgaatccctgcatgacaacaccctcgtgctgatggtgccactgatgcacgaggtggacacgtccatcaccgggtgagtagcctggtcctgggttgccacaacacaggagtgccctccagtggaacactgtgcttctcatatttgcatgtgtagccagccaggagccaaggctgtgccacctccacttcctcccagccttgaaaagcaggatgaagctttagctgcagtaactcatacactcctccctccttgttttctcctctgtcccacctacccacccacctggtagataatctgagaagtttgatgacaagtttaagccccataatttctttgaacattccatatacctttatgtgcatatattctctctccactccttttacttcatattagaaggacgatatcctctgtgataccacagctctaccttctctctccactcccga

SEQ ID NO: 375193 - DNA, 4554 bp, Homo sapiens
  misc_feature (576)..(576): n is a, c, g, or t
ccgcgctcggcgccctgctcgccgggcagaggggaaggcggccggctggggatgggcggcccggctgcgccgaggggcgccgggaggctccgcgcgctgctgctggcgctggtggtcgcggggatccccgcgggcgcctacaacctcgacccgcagcgccccgtgcacttccagggccccgctgactcgttcttcggctacgcagttctggagcatttccacgacaacacgcgctgggtccttgtgggcgcaccaaaggcagattccaaatacagcccttcagtgaagtctcctggggctgtgtttaagtgccgtgttcacaccaaccctgaccggagatgcaccgaactggacatggctcgagggaagaatcggggcacgtcctgcggaaagacctgccgggaagaccgcgatgatgagtggatgggggtgagcctggcccgacagcccaaggctgatggccgtgtgttggcctgtgctcatcgctggaagaacatctactatgaagccgaccacatcctaccccatggcttctgctacatcatcccctccaacctccaggccaaaggcaggacnctgatcccttgctatgaagagtataagaagaagtacggagaggaacacggctcctgccaggctgggatagcgggcttcttcactgaggagctggtggtgatgggtgctccagggtcattttattgggctggaaccatcaaagtgctgaaccttacggacaacacctatttaaaactgaacgacgaagtgatcatgaacaggcggtacacctacctgggctacgcagtgaccgctggccacttctctcacccgtccaccattgatgtggtaggaggtgccccacaggacaaaggcatcggcaaggtttatattttcagagctgaccgaagatcaggcaccttaattaagatctttcaagcatcaggtaaaaagatgggctcttacttcggctcctccttgtgcgcagttgacctgaatggggacggcctctctgacctgctggtgggggcccccatgttttctgagatcagggatgagggacaggtcactgtctacatcaacagaggaaatggagccctcgaggagcagctggctctgactggggatggtgcctacaatgcgcactttggagagagcattgccagcctggacgatctggacaatgatgggttcccagatgtggccattggtgcacccaaggaggatgacttcgcaggggcggtctatatctatcatggtgatgccggtgggatagtccctcagtactcaatgaaactgtctgggcagaagataaatccagtgctccggatgtttggtcagtccatatcgggaggcattgatatggatggaaatggctatcctgatgtcactgttggagccttcatgtccgacagcgtggttcttctcagagcaaggcctgtcattacggtggatgtctccatcttcctcccgggctccatcaacatcacagcgcctcagtgtcacgacggacagcagcctgtgaactgcctgaacgtcaccacctgcttcagcttccatggcaaacacgttccagaagagattggcctgaattatgttctgatggctgacgtggccaaaaaggagaagggccagatgcccagggtctactttgtgctgctgggagagaccatgggtcaggtcacagagaagctgcagctgacttacatggaggagacgtgtcgtcactatgtggcccatgtgaagcggagggtgcaggacgtcatcagcccgatcgtgtttgaagcagcctacagcctcagtgagcatgtgactggagaggaggagagggaactgccgcctctgacaccagttctccgctggaaaaagggacaaaagattgcccaaaagaatcagactgtttttgaaaggaattgccgttcagaggactgtgccgcagacctgcagcttcagggtaaactgctgctctccagtatggatgagaaaaccctgtatctagctttgggggctgtgaagaacatctccctaaacatctctatctccaacctcggagatgatgcctatgatgccaacgtgtccttcaatgtttcccgggagctcttcttcatcaacatgtggcagaaggaggagatgggcatctcctgtgagctgctggaatcggacttcctcaaatgcagcgtgggatttcctttcatgaggtcaaagtcaaagtatgaattcagcgtgatctttgatacaagccacctgtctggggaagaggaagttctcagcttcattgttactgctcagagtggcaacacggagcgctctgaatccctgcatgacaacaccctcgtgctgatggtgccactgatgcacgaggtggacacgtccatcaccggaatcatgtctccaacctcctttgtatatggcgagtccgtggacgcagccaacttcattcagctggatgacctggagtgtcactttcagcccatcaatatcacccttcaggtctacaacactggcccaagcacccttccagggtcatctgtcagcatctctttccctaatcgactctcatctggtggtgcagagatgtttcatgtccaggaaatggtggtgggccaagagaagggaaactgctctttccagaaaaacccaactccctgcatcatccctcaagaacaagaaaatatcttccacacaatatttgcttttttcacaaagtctggaagaaaagtcttggactgtgaaaaaccaggaatttcttgcctaacagcacactgtaactttagtgctcttgctaaagaagaaagtcgtactatagacatttacatgctgctgaacacagaaatactgaaaaaggacagttcgtctgtcatccagttcatgtcccgcgccaaggtgaaggtggatcctgccctaagggtggtggaaatagctcatgggaacccagaagaggtgacggtggtcttcgaggccctgcacaatctggagccccgtggctacgtcgtggggtggatcatcgccatcagtttgttggtgggaatcctcatcttcctgctgctggccgtgctgctctggaagatgggcttctttcgccgaaggtacaaagaaattatcgaagctgagaagaaccggaaagagaatgaagacagttgggactgggtccagaaaaaccagtgagctgccacaccagtcacatgacctgatcactagcctgtcatccttggtctttgtatcttccatatttggaagaaaaaaatcttctccagatttttcggaggccccactgatgctgttctcttcttcattctatcaagcccaggtgccagcctgaggcagccacttcggccaggtcacacgaccggggccagcaccacttcctttaaagatgaactctgaactttggagagtgagctacagagccgagcaatatttatggatgcaacacgcatggtcaaccctcaggggaaaactgttacctaaagtatttttataaatataagccttttatactgattatgtcttttatatttgtatcgatgttttattatttctattaaatagttataattcactcaagcactgatatctggcctaaaatcttggaagtacatgtccatgaatacaaattttaaaggatgaaaatcttaccgtactttggaacttgctgtttaaaaagacagatgaaataagttgaagaaacctcatgtaatgaatccaccaggctggcagtggtgcatataaactgtgggtgtggcaagaccccgaagacatttcacatctttatcgcctcgatcaagtgtggagtcacatgctaatgtgtgctaaagaactgtaagtgttttttcatatgtacttttcattggaagattcccaacaagaatttggatggaaaacctgatccctagcaagaagtctgctctgtatcacctttatatagcagacatgtcaccctgcttctacacagatgatggatgaaagcttggagcaatgccatgtggtcatctggtaaacctcagaatggcgtctcatcctggacatcctgcatcagagttcacacaccacaaggactaaatccttgtcccctaagcaaagaattgggtctgaatgctggtgagggattgcctttttgtggtaattttcattgagagatcttcatttcccctaccaccctggctgtcccagctagtggtgattgcagattccttcccagagaggacatttaaccgttttaaaaaaaatgtcttagattgggttcccaagaagcagtccctgaaacaaggatttgtgtgcaagtaacttattaaggaagtattcccaggggataccagtaagagagtgggggaagcaggacaaggaaggagacaaagccaggcaaatgtttgtcatttcagggagagctccatgaagtttagcctcagcctgatcaggggtgggtggatagcggctctccagccacccctaactgagaccagtttaaccacacataactcggctcacttctcaacttttctgttcagcaggattaccctgataccaaagccagatgacgacatgaaaggaaactacagacaa

SEQ ID NO: 375194 - DNA, 2407 bp, Homo sapiens
  misc_feature (576)..(576): n is a, c, g, or t
ccgcgctcggcgccctgctcgccgggcagaggggaaggcggccggctggggatgggcggcccggctgcgccgaggggcgccgggaggctccgcgcgctgctgctggcgctggtggtcgcggggatccccgcgggcgcctacaacctcgacccgcagcgccccgtgcacttccagggccccgctgactcgttcttcggctacgcagttctggagcatttccacgacaacacgcgctgggtccttgtgggcgcaccaaaggcagattccaaatacagcccttcagtgaagtctcctggggctgtgtttaagtgccgtgttcacaccaaccctgaccggagatgcaccgaactggacatggctcgagggaagaatcggggcacgtcctgcggaaagacctgccgggaagaccgcgatgatgagtggatgggggtgagcctggcccgacagcccaaggctgatggccgtgtgttggcctgtgctcatcgctggaagaacatctactatgaagccgaccacatcctaccccatggcttctgctacatcatcccctccaacctccaggccaaaggcaggacnctgatcccttgctatgaagagtataagaagaagtacggagaggaacacggctcctgccaggctgggatagcgggcttcttcactgaggagctggtggtgatgggtgctccagggtcattttattgggctggaaccatcaaagtgctgaaccttacggacaacacctatttaaaactgaacgacgaagtgatcatgaacaggcggtacacctacctgggctacgcagtgaccgctggccacttctctcacccgtccaccattgatgtggtaggaggtgccccacaggacaaaggcatcggcaaggtttatattttcagagctgaccgaagatcaggcaccttaattaagatctttcaagcatcaggtaaaaagatgggctcttacttcggctcctccttgtgcgcagttgacctgaatggggacggcctctctgacctgctggtgggggcccccatgttttctgagatcagggatgagggacaggtcactgtctacatcaacagaggaaatggagccctcgaggagcagctggctctgactggggatggtgcctacaatgcgcactttggagagagcattgccagcctggacgatctggacaatgatgggttcccagatgtggccattggtgcacccaaggaggatgacttcgcaggggcggtctatatctatcatggtgatgccggtgggatagtccctcagtactcaatgaaactgtctgggcagaagataaatccagtgctccggatgtttggtcagtccatatcgggaggcattgatatggatggaaatggctatcctgatgtcactgttggagccttcatgtccgacagcgtggttcttctcagagcaaggcctgtcattacggtggatgtctccatcttcctcccgggctccatcaacatcacagcgcctcagtgtcacgacggacagcagcctgtgaactgcctgaacgtcaccacctgcttcagcttccatggcaaacacgttccagaagagattggcctgaattatgttctgatggctgacgtggccaaaaaggagaagggccagatgcccagggtctactttgtgctgctgggagagaccatgggtcaggtcacagagaagctgcagctgacttacatggaggagacgtgtcgtcactatgtggcccatgtgaagcggagggtgcaggacgtcatcagcccgatcgtgtttgaagcagcctacagcctcagtgagcatgtgactggagaggaggagagggaactgccgcctctgacaccagttctccgctggaaaaagggacaaaagattgcccaaaagaatcagactgtttttgaaaggaattgccgttcagaggactgtgccgcagacctgcagcttcagggtaaactgctgctctccagtatggatgagaaaaccctgtatctagctttgggggctgtgaagaacatctccctaaacatctctatctccaacctcggagatgatgcctatgatgccaacgtgtccttcaatgtttcccgggagctcttcttcatcaacatgtggcagaaggaggagatgggcatctcctgtgagctgctggaatcggacttcctcaaatgcagcgtgggatttcctttcatgaggtcaaagtcaaaggtaagggacacagacgggacccttcctcagcagcaggcccccagcccttccaccagccactgattccgccgcctccctgaggtgaggagtcctcccaccccctgcctcccatagcagctggggcggccactgaagccctgacatgctcctgtccctggctgtgtacaccggggtatactccggaggggctgcatcatatggt

SEQ ID NO: 375195 - DNA, 440 bp, Homo sapiens
gtgggccaagagaagggaaactgctctttccagaaaaacccaactccctgcatcatccctcaagaacaagaaaatatcttccacacaatatttgcttttttcacaaagtctggaagaaaagtcttggtaaggatttgtttagtggttggggtaacacgggtggtcctcactcggaagacaccagttttctatttgatatttattatttcctaaatctggttttaatcaatttgacttacaaaggcacagactgtggtcaactcctaattttcagtctgaggtttcaatcaaaatgttaaatttacattccaaatcctattacctggaaaagggataaatctttgcaacccaccaagcacaaagtaaaatgtttcttccactagaatgagtctaaacaagagtgattattcttgtgcaaacattttgggaaactgtttgat

SEQ ID NO: 375196 - DNA, 665 bp, Homo sapiens
cgtggatagaataggggcctggcctgtcgtgaattctgtcaccttgctcagtctcttcacatctttagtcctgataatcccgtctgtataatagattccataatgctgatgaatctggtgaaatctgtttttgttgcttagctggggaaaaaaaagttcttggtgtgaggaatttctcctttgttgtgactgtggttctcattgcattcccctcctcccctcctcacttccttctctgcttaccgttggatttctttttggtaggagctggtggtgatgggtgctccagggtcattttattgggctggaaccatcaaagtgctgaaccttacggacaacacctatttaaaactgaacgacgaagtgatcatgaacaggcggtacacctacctgggtgagtactcagggagaggaacaggtaagaaaggggaaatgggagtgattcccaccagattcacaaattattgcttcattgttggaaagaggagttagttggctttgacgcctgttgttctaatgacttacatctttagccagggcatcttcacatctagctccacaaacacaaggtagagaggaaaaccaaggagggaactgaattaaaactgtatgctttaattaaaaagctgacagttgaacctccagggaaataaacattttatttt

SEQ ID NO: 375197 - DNA, 2092 bp, Homo sapiens
aagcccgggaaggcaggcgcgcgggttagaacgcgccagaggtcggcgcgcgcacacccgcaccgccccgaccccaggtagtgaggccagtgattccgagtgtaagaggagaggagtgtacggcaaggggcgggaactggaacttggcccgcctcgttgtgagctgagctcagcggcacgcttttgtggcgtcactgcactgttaccccgccctacgtgtctctgacgctgacaccttctcactgtgaaacgtcgcgacctgtgacgtctggggggcgcctcaaatcttccactccagcatcggatcccggaaaggcagcgtcggagactggacccaaaactcttcctgttctgcctgcagagttgagccccgtccgggtcctggacccgcgtagtactgaccctggatccctgttcactgcgttctcgctccccgcgctccctgctggaccccgggatgccgggcatctccgcccgaggcctctctcatgaggggaggaagcagctagctgttaacctcacccgtgtcctggcactctaccgttccatcttggatgcctacatcatcgaatttttcacagacaacctatgggacacactcccttgctcatggcaggaagcattggatggactgaaaccaccacagctggccacaatgctgctggggatgcctggggaaggggaggtcgtcaggtacaggtcagtgtggccactcaccctgctggccctgaagtccacggcgtgtgccctggcctttacccggatgcctggctttcagaccccctcagaattcctggagaaccccagccagagctcccgactaacagctccattccggaaacatgtcaggcccaagaagcagcatgagatccggaggctgggagagttggtgaagaagctgagtgatttcacaggctgcacccaggttgtagacgtgggctcaggccagggccatctctcccgcttcatggctcttggcctggggttgatggtgaagagcatcgaaggggatcagagactggtggagagagcccagcgcctggaccaggagcttctgcaggctctggagaaagaggagaagaggaacccgcaggtggtccaaaccagccctcgtcactccccacaccacgtggttaggtgggtagaccccacagccctgtgtgaggagcttctgcttccactggagaacccgtgtcagggcagggcccgcttgctgctcacaggcctccacgcctgtggggatctgagtgttgccttgctgagacacttctcctgctgtcctgaggtggtggccctggcctcagtgggctgctgctacatgaagctgagtgaccctggcggctacccactgagtcagtgggtggctgggctgcctggctatgaactgccctaccggcttcgggagggggcctgccatgccctggaggaatatgctgagcggctacagaaagctggccctggccttcgaactcactgctaccgtgcagcactggagacagtcatccgacgggcccggcccgagctccgtcggccaggcgtgcagggtatccccagggtccacgagctcaagattgaagaatatgtgcagcgggggctacagcgagtggggctagatccccagctgccactgaatctggctgcccttcaggcccacctggcccaggagaaccgtgtggtggccttcttcagcctggctctactgcttgccccactggtggagacgcttattctactggaccggctgctgtaccttcaggaacagggtttccatgctgagctcctgcccatcttcagtcctgaactctctcccagaaacctggttctggtggccaccaagatgcccctgggtcaggctctttctgttctggagactgaagacagctgatgcagcctgaggagacatctcagaccccatcatctgaaagtgcccagagagcacagtggcagagtacatctcatccagagaaacagcatcctgcatcctccagagtcctggttccttcagtttcatcccctttctctccttccatggattatgtaatacattgtaaagttttaattaattaaaaattggatatctgtttccttccca

SEQ ID NO: 375198 - DNA, 809 bp, Homo sapiens
ggtagatcacttgaggtcaggagttcaagaccagcgatggtgaaaccccatctctagtaaaaatacaaaaagtagccgggtatggtggcgcacacctgtagtctcagctatttgggtggttgaggcaaaagaattgcttgaacccaggaggcggaggttgcagtgagccgagactgcaccactgcactccagcctgggcaacagagactccatctcaaaaaaaatattaagattcctaccaaatcagcctctggtgaacctctctaaggtgcatgttaagcaagcttcccaggcatcgagaacctacaatgcaagaggactgcctcccaagtcagtgccttgggaacccgtgttccttatggagaacggggtctccttagccccgctggatcctcccccatggggaaaagggactatgcctacaggcctgggcagaagaggctgagtgagtttggttcattcttccccttatgattaagggtttccatgctgagctcctgcccatcttcagtcctgaactctctcccagaaacctggttctggtggccaccaagatgcccctgggtcaggctctttctgttctggagactgaagacagctgatgcagcctgaggagacatctcagaccccatcatctgaaagtgcccagagagcacagtggcagagtacatctcatccagagaaacagcatcctgcatcctccagagtcctggttccttcagtttcatcccctttctctccttccatggattatgtaatacattgtaaagttttaattaattaaaaattggatatctgtttccttccca

SEQ ID NO: 375199 - DNA, 2362 bp, Homo sapiens
aagcccgggaaggcaggcgcgcgggttagaacgcgccagaggtcggcgcgcgcacacccgcaccgccccgaccccaggtagtgaggccagtgattccgagtgtgtgaggagcggcagtggcggcggaggagggggcggcgtgggtgggggcgggggcgggatgcgctccccggcccctctagccccgtggtggtacaacgcgaaggtgtgggaaggccgcgataaaccggaactgcagcccgccggacacctccggcttcacttccgtaagaggagaggagtgtacggcaaggggcgggaactggaacttggcccgcctcgttgtgagctgagctcagcggcacgcttttgtggcgtcactgcactgttaccccgccctacgtgtctctgacgctgacaccttctcactgtgaaacgtcgcgacctgtgacgtctggggggcgcctcaaatcttccactccagcatcggatcccggaaaggcagcgtcggagactggacccaaaactcttcctgttctgcctgcagagttgagccccgtccgggtcctggacccgcgtagtactgaccctggatccctgttcactgcgttctcgctccccgcgctccctgctggaccccgggatgccgggcatctccgcccgaggcctctctcatgaggggaggaagcagctagctgttaacctcacccgtgtcctggcactctaccgttccatcttggatgcctacatcatcgaatttttcacagacaacctatgggacacactcccttgctcatggcaggaagcattggatggactgaaaccaccacagctggccacaatgctgctggggatgcctggggaaggggaggtcgtcaggtacaggtcagtgtggccactcaccctgctggccctgaagtccacggcgtgtgccctggcctttacccggatgcctggctttcagaccccctcagaattcctggagaaccccagccagagctcccgactaacagctccattccggaaacatgtcaggcccaagaagcagcatgagatccggaggctgggagagttggtgaagaagctgagtgatttcacaggctgcacccaggttgtagacgtgggctcaggccagggccatctctcccgcttcatggctcttggcctggggttgatggtgaagagcatcgaaggggatcagagactggtggagagagcccagcgcctggaccaggagcttctgcaggctctggagaaagaggagaagaggaacccgcaggtaggccaacccttcctgcgacctggactgcaggagcaggggctgcttggctggaattgagcacagaggctggattacatctttcaagtttctcagcttgaactggtggtccaaaccagccctcgtcactccccacaccacgtggttaggtgggtagaccccacagccctgtgtgaggagcttctgcttccactggagaacccgtgtcagggcagggcccgcttgctgctcacaggcctccacgcctgtggggatctgagtgttgccttgctgagacacttctcctgctgtcctgaggtggtggccctggcctcagtgggctgctgctacatgaagctgagtgaccctggcggctacccactgagtcagtgggtggctgggctgcctggctatgaactgccctaccggcttcgggagggggcctgccatgccctggaggaatatgctgagcggctacagaaagctggccctggccttcgaactcactgctaccgtgcagcactggagacagtcatccgacgggcccggcccgagctccgtcggccaggcgtgcagggtatccccagggtccacgagctcaagattgaagaatatgtgcagcgggggctacagcgagtggggctagatccccagctgccactgaatctggctgcccttcaggcccacctggcccaggagaaccgtgtggtggccttcttcagcctggctctactgcttgccccactggtggagacgcttattctactggaccggctgctgtaccttcaggaacagggtttccatgctgagctcctgcccatcttcagtcctgaactctctcccagaaacctggttctggtggccaccaagatgcccctgggtcaggctctttctgttctggagactgaagacagctgatgcagcctgaggagacatctcagaccccatcatctgaaagtgcccagagagcacagtggcagagtacatctcatccagagaaacagcatcctgcatcctccagagtcctggttccttcagtttcatcccctttctctccttccatggattatgtaatacattgtaaagttttaattaattaaaaattggatatctgtttccttccca

SEQ ID NO: 375200 - DNA, 1816 bp, Homo sapiens
aagcccgggaaggcaggcgcgcgggttagaacgcgccagaggtcggcgcgcgcacacccgcaccgccccgaccccaggtagtgaggccagtgattccgagtgtgtgaggagcggcagtggcggcggaggagggggcggcgtgggtgggggcgggggcgggatgcgctccccggcccctctagccccgtggtggtacaacgcgaaggtgtgggaaggccgcgataaaccggaactgcagcccgccggacacctccggcttcacttccgtaagaggagaggagtgtacggcaaggggcgggaactggaacttggcccgcctcgttgtgagctgagctcagcggcacgcttttgtggcgtcactgcactgttaccccgccctacgtgtctctgacgctgacaccttctcactgtgaaacgtcgcgacctgtgacgtctggggggcgcctcaaatcttccactccagcatcggatcccggaaaggcagcgtcggagactggacccaaaactcttcctgttctgcctgcagagttgagccccgtccgggtcctggacccgcgtagtactgaccctggatccctgttcactgcgttctcgctccccgcgctccctgctggaccccgggatgccgggcatctccgcccgaggcctctctcatgaggggaggaagcagctagctgttaacctcacccgtgtcctggcactctaccgttccatcttggatgcctacatcatcgaatttttcacagacaacctatgggacacactcccttgctcatggcaggaagcattggatggactgaaaccaccacagctggccacaatgctgctggggatgcctggggaaggggaggtcgtcaggtacaggtcagtgtggccactcaccctgctggccctgaagtccacggcgtgtgccctggcctttacccggatgcctggctttcagaccccctcagaattcctggagaaccccagccagagctcccgactaacagctccattccggaaacatgtcaggcccaagaagcagcatgagatccggaggctgggagagttggtgaagaagctgagtgatttcacaggctgcacccaggttgtagacgtgggctcaggccagggccatctctcccgcttcatggctcttggcctggggttgatggtgaagagcatcgaaggggatcagagactggtggagagagcccagcgcctggaccaggagcttctgcaggctctggagaaagaggagaagaggaacccgcaggtggtccaaaccagccctcgtcactccccacaccacgtggttagatatgtgcagcgggggctacagcgagtggggctagatccccagctgccactgaatctggctgcccttcaggcccacctggcccaggagaaccgtgtggtggccttcttcagcctggctctactgcttgccccactggtggagacgcttattctactggaccggctgctgtaccttcaggaacagggtttccatgctgagctcctgcccatcttcagtcctgaactctctcccagaaacctggttctggtggccaccaagatgcccctgggtcaggctctttctgttctggagactgaagacagctgatgcagcctgaggagacatctcagaccccatcatctgaaagtgcccagagagcacagtggcagagtacatctcatccagagaaacagcatcctgcatcctccagagtcctggttccttcagtttcatcccctttctctccttccatggattatgtaatacattgtaaagttttaattaattaaaaattggatatctgtttccttccca

SEQ ID NO: 375201 - DNA, 2422 bp, Homo sapiens
aagcccgggaaggcaggcgcgcgggttagaacgcgccagaggtcggcgcgcgcacacccgcaccgccccgaccccaggtagtgaggccagtgattccgagtgtgtgaggagcggcagtggcggcggaggagggggcggcgtgggtgggggcgggggcgggatgcgctccccggcccctctagccccgtggtggtacaacgcgaaggtgtgggaaggccgcgataaaccggaactgcagcccgccggacacctccggcttcacttccgtaagaggagaggagtgtacggcaaggggcgggaactggaacttggcccgcctcgttgtgagctgagctcagcggcacgcttttgtggcgtcactgcactgttaccccgccctacgtgtctctgacgctgacaccttctcactgtgaaacgtcgcgacctgtgacgtctggggggcgcctcaaatcttccactccagcatcggatcccggaaaggcagcgtcggagactggacccaaaactcttcctgttctgcctgcagagttgagccccgtccgggtcctggacccgcgtagtactgaccctggatccctgttcactgcgttctcgctccccgcgctccctgctggaccccgggatgccgggcatctccgcccgaggcctctctcatgaggggaggaagcagctagctgttaacctcacccgtgtcctggcactctaccgttccatcttggatgcctacatcatcgaatttttcacagacaacctatgggacacactcccttgctcatggcaggaagcattggatggactgaaaccaccacagctggccacaatgctgctggggatgcctggggaaggggaggtcgtcaggtatgggctagaaggtccctgtgctggggaactcaaggctttaagccctgcagtgagcatattgctcagagagtctcataaggtcttcctgggcctcgggttgtaaactgctgcactcagatgtgatgggactattcactggaggcctcggctggactatctcaggtacaggtcagtgtggccactcaccctgctggccctgaagtccacggcgtgtgccctggcctttacccggatgcctggctttcagaccccctcagaattcctggagaaccccagccagagctcccgactaacagctccattccggaaacatgtcaggcccaagaagcagcatgagatccggaggctgggagagttggtgaagaagctgagtgatttcacaggctgcacccaggttgtagacgtgggctcaggccagggccatctctcccgcttcatggctcttggcctggggttgatggtgaagagcatcgaaggggatcagagactggtggagagagcccagcgcctggaccaggagcttctgcaggctctggagaaagaggagaagaggaacccgcaggtggtccaaaccagccctcgtcactccccacaccacgtggttaggtgggtagaccccacagccctgtgtgaggagcttctgcttccactggagaacccgtgtcagggcagggcccgcttgctgctcacaggcctccacgcctgtggggatctgagtgttgccttgctgagacacttctcctgctgtcctgaggtggtggccctggcctcagtgggctgctgctacatgaagctgagtgaccctggcggctacccactgagtcagtgggtggctgggctgcctggctatgaactgccctaccggcttcgggagggggcctgccatgccctggaggaatatgctgagcggctacagaaagctggccctggccttcgaactcactgctaccgtgcagcactggagacagtcatccgacgggcccggcccgagctccgtcggccaggcgtgcagggtatccccagggtccacgagctcaagattgaagaatatgtgcagcgggggctacagcgagtggggctagatccccagctgccactgaatctggctgcccttcaggcccacctggcccaggagaaccgtgtggtggccttcttcagcctggctctactgcttgccccactggtggagacgcttattctactggaccggctgctgtaccttcaggaacagggtttccatgctgagctcctgcccatcttcagtcctgaactctctcccagaaacctggttctggtggccaccaagatgcccctgggtcaggctctttctgttctggagactgaagacagctgatgcagcctgaggagacatctcagaccccatcatctgaaagtgcccagagagcacagtggcagagtacatctcatccagagaaacagcatcctgcatcctccagagtcctggttccttcagtttcatcccctttctctccttccatggattatgtaatacattgtaaagttttaattaattaaaaattggatatctgtttccttccca

SEQ ID NO: 375202 - DNA, 2237 bp, Homo sapiens
aagcccgggaaggcaggcgcgcgggttagaacgcgccagaggtcggcgcgcgcacacccgcaccgccccgaccccaggtagtgaggccagtgattccgagtgtgtgaggagcggcagtggcggcggaggagggggcggcgtgggtgggggcgggggcgggatgcgctccccggcccctctagccccgtggtggtacaacgcgaaggtgtgggaaggccgcgataaaccggaactgcagcccgccggacacctccggcttcacttccgtaagaggagaggagtgtacggcaaggggcgggaactggaacttggcccgcctcgttgtgagctgagctcagcggcacgcttttgtggcgtcactgcactgttaccccgccctacgtgtctctgacgctgacaccttctcactgtgaaacgtcgcgacctgtgacgtctggggggcgcctcaaatcttccactccagcatcggatcccggaaaggcagcgtcggagactggacccaaaactcttcctgttctgcctgcagagttgagccccgtccgggtcctggacccgcgtagtactgaccctggatccctgttcactgcgttctcgctccccgcgctccctgctggaccccgggatgccgggcatctccgcccgaggcctctctcatgaggggaggaagcagctagctgttaacctcacccgtgtcctggcactctaccgttccatcttggatgcctacatcatcgtacaggtcagtgtggccactcaccctgctggccctgaagtccacggcgtgtgccctggcctttacccggatgcctggctttcagaccccctcagaattcctggagaaccccagccagagctcccgactaacagctccattccggaaacatgtcaggcccaagaagcagcatgagatccggaggctgggagagttggtgaagaagctgagtgatttcacaggctgcacccaggttgtagacgtgggctcaggccagggccatctctcccgcttcatggctcttggcctggggttgatggtgaagagcatcgaaggggatcagagactggtggagagagcccagcgcctggaccaggagcttctgcaggctctggagaaagaggagaagaggaacccgcaggtaggccaacccttcctgcgacctggactgcaggagcaggggctgcttggctggaattgagcacagaggctggattacatctttcaagtttctcagcttgaactggtggtccaaaccagccctcgtcactccccacaccacgtggttaggtgggtagaccccacagccctgtgtgaggagcttctgcttccactggagaacccgtgtcagggcagggcccgcttgctgctcacaggcctccacgcctgtggggatctgagtgttgccttgctgagacacttctcctgctgtcctgaggtggtggccctggcctcagtgggctgctgctacatgaagctgagtgaccctggcggctacccactgagtcagtgggtggctgggctgcctggctatgaactgccctaccggcttcgggagggggcctgccatgccctggaggaatatgctgagcggctacagaaagctggccctggccttcgaactcactgctaccgtgcagcactggagacagtcatccgacgggcccggcccgagctccgtcggccaggcgtgcagggtatccccagggtccacgagctcaagattgaagaatatgtgcagcgggggctacagcgagtggggctagatccccagctgccactgaatctggctgcccttcaggcccacctggcccaggagaaccgtgtggtggccttcttcagcctggctctactgcttgccccactggtggagacgcttattctactggaccggctgctgtaccttcaggaacagggtttccatgctgagctcctgcccatcttcagtcctgaactctctcccagaaacctggttctggtggccaccaagatgcccctgggtcaggctctttctgttctggagactgaagacagctgatgcagcctgaggagacatctcagaccccatcatctgaaagtgcccagagagcacagtggcagagtacatctcatccagagaaacagcatcctgcatcctccagagtcctggttccttcagtttcatcccctttctctccttccatggattatgtaatacattgtaaagttttaattaattaaaaattggatatctgtttccttccca

SEQ ID NO: 375203 - DNA, 2131 bp, Homo sapiens
aagtgctgggattacaggcgtgagccaccatgcccggccaaagttattattttttttaatgtaaactctgcaggagccagaatcttgtctcaggttcactgttgtattccctgagcctacaatagagcttgatgtataaccgaaacacagccccagaatttgtggtggacgaatgaataaaaagacaccagtgtctggcacatataatgcaggttactaagtggtaatgtactaatactgtgtgtcagtcactctggtaagtgttagggatgcagatgtgaagataccatcccatccctccccttaagaaattcaatttaatagagaaaacagacacaaataagtgcagaaattgctaaaagaagtgtgtccagaatgcaatctggactccagggaaacagagttaagccaccagagtcggggaggctggagcaggcttcagagaactgactcggcttagcaggaggtacctgccagttacaggcagtggccctatgtggcagcagtgctgggaagaggcaggcaatgaggtgtgtagttgagagtggtgtgggaaagaatgggagtggtagtagcttgctgatggcttctccccttcttctgtagggaatttttcacagacaacctatgggacacactcccttgctcatggcaggaagcattggatggactgaaaccaccacagctggccacaatgctgctggggatgcctggggaaggggaggtcgtcaggtacaggtcagtgtggccactcaccctgctggccctgaagtccacggcgtgtgccctggcctttacccggatgcctggctttcagaccccctcagaattcctggagaaccccagccagagctcccgactaacagctccattccggaaacatgtcaggcccaagaagcagcatgagatccggaggctgggagagttggtgaagaagctgagtgatttcacaggctgcacccaggttgtagacgtgggctcaggccagggccatctctcccgcttcatggctcttggcctggggttgatggtgaagagcatcgaaggggatcagagactggtggagagagcccagcgcctggaccaggagcttctgcaggctctggagaaagaggagaagaggaacccgcaggtggtccaaaccagccctcgtcactccccacaccacgtggttaggtgggtagaccccacagccctgtgtgaggagcttctgcttccactggagaacccgtgtcagggcagggcccgcttgctgctcacaggcctccacgcctgtggggatctgagtgttgccttgctgagacacttctcctgctgtcctgaggtggtggccctggcctcagtgggctgctgctacatgaagctgagtgaccctggcggctacccactgagtcagtgggtggctgggctgcctggctatgaactgccctaccggcttcgggagggggcctgccatgccctggaggaatatgctgagcggctacagaaagctggccctggccttcgaactcactgctaccgtgcagcactggagacagtcatccgacgggcccggcccgagctccgtcggccaggcgtgcagggtatccccagggtccacgagctcaagattgaagaatatgtgcagcgggggctacagcgagtggggctagatccccagctgccactgaatctggctgcccttcaggcccacctggcccaggagaaccgtgtggtggccttcttcagcctggctctactgcttgccccactggtggagacgcttattctactggaccggctgctgtaccttcaggaacagggtttccatgctgagctcctgcccatcttcagtcctgaactctctcccagaaacctggttctggtggccaccaagatgcccctgggtcaggctctttctgttctggagactgaagacagctgatgcagcctgaggagacatctcagaccccatcatctgaaagtgcccagagagcacagtggcagagtacatctcatccagagaaacagcatcctgcatcctccagagtcctggttccttcagtttcatcccctttctctccttccatggattatgtaatacattgtaaagttttaattaattaaaaattggatatctgtttccttccca

SEQ ID NO: 375204 - DNA, 2296 bp, Homo sapiens
aagtgctgggattacaggcgtgagccaccatgcccggccaaagttattattttttttaatgtaaactctgcaggagccagaatcttgtctcaggttcactgttgtattccctgagcctacaatagagcttgatgtataaccgaaacacagccccagaatttgtggtggacgaatgaataaaaagacaccagtgtctggcacatataatgcaggttactaagtggtaatgtactaatactgtgtgtcagtcactctggtaagtgttagggatgcagatgtgaagataccatcccatccctccccttaagaaattcaatttaatagagaaaacagacacaaataagtgcagaaattgctaaaagaagtgtgtccagaatgcaatctggactccagggaaacagagttaagccaccagagtcggggaggctggagcaggcttcagagaactgactcggcttagcaggaggtacctgccagttacaggcagtggccctatgtggcagcagtgctgggaagaggcaggcaatgaggtgtgtagttgagagtggtgtgggaaagaatgggagtggtagtagcttgctgatggcttctccccttcttctgtagggaatttttcacagacaacctatgggacacactcccttgctcatggcaggaagcattggatggactgaaaccaccacagctggccacaatgctgctggggatgcctggggaaggggaggtcgtcaggtatgggctagaaggtccctgtgctggggaactcaaggctttaagccctgcagtgagcatattgctcagagagtctcataaggtcttcctgggcctcgggttgtaaactgctgcactcagatgtgatgggactattcactggaggcctcggctggactatctcaggtacaggtcagtgtggccactcaccctgctggccctgaagtccacggcgtgtgccctggcctttacccggatgcctggctttcagaccccctcagaattcctggagaaccccagccagagctcccgactaacagctccattccggaaacatgtcaggcccaagaagcagcatgagatccggaggctgggagagttggtgaagaagctgagtgatttcacaggctgcacccaggttgtagacgtgggctcaggccagggccatctctcccgcttcatggctcttggcctggggttgatggtgaagagcatcgaaggggatcagagactggtggagagagcccagcgcctggaccaggagcttctgcaggctctggagaaagaggagaagaggaacccgcaggtggtccaaaccagccctcgtcactccccacaccacgtggttaggtgggtagaccccacagccctgtgtgaggagcttctgcttccactggagaacccgtgtcagggcagggcccgcttgctgctcacaggcctccacgcctgtggggatctgagtgttgccttgctgagacacttctcctgctgtcctgaggtggtggccctggcctcagtgggctgctgctacatgaagctgagtgaccctggcggctacccactgagtcagtgggtggctgggctgcctggctatgaactgccctaccggcttcgggagggggcctgccatgccctggaggaatatgctgagcggctacagaaagctggccctggccttcgaactcactgctaccgtgcagcactggagacagtcatccgacgggcccggcccgagctccgtcggccaggcgtgcagggtatccccagggtccacgagctcaagattgaagaatatgtgcagcgggggctacagcgagtggggctagatccccagctgccactgaatctggctgcccttcaggcccacctggcccaggagaaccgtgtggtggccttcttcagcctggctctactgcttgccccactggtggagacgcttattctactggaccggctgctgtaccttcaggaacagggtttccatgctgagctcctgcccatcttcagtcctgaactctctcccagaaacctggttctggtggccaccaagatgcccctgggtcaggctctttctgttctggagactgaagacagctgatgcagcctgaggagacatctcagaccccatcatctgaaagtgcccagagagcacagtggcagagtacatctcatccagagaaacagcatcctgcatcctccagagtcctggttccttcagtttcatcccctttctctccttccatggattatgtaatacattgtaaagttttaattaattaaaaattggatatctgtttccttccca

SEQ ID NO: 375205 - DNA, 2762 bp, Homo sapiens
  misc_feature (2762)..(2762): n is a, c, g, or t
aagcccgggaaggcaggcgcgcgggttagaacgcgccagaggtcggcgcgcgcacacccgcaccgccccgaccccaggtagtgaggccagtgattccgagtgtgtgaggagcggcagtggcggcggaggagggggcggcgtgggtgggggcgggggcgggatgcgctccccggcccctctagccccgtggtggtacaacgcgaaggtgtgggaaggccgcgataaaccggaactgcagcccgccggacacctccggcttcacttccgtaagaggagaggagtgtacggcaaggggcgggaactggaacttggcccgcctcgttgtgagctgagctcagcggcacgcttttgtggcgtcactgcactgttaccccgccctacgtgtctctgacgctgacaccttctcactgtgaaacgtcgcgacctgtgacgtctggggggcgcctcaaatcttccactccagcatcggatcccggaaaggcagcgtcggagactggacccaaaactcttcctgttctgcctgcagagttgagccccgtccgggtcctggacccgcgtagtactgaccctggatccctgttcactgcgttctcgctccccgcgctccctgctggaccccgggatgccgggcatctccgcccgaggcctctctcatgaggggaggaagcagctagctgttaacctcacccgtgtcctggcactctaccgttccatcttggatgcctacatcatcgaatttttcacagacaacctatgggacacactcccttgctcatggcaggaagcattggatggactgaaaccaccacagctggccacaatgctgctggggatgcctggggaaggggaggtcgtcaggtacaggtcagtgtggccactcaccctgctggccctgaagtccacggcgtgtgccctggcctttacccggatgcctggctttcagaccccctcagaattcctggagaaccccagccagagctcccgactaacagctccattccggaaacatgtcaggcccaagaagcagcatgagatccggaggctgggagagttggtgaagaagctgagtgatttcacaggctgcacccaggttgtagacgtgggctcaggccagggccatctctcccgcttcatggctcttggcctggggttgatggtgaagagcatcgaaggggatcagagactggtggagagagcccagcgcctggaccaggagcttctgcaggctctggagaaagaggagaagaggaacccgcaggtggtccaaaccagccctcgtcactccccacaccacgtggttaggtgggtagaccccacagccctgtgtgaggagcttctgcttccactggagaacccgtgtcagggcagggcccgcttgctgctcacaggcctccacgcctgtggggatctgagtgttgccttgctgagacacttctcctgctgtcctgaggtggtggccctggcctcagtgggctgctgctacatgaagctgagtgaccctggcggctacccactgagtcagtgggtggctgggctgcctggctatgaactgccctaccggcttcgggagggggcctgccatgccctggaggaatatgctgagcggctacagaaagctggccctggccttcgaactcactgctaccgtgcagcactggagacagtcatccgacgggcccggcccgagctccgtcggccaggcgtgcagggtatccccagggtccacgagctcaagattgaagaatatgtgcagcgggggctacagcgagtggggctagatccccagctgccactgaatctggctgcccttcaggcccacctggcccaggagaaccgtgtggtggccttcttcagcctggctctactgcttgccccactggtggagacgcttattctactggaccggctgctgtaccttcaggaacagggtttccatgctgagctcctgcccatcttcagtcctgaactctctcccagaaacctggttctggtggccaccaagatgcccctgggtcaggctctttctgttctggagactgaagacagctgatgcagcctgaggagacatctcagaccccatcatctgaaagtgcccagagagcacagtggcagagtacatctcatccagagaaacagcatcctgcatcctccagagtcctggttccttcagtttcatcccctttctctccttccatggattatgtaatacattgtaaagttttaattaattaaaaattggatatctgtttccttcccaaaaaaaaaaaaaacaaaacaaaacaaaacaagaaaaacacaaagcaaaaaaaacaaacccccctctttcgccccccaacaaccaccaccactcacccacaacccccccaccccagcaccccgccccgacgaggagcgcagaaaccgcgccgcgcgcccccagtacgcggcagaccatccgctcacagaccaggcgcagcagcccccactaaacaagcggcagaggccagagcgccgcaccggagaacaccggaaccgaacgacagaacagcacgcgagcgcggagagcaagtgcgaccgcaaccgagagcacgcagccgcgagccaaaccgagccgaaagagcagcggccgagacacacaaacagccagcaaaagacgagctacacgagcaccacccgccgacaacgcagaccacacgcgccccacgcagagcacgggccactcagcacccaccacgagcccagaccgcacaaccacaccacacgcaacaccccgccaacgacan

SEQ ID NO: 375206 - DNA, 885 bp, Homo sapiens
tctctactaaaaacacaaaaaattagccaggcgtggtggcgggcgcctgtagtcccagctactcgggaggctgaggcaggagaatggcgtgaacctgggagacggagcttgcagtgagccgagatcgcaccactgcactccagcctgggcgacagagcgagactccatctcaaaaaaaaaaaaaaaaaaaaaaaaaaaaaaaaaaaaaaaaaatatatatatatatatatatatgcacatatgttcatgaaaacgcatattggggtagaaaataaagcaaagttggaactgaattaggaacaagcaaagtttaagtgagaggtgacagttcttaaaaccaaactgagtgctgaatgtgactgatcccacagatatgtgcagcgggggctacagcgagtggggctagatccccagctgccactgaatctggctgcccttcaggcccacctggcccaggagaaccgtgtggtggccttcttcagcctggctctactgcttgccccactggtggagacgcttattctactggaccggctgctgtaccttcaggaacagggtttccatgctgagctcctgcccatcttcagtcctgaactctctcccagaaacctggttctggtggccaccaagatgcccctgggtcaggctctttctgttctggagactgaagacagctgatgcagcctgaggagacatctcagaccccatcatctgaaagtgcccagagagcacagtggcagagtacatctcatccagagaaacagcatcctgcatcctccagagtcctggttccttcagtttcatcccctttctctccttccatggattatgtaatacattgtaaagttttaattaattaaaaattggatatctgtttccttccca

SEQ ID NO: 375207 - DNA, 2257 bp, Homo sapiens
aagcccgggaaggcaggcgcgcgggttagaacgcgccagaggtcggcgcgcgcacacccgcaccgccccgaccccaggtagtgaggccagtgattccgagtgtgtgaggagcggcagtggcggcggaggagggggcggcgtgggtgggggcgggggcgggatgcgctccccggcccctctagccccgtggtggtacaacgcgaaggtgtgggaaggccgcgataaaccggaactgcagcccgccggacacctccggcttcacttccgtaagaggagaggagtgtacggcaaggggcgggaactggaacttggcccgcctcgttgtgagctgagctcagcggcacgcttttgtggcgtcactgcactgttaccccgccctacgtgtctctgacgctgacaccttctcactgtgaaacgtcgcgacctgtgacgtctggggggcgcctcaaatcttccactccagcatcggatcccggaaaggcagcgtcggagactggacccaaaactcttcctgttctgcctgcagagttgagccccgtccgggtcctggacccgcgtagtactgaccctggatccctgttcactgcgttctcgctccccgcgctccctgctggaccccgggatgccgggcatctccgcccgaggcctctctcatgaggggaggaagcagctagctgttaacctcacccgtgtcctggcactctaccgttccatcttggatgcctacatcatcgaatttttcacagacaacctatgggacacactcccttgctcatggcaggaagcattggatggactgaaaccaccacagctggccacaatgctgctggggatgcctggggaaggggaggtcgtcaggtacaggtcagtgtggccactcaccctgctggccctgaagtccacggcgtgtgccctggcctttacccggatgcctggctttcagaccccctcagaattcctggagaaccccagccagagctcccgactaacagctccattccggaaacatgtcaggcccaagaagcagcatgagatccggaggctgggagagttggtgaagaagctgagtgatttcacaggctgcacccaggttgtagacgtgggctcaggccagggccatctctcccgcttcatggctcttggcctggggttgatggtgaagagcatcgaaggggatcagagactggtggagagagcccagcgcctggaccaggagcttctgcaggctctggagaaagaggagaagaggaacccgcaggtggtccaaaccagccctcgtcactccccacaccacgtggttaggtgggtagaccccacagccctgtgtgaggagcttctgcttccactggagaacccgtgtcagggcagggcccgcttgctgctcacaggcctccacgcctgtggggatctgagtgttgccttgctgagacacttctcctgctgtcctgaggtggtggccctggcctcagtgggctgctgctacatgaagctgagtgaccctggcggctacccactgagtcagtgggtggctgggctgcctggctatgaactgccctaccggcttcgggagggggcctgccatgccctggaggaatatgctgagcggctacagaaagctggccctggccttcgaactcactgctaccgtgcagcactggagacagtcatccgacgggcccggcccgagctccgtcggccaggcgtgcagggtatccccagggtccacgagctcaagattgaagaatatgtgcagcgggggctacagcgagtggggctagatccccagctgccactgaatctggctgcccttcaggcccacctggcccaggagaaccgtgtggtggccttcttcagcctggctctactgcttgccccactggtggagacgcttattctactggaccggctgctgtaccttcaggaacagggtttccatgctgagctcctgcccatcttcagtcctgaactctctcccagaaacctggttctggtggccaccaagatgcccctgggtcaggctctttctgttctggagactgaagacagctgatgcagcctgaggagacatctcagaccccatcatctgaaagtgcccagagagcacagtggcagagtacatctcatccagagaaacagcatcctgcatcctccagagtcctggttccttcagtttcatcccctttctctccttccatggattatgtaatacattgtaaagttttaattaattaaaaattggatatctgtttccttccca

SEQ ID NO: 375208 - DNA, 1287 bp, Homo sapiens
  misc_feature (2)..(2): n is a, c, g, or t
  misc_feature (8)..(8): n is a, c, g, or t
  misc_feature (31)..(31): n is a, c, g, or t
  misc_feature (37)..(37): n is a, c, g, or t
  misc_feature (89)..(89): n is a, c, g, or t
cnagctgnaaacctcacccgtgtcagggcanggcgcntctgctgctcacaggcctccacgcctgtgggcgatctgagtgttgccttgcngagacacttctcctgctgtcctgaggtggtggccctggctcagtgggctgctgctacatgaagctgagtgaccctggcggctacccactgagtcagtgggtggctgggctgcctggctatgaactgccctaccgttccatcttggatgcctacatcatcgaatttttcacagacaacctatgggacacactcccttgctcatggcaggaagcattggatggactgaaaccaccacagctggccacaatgctgctggggatgcctggggaaggggaggtcgtcaggtacaggtcagtgtggccactcaccctgctggccctgaagtccacggcgtgtgccctggcctttacccggatgcctggctttcagaccccctcagaattcctggagaaccccagccagagctcccgactaacagctccattccggaaacatgtcaggcccaagaagcagcatgagatccggaggctgggagagttggtgaagaagctgagtgatttcacaggctgcacccaggttgtagacgtgggctcaggccagggccatctctcccgcttcatggctcttggcctggggttgatggtgaagagcatcgaaggggatcagagactggtggagagagcccagcgcctggaccaggagcttctgcaggctctggagaaagaggagaagaggaacccgcagatatgtgcagcgggggctacagcgagtggggctagatccccagctgccactgaatctggctgcccttcaggcccacctggcccaggagaaccgtgtggtggccttcttcagcctggctctactgcttgccccactggtggagacgcttattctactggaccggctgctgtaccttcaggaacagggtttccatgctgagctcctgcccatcttcagtcctgaactctctcccagaaacctggttctggtggccaccaagatgcccctgggtcaggctctttctgttctggagactgaagacagctgatgcagcctgaggagacatctcagaccccatcatctgaaagtgcccagagagcacagtggcagagtacatctcatccagagaaacagcatcctgcatcctccagagtcctggttccttcagtttcatcccctttctctccttccatggattatgtaatacattgtaaagttttaattaattaaaaattggatatctgtttccttccca

SEQ ID NO: 375209 - DNA, 2194 bp, Homo sapiens
aagcccgggaaggcaggcgcgcgggttagaacgcgccagaggtcggcgcgcgcacacccgcaccgccccgaccccaggtagtgaggccagtgattccgagtgtgtgaggagcggcagtggcggcggaggagggggcggcgtgggtgggggcgggggcgggatgcgctccccggcccctctagccccgtggtggtacaacgcgaaggtgtgggaaggccgcgataaaccggaactgcagcccgccggacacctccggcttcacttccgtaagaggagaggagtgtacggcaaggggcgggaactggaacttggcccgcctcgttgtgagctgagctcagcggcacgcttttgtggcgtcactgcactgttaccccgccctacgtgtctctgacgctgacaccttctcactgtgaaacgtcgcgacctgtgacgtctggggggcgcctcaaatcttccactccagcatcggatcccggaaaggcagcgtcggagactggacccaaaactcttcctgttctgcctgcagagttgagccccgtccgggtcctggacccgcgtagtactgaccctggatccctgttcactgcgttctcgctccccgcgctccctgctggaccccgggatgccgggcatctccgcccgaggcctctctcatgaggggaggaagcagctagctgttaacctcacccgtgtcctggcactctaccgttccatcttggatgcctacatcatcgaatttttcacagacaacctatgggacacactcccttgctcatggcaggaagcattggatggactgaaaccaccacagctggccacaatgctgctggggatgcctggggaaggggaggtcgtcaggtacaggtcagtgtggccactcaccctgctggccctgaagtccacggcgtgtgccctggcctttacccggatgcctggctttcagaccccctcagaattcctggagaaccccagccagagctcccgactaacagctccattccggaaacatgtcaggcccaagaagcagcatgagatccggaggctgggagagggccatctctcccgcttcatggctcttggcctggggttgatggtgaagagcatcgaaggggatcagagactggtggagagagcccagcgcctggaccaggagcttctgcaggctctggagaaagaggagaagaggaacccgcaggtggtccaaaccagccctcgtcactccccacaccacgtggttaggtgggtagaccccacagccctgtgtgaggagcttctgcttccactggagaacccgtgtcagggcagggcccgcttgctgctcacaggcctccacgcctgtggggatctgagtgttgccttgctgagacacttctcctgctgtcctgaggtggtggccctggcctcagtgggctgctgctacatgaagctgagtgaccctggcggctacccactgagtcagtgggtggctgggctgcctggctatgaactgccctaccggcttcgggagggggcctgccatgccctggaggaatatgctgagcggctacagaaagctggccctggccttcgaactcactgctaccgtgcagcactggagacagtcatccgacgggcccggcccgagctccgtcggccaggcgtgcagggtatccccagggtccacgagctcaagattgaagaatatgtgcagcgggggctacagcgagtggggctagatccccagctgccactgaatctggctgcccttcaggcccacctggcccaggagaaccgtgtggtggccttcttcagcctggctctactgcttgccccactggtggagacgcttattctactggaccggctgctgtaccttcaggaacagggtttccatgctgagctcctgcccatcttcagtcctgaactctctcccagaaacctggttctggtggccaccaagatgcccctgggtcaggctctttctgttctggagactgaagacagctgatgcagcctgaggagacatctcagaccccatcatctgaaagtgcccagagagcacagtggcagagtacatctcatccagagaaacagcatcctgcatcctccagagtcctggttccttcagtttcatcccctttctctccttccatggattatgtaatacattgtaaagttttaattaattaaaaattggatatctgtttccttccca

SEQ ID NO: 375210 - DNA, 1772 bp, Homo sapiens
aagcccgggaaggcaggcgcgcgggttagaacgcgccagaggtcggcgcgcgcacacccgcaccgccccgaccccaggtagtgaggccagtgattccgagtgtgtgaggagcggcagtggcggcggaggagggggcggcgtgggtgggggcgggggcgggatgcgctccccggcccctctagccccgtggtggtacaacgcgaaggtgtgggaaggccgcgataaaccggaactgcagcccgccggacacctccggcttcacttccgtaagaggagaggagtgtacggcaaggggcgggaactggaacttggcccgcctcgttgtgagctgagctcagcggcacgcttttgtggcgtcactgcactgttaccccgccctacgtgtctctgacgctgacaccttctcactgtgaaacgtcgcgacctgtgacgtctggggggcgcctcaaatcttccactccagcatcggatcccggaaaggcagcgtcggagactggacccaaaactcttcctgttctgcctgcagagttgagccccgtccgggtcctggacccgcgtagtactgaccctggatccctgttcactgcgttctcgctccccgcgctccctgctggaccccgggatgccgggcatctccgcccgaggcctctctcatgaggggaggaagcagctagctgttaacctcacccgtgtcctggcactctaccgttccatcttggatgcctacatcatcgaatttttcacagacaacctatgggacacactcccttgctcatggcaggaagcattggatggactgaaaccaccacagctggccacaatgctgctggggatgcctggggaaggggaggtcgtcaggtacaggtcagtgtggccactcaccctgctggccctgaagtccacggcgtgtgccctggcctttacccggatgcctggctttcagaccccctcagaattcctggagaaccccagccagagctcccgactaacagctccattccggaaacatgtcaggcccaagaagcagcatgagatccggaggctgggagagttggtgaagaagctgagtgatttcacaggctgcacccaggttgtagacgtgggctcaggccagggccatctctcccgcttcatggctcttggcctggggttgatggtgaagagcatcgaaggggatcagagactggtggagagagcccagcgcctggaccaggagcttctgcaggctctggagaaagaggagaagaggaacccgcagatatgtgcagcgggggctacagcgagtggggctagatccccagctgccactgaatctggctgcccttcaggcccacctggcccaggagaaccgtgtggtggccttcttcagcctggctctactgcttgccccactggtggagacgcttattctactggaccggctgctgtaccttcaggaacagggtttccatgctgagctcctgcccatcttcagtcctgaactctctcccagaaacctggttctggtggccaccaagatgcccctgggtcaggctctttctgttctggagactgaagacagctgatgcagcctgaggagacatctcagaccccatcatctgaaagtgcccagagagcacagtggcagagtacatctcatccagagaaacagcatcctgcatcctccagagtcctggttccttcagtttcatcccctttctctccttccatggattatgtaatacattgtaaagttttaattaattaaaaattggatatctgtttccttccca

SEQ ID NO: 375211 - DNA, 1772 bp, Homo sapiens
  misc_feature (2)..(2): n is a, c, g, or t
  misc_feature (8)..(8): n is a, c, g, or t
  misc_feature (31)..(31): n is a, c, g, or t
  misc_feature (37)..(37): n is a, c, g, or t
  misc_feature (89)..(89): n is a, c, g, or t
cnagctgnaaacctcacccgtgtcagggcanggcgcntctgctgctcacaggcctccacgcctgtgggcgatctgagtgttgccttgcngagacacttctcctgctgtcctgaggtggtggccctggctcagtgggctgctgctacatgaagctgagtgaccctggcggctacccactgagtcagtgggtggctgggctgcctggctatgaactgccctaccgttccatcttggatgcctacatcatcgaatttttcacagacaacctatgggacacactcccttgctcatggcaggaagcattggatggactgaaaccaccacagctggccacaatgctgctggggatgcctggggaaggggaggtcgtcaggtacaggtcagtgtggccactcaccctgctggccctgaagtccacggcgtgtgccctggcctttacccggatgcctggctttcagaccccctcagaattcctggagaaccccagccagagctcccgactaacagctccattccggaaacatgtcaggcccaagaagcagcatgagatccggaggctgggagagttggtgaagaagctgagtgatttcacaggctgcacccaggttgtagacgtgggctcaggccagggccatctctcccgcttcatggctcttggcctggggttgatggtgaagagcatcgaaggggatcagagactggtggagagagcccagcgcctggaccaggagcttctgcaggctctggagaaagaggagaagaggaacccgcaggtggtccaaaccagccctcgtcactccccacaccacgtggttaggtgggtagaccccacagccctgtgtgaggagcttctgcttccactggagaacccgtgtcagggcagggcccgcttgctgctcacaggcctccacgcctgtggggatctgagtgttgccttgctgagacacttctcctgctgtcctgaggtggtggccctggcctcagtgggctgctgctacatgaagctgagtgaccctggcggctacccactgagtcagtgggtggctgggctgcctggctatgaactgccctaccggcttcgggagggggcctgccatgccctggaggaatatgctgagcggctacagaaagctggccctggccttcgaactcactgctaccgtgcagcactggagacagtcatccgacgggcccggcccgagctccgtcggccaggcgtgcagggtatccccagggtccacgagctcaagattgaagaatatgtgcagcgggggctacagcgagtggggctagatccccagctgccactgaatctggctgcccttcaggcccacctggcccaggagaaccgtgtggtggccttcttcagcctggctctactgcttgccccactggtggagacgcttattctactggaccggctgctgtaccttcaggaacagggtttccatgctgagctcctgcccatcttcagtcctgaactctctcccagaaacctggttctggtggccaccaagatgcccctgggtcaggctctttctgttctggagactgaagacagctgatgcagcctgaggagacatctcagaccccatcatctgaaagtgcccagagagcacagtggcagagtacatctcatccagagaaacagcatcctgcatcctccagagtcctggttccttcagtttcatcccctttctctccttccatggattatgtaatacattgtaaagttttaattaattaaaaattggatatctgtttccttccca

SEQ ID NO: 375212 - DNA, 2039 bp, Homo sapiens
aagcccgggaaggcaggcgcgcgggttagaacgcgccagaggtcggcgcgcgcacacccgcaccgccccgaccccaggtagtgaggccagtgattccgagtgtgtgaggagcggcagtggcggcggaggagggggcggcgtgggtgggggcgggggcgggatgcgctccccggcccctctagccccgtggtggtacaacgcgaaggtgtgggaaggccgcgataaaccggaactgcagcccgccggacacctccggcttcacttccgtaagaggagaggagtgtacggcaaggggcgggaactggaacttggcccgcctcgttgtgagctgagctcagcggcacgcttttgtggcgtcactgcactgttaccccgccctacgtgtctctgacgctgacaccttctcactgtgaaacgtcgcgacctgtgacgtctggggggcgcctcaaatcttccactccagcatcggatcccggaaaggcagcgtcggagactggacccaaaactcttcctgttctgcctgcagagttgagccccgtccgggtcctggacccgcgtagtactgaccctggatccctgttcactgcgttctcgctccccgcgctccctgctggaccccgggatgccgggcatctccgcccgaggcctctctcatgaggggaggaagcagctagctgttaacctcacccgtgtcctggcactctaccgttccatcttggatgcctacatcatcgaatttttcacagacaacctatgggacacactcccttgctcatggcaggaagcattggatggactgaaaccaccacagctggccacaatgctgctggggatgcctggggaaggggaggtcgtcaggtacaggtcagtgtggccactcaccctgctggccctgaagtccacggcgtgtgccctggcctttacccggatgcctggctttcagaccccctcagaattcctggagaaccccagccagagctcccgactaacagctccattccggaaacatgtcaggcccaagaagcagcatgagatccggaggctgggagagttggtgaagaagctgagtgatttcacaggctgcacccaggttgtagacgtgggctcaggccagggccatctctcccgcttcatggctcttggcctggggttgatggtgaagagcatcgaaggggatcagagactggtggagagagcccagcgcctggaccaggagcttctgcaggctctggagaaagaggagaagaggaacccgcaggtggtccaaaccagccctcgtcactccccacaccacgtggttaggtgggtagaccccacagccctgtgtgaggagcttctgcttccactggagaacccgtgtcagggcagggcccgcttgctgctcacaggcctccacgcctgtggggatctgagtgttgccttgctgagacacttctcctgctgtcctgaggtggtggccctggcctcagtgggctgctgctacatgaagctgagtgaccctggcggctacccactgagtcagtgggtggctgggctgcctggctatgaactgccctaccggcttcgggagggggcctgccatgccctggaggaatatgctgagcggctacagaaagctggccctggccttcttcagcctggctctactgcttgccccactggtggagacgcttattctactggaccggctgctgtaccttcaggaacagggtttccatgctgagctcctgcccatcttcagtcctgaactctctcccagaaacctggttctggtggccaccaagatgcccctgggtcaggctctttctgttctggagactgaagacagctgatgcagcctgaggagacatctcagaccccatcatctgaaagtgcccagagagcacagtggcagagtacatctcatccagagaaacagcatcctgcatcctccagagtcctggttccttcagtttcatcccctttctctccttccatggattatgtaatacattgtaaagttttaattaattaaaaattggatatctgtttccttccca

SEQ ID NO: 375213 - DNA, 1612 bp, Homo sapiens
aagcccgggaaggcaggcgcgcgggttagaacgcgccagaggtcggcgcgcgcacacccgcaccgccccgaccccaggtagtgaggccagtgattccgagtgtgtgaggagcggcagtggcggcggaggagggggcggcgtgggtgggggcgggggcgggatgcgctccccggcccctctagccccgtggtggtacaacgcgaaggtgtgggaaggccgcgataaaccggaactgcagcccgccggacacctccggcttcacttccgtaagaggagaggagtgtacggcaaggggcgggaactggaacttggcccgcctcgttgtgagctgagctcagcggcacgcttttgtggcgtcactgcactgttaccccgccctacgtgtctctgacgctgacaccttctcactgtgaaacgtcgcgacctgtgacgtctggggggcgcctcaaatcttccactccagcatcggatcccggaaaggcagcgtcggagactggacccaaaactcttcctgttctgcctgcagagttgagccccgtccgggtcctggacccgcgtagtactgaccctggatccctgttcactgcgttctcgctccccgcgctccctgctggaccccgggatgccgggcatctccgcccgaggcctctctcatgaggggaggaagcagctagctgttaacctcacccgtgtcctggcactctaccgttccatcttggatgcctacatcatcgaatttttcacagacaacctatgggacacactcccttgctcatggcaggaagcattggatggactgaaaccaccacagctggccacaatgctgctggggatgcctggggaaggggaggtcgtcaggtacaggtcagtgtggccactcaccctgctggccctgaagtccacggcgtgtgccctggcctttacccggatgcctggctttcagaccccctcagaattcctggagaaccccagccagagctcccgactaacagctccattccggaaacatgtcaggcccaagaagcagcatgagatccggaggctgggagagttggtgaagaagctgagtgatttcacaggctgcacccaggttgtagacgtgggctcaggccagggccatctctcccgcttcatggctcttggcctggggttgatggtgaagagcatcgaaggggatcagagactggtggagagagcccagcgcctggaccaggagcttctgcaggctctggagaaagaggagaagaggaacccgcaggtggtccaaaccagccctcgtcactccccacaccacgtggttagatatgtgcagcgggggctacagcgagtggggctagatccccagctgccactgaatctggctgcccttcaggctctttctgttctggagactgaagacagctgatgcagcctgaggagacatctcagaccccatcatctgaaagtgcccagagagcacagtggcagagtacatctcatccagagaaacagcatcctgcatcctccagagtcctggttccttcagtttcatcccctttctctccttccatggattatgtaatacattgtaaagttttaattaattaaaaattggatatctgtttccttccca

SEQ ID NO: 375214 - DNA, 1322 bp, Homo sapiens
gctgcattacagacacagacctgcaaacatctatggttgtgacagagtttctttctgacacctgagtctttctcctgctgcacggaaagcttgctgggaggggcttggaatctggcatgaagccaaagggcatctctgagttgcagcatttaaatgatcccactcagagattcacacagaagactggacacaattccgaagagctgcccagaaggagagaacaatgtcatcactacccagtggcagacacctttcaccccagctacacaagagggggcagatgtgtgaggatcactgcagtccaggagttcgatgtttcagtgagctgtgattgcaccactgcatatcagcctgggtgacagagcaagaccctatctcaaaaatacagaaaaatcatcaaccacttgcagtcgtcgtagaaatcaatcattccctccagttatgtccctgacccacaggcttcatttgtgcaagtactggggctgtgctgtcagtaatgtgtgccgcttctgggaaggacgtccattgcccttgatgattgtggtaccatacacactgcctgtttccttgcctgttggttcgtgcgtgataatcacagggacaccgatcctcacttttgtcaaggacccacagctggaggtgaatttctacactgggatggatgaggactcagatattgctttccaattccgactgcactttggtcatcctgcaatcatgaacagttgtgtgtttggcatatggagatatgaggagaaatgctactatttaccctttgaagatggcaaaccatttgagctgtgcatctatgtgcgtcacaaggaatacaaggtaatggtaaatggccaacgcatttacaactttgcccatcgattcccgccagcatctgtgaagatgctgcaagtcttcagagatatctccctgaccagagtgcttatcagcgattgagggagatgatcagactcctcattgttgaggaatccctctttctacctgaccatgggattcccagagcctactaacagaataatccctcctcaccccttcccctacacttgatcattaaaacagcaccaaacacaagaacacaaaaacaaaaaaaaaacatgggggggcgaggggccctcggaaaaggtttaaaaaaccaatctcgatgaggggcacaggagcccacagagaggcaacggacgacagtgccaaaagggggatcccagaggagaacacggggacgagaacaaaggaggaggaattttcaacaactaaaaaaagccccggcgggaaaacgagacgttacaggaacaacccgaagggggctccgagag

SEQ ID NO: 375215 - DNA, 310 bp, Homo sapiens
gagtgtgtgtctgcacaatggggggacctgcccaacatgctgtgtgctttgacctcagcaaggacccacagctggaggtgaatttctacactgggatggatgaggactcagatattgctttccaattccgactgcactttggtcatcctgcaatcatgaacagttgtgtgtttggcatatggagatatgaggagaaatgctactatttaccctttgaagatggcaaaccatttgagctgtgcatctatgtgcgtcacaaggaatacaaggtgagtacttcaggatcttccagcgctggagctctgtgggc

SEQ ID NO: 375216 - DNA, 1017 bp, Homo sapiens
gctgcattacagacacagacctgcaaacatctatggttgtgacagagtttctttctgacacctgagtctttctcctgctgcacggaaagcttgctgggaggggcttggaatctggcatgaagccaaagggcatctctgagttgcagcatttaaatgatcccactcagagattcacacagaagactggacacaattccgaagagctgcccagaaggagagaacaatgtcatcactacccgtaccatacacactgcctgtttccttgcctgttggttcgtgcgtgataatcacagggacaccgatcctcacttttgtcaaggacccacagctggaggtgaatttctacactgggatggatgaggactcagatattgctttccaattccgactgcactttggtcatcctgcaatcatgaacagttgtgtgtttggcatatggagatatgaggagaaatgctactatttaccctttgaagatggcaaaccatttgagctgtgcatctatgtgcgtcacaaggaatacaaggtaatggtaaatggccaacgcatttacaactttgcccatcgattcccgccagcatctgtgaagatgctgcaagtcttcagagatatctccctgaccagagtgcttatcagcgattgagggagatgatcagactcctcattgttgaggaatccctctttctacctgaccatgggattcccagagcctactaacagaataatccctcctcaccccttcccctacacttgatcattaaaacagcaccaaacacaagaacacaaaaacaaaaaaaaaacatgggggggcgaggggccctcggaaaaggtttaaaaaaccaatctcgatgaggggcacaggagcccacagagaggcaacggacgacagtgccaaaagggggatcccagaggagaacacggggacgagaacaaaggaggaggaattttcaacaactaaaaaaagccccggcgggaaaacgagacgttacaggaacaacccgaagggggctccgagag

SEQ ID NO: 375217 - DNA, 2272 bp, Homo sapiens
tcaagtagctaatcaatctgattcatcctctccctgcaattctagtcttattcaataattccttctgcttaggtaggtcctcattcacccatgtacttatcaagcacccaccatgtgacagatgccaagtgaggtgaaagtgctgggatgagcacctctgtggatctcacaatgaccatccatcttttgcatccttcttggtttttcctttacccaagtcctgcacttcactctttacccgtgcttcagaaaagcggaagttggttaattaattccatttgtctaacacggatgagagtgacagcagacaaggggaaaggcagggaaattcccttagactgttcttacatgcactctcacacttaatagtcaaagccaccctatgaaatagacactacgttattagcctgagttacataaacgagtaaacagaggcttggagaagttaaaaataaattgccctcagtcctaactggagagtggtggagtcagaatttgaatccaggtttaaagaattctagtgccggcactctgcacctatttctctttggacactcatttcccctaaggatcagagaagctcaaagtaggccacttttcgtctccgtaagtccgcaaggtcctgcgagatcacagtgagcagggcaccagcaaatacagtctgcgaccgcgagacgtaaagggaagaacgctcctcggcacccctccccagtctatcctaaagtcaagaacgtccgagcccgcctttctccgggggcgggctgcaataaaacagcaaaatcctccattccccatcagcggtcgattgggggctctttcgaagcggcagctctgtaggaccgctcttctaccccaagatccctcggcttcggccccctaggtgccagggtctgcgggaccccacgctcaaagccgccggccggggtcgacaactgcagagagggtcgggataggaaattgcgggtagcggcagatgcgggtccccaggcatcccggaggttcccacaggtctgcagtgggcctactttgcgaaaagggcccggctgcgccgagcctcgttcaaatcagatgccagacagtgtttcttgggatccatccaaataggtcccttatttctctttgtgggagccctgggcctccttccaggccggaacccaagtgcttaggcagccgggaaaggccggtcccctttttcagttctctcgcgacctctagccacttccggttgctaacggttcccaaacagcccccgaaaacgctacgtgagctgggccctgggccagaggcagaaaacggacggaagaaaaggtctggccggagatgggtctcactctgtcacccagactggagtgcagtgagtggtgcgatcatagcttactgcagcctgaaactcctgggctcaagtgatcttctcgcctcagcctcctgagtagctggagctacaggtgtgagctacccagcatggctcatttgagatttctgagtagagaagtaacatgattaaacttgggtattgagattattattttggctgctatgttaacagtagacttgaatgtgaaggggttgggcaagggcagaagcagggagacaggttggaaagttggagtgggaagggcctttttaagaataacacaaacccctaaagacataaaactgaaaaggccatggaggaaaagataaatgaaactggccttgtaaaattgaaatatttgaatgaaaaaagtaaaaataaaatataaactaaaagtaaaatatgccacacatctaaaagacacagctgattttcctgatatacaaagaccttttatcttaccaaaaaataaaaatatgaacaagccaatagaaaaatagacaaagtacttaacctgcatgcatttattgtcaggcctctgacaatatgatactaagccatcatagcccctgtgaccgccacgtatacatccagatgacctggagcaactgaagaaccacaaaagatggcattccaccattgagatttgttcctgccccaccccaactaatcaatcgaccttgtgacattccccctgcccccgacagtgagtctcatgatctccccacccagcaccttggcaccttgtgacccccgcccctgcccacaagagataaccacctttaactgtaattttccactacctacccaaatcctataaaactgccccacccctatctccctttgctgactctctttttggactcagcccacttgcacccaagtgaaataaacagccttgttgctcacacaaagcct

SEQ ID NO: 375218 - DNA, 2370 bp, Homo sapiens
tttttttttcaggtcaatgatgtagcttctattaaaagggaacagaaaagagggtacaaaatggatttaggtgatccaggggattcagaaaaggtaattttaagacaaaaaagtaaattctactttacagagaaagcactaagtgtgtagtagaggttgggctatgaaattatatattatgaaaatattacaaaaaagtaaaggtatttttttaatgacagtggcctagaatagctttttaaaggaaattacggaagctggtgtacaacttcctgctgaggctgatatgagggaggacagcattacgccattctgcatcaggtcttgttggtgccacataagctggaatgtagtacttcaggagatggaccttccatctgattcagcatggtggattatgtctgagatgctcctgatgctgttcagcctgggtagctggcagagctttcaaccactccctttctctcgagatggactgtgatgctcaccttgctcatgaatggcctggaattctggatattcccatttaagctgtcttttcattggctggaaaggaatagttggtggctcctgtgctgcttgatgatgatattctgagtgcagtcccattccatatgcactggctgcaacttgggaacaattagatatggctgggcttgtgaaagactcaatgatggaaccacagttactatctttaaaagacatcttagagaacacatctcagggcatagaatagagaaagaatgctgacacagtcttcttccacccttaagaagtaaggagctaaccagaaaggatgagagtacgaaacatagagacttacatatcaagcgggagggagtggagattgagctctgcaaccttgcttccctggatgtatggctgcttctttctctggctagggtgttcatgtgccttttaatcacacccgatattctgtttcatcaagctctctttccaaatcctccgatatgatcaccatttcctctctgttctccggctgatgctctaacatccgggcttggagctcctctggcaggatagtcaagaactgctccagcaccagcaattccaggatctgttcttttggtgtgggtctctggcctcagccactgatggcaaagttcccagaatcagctcacagccttacagggtccaggtgtctcctggtagcagaaatgcctaacgttctgatgagctacctcccggttgctggagttcttccatatgaagtagcccatattcttggccccaagtgtagtcctctgctttaactgtcaggcgacttttttattccctttgagatttaatagtcaaggctgcagctgttatgggctgtaacatttcacgtaaagtcttcttttgcaggttggggtatatggaagtctgctttaaggaggctgtccttgagcaagtttcttttgggtcactcctcatttctcccacagggctcctctgctaatgcttctgggagacaccttcatacggccagcgccaggaggcgagaggagaggaaaggaagtcttctcttcacgccctcctggggcccgtcttggcgttgtgtgtggtggagggggacgaatctggggtccgcagtcgcagcctcctcttgctgctgccgccttcatccccgaaatcctgctcctaaccatcaataggaaccctgaaaaaagtcagaggtgtgaagtgcacacataaccctgggccacaaactcggtcccggacgccacaggacaatcgctcaccaggaccacacatcctggccggaagatgggcgggtaccgcggctcccgatgcttccggctcctctaggaagaggctctgggtggtggcctcacgcgccccctccggggagggagccgccgcggggtttgagggcgcagtaggctcccgtcctagcgggtcgcagctccttacaagattttgaaatgttggtggattaatcttctagaagggtgctaggtctccccgtttcccccgccaccaactttagagttgtggtgtacaagcgctatcttttctgatgttatatcccataggaatattttcagtgacataatcaagtttaagcattaagaactagggccctggaataaaatgtgcgttaaaatcctggttctaccacttactatgtgatctttagcaagatagttaacttcactacagctcaattttctcatctataaaatgtgaaaaataatagttacaaaatgagataggacatactagcacactacctgtaaaaaactgtgggctcaacattaccttaaaaaacaatccaaatattgtgttacttagatcccgtcaggacatttttaaagtcattgaaaataaatgctaagctatttcttataaagcctcttagtggga

SEQ ID NO: 375219 - DNA, 2255 bp, Homo sapiens
tcaagtagctaatcaatctgattcatcctctccctgcaattctagtcttattcaataattccttctgcttaggtaggtcctcattcacccatgtacttatcaagcacccaccatgtgacagatgccaagtgaggtgaaagtgctgggatgagcacctctgtggatctcacaatgaccatccatcttttgcatccttcttggtttttcctttacccaagtcctgcacttcactctttacccgtgcttcagaaaagcggaagttggttaattaattccatttgtctaacacggatgagagtgacagcagacaaggggaaaggcagggaaattcccttagactgttcttacatgcactctcacacttaatagtcaaagccaccctatgaaatagacactacgttattagcctgagttacataaacgagtaaacagaggcttggagaagttaaaaataaattgccctcagtcctaactggagagtggtggagtcagaatttgaatccaggtttaaagaattctagtgccggcactctgcacctatttctctttggacactcatttcccctaaggatcagagaagctcaaagtaggccacttttcgtctccgtaagtccgcaaggtcctgcgagatcacagtgagcagggcaccagcaaatacagtctgcgaccgcgagacgtaaagggaagaacgctcctcggcacccctccccagtctatcctaaagtcaagaacgtccgagcccgcctttctccgggggcgggctgcaataaaacagcaaaatcctccattccccatcagcggtcgattgggggctctttcgaagcggcagctctgtaggaccgctcttctaccccaagatccctcggcttcggccccctaggtgccagggtctgcgggaccccacgctcaaagccgccggccggggtcgacaactgcagagagggtcgggataggaaattgcgggtagcggcagatgcgggtccccaggcatcccggaggttcccacaggtctgcagtgggcctactttgcgaaaagggcccggctgcgccgagcctcgttcaaatcagatgccagacagtgtttcttgggatccatccaaataggtcccttatttctctttgtgggagccctgggcctccttccaggccggaacccaagtgcttaggcagccgggaaaggccggtcccctttttcagttctctcgcgacctctagccacttccggttgctaacggttcccaaacagcccccgaaaacgctacgtgagctgggccctgggccagaggcagaaaacggacggaagaaaaggtctggccgctcatttctcccacagggctcctctgctaatgcttctgggagacaccttcatacggccagcgccaggaggcgagaggagaggaaaggaagtcttctcttcacgccctcctggggcccgtcttggcgttgtgtgtggtggagggggacgaatctggggtccgcagtcgcagcctcctcttgctgctgccgccttcatccccgaaatcctgctcctaaccatcaataggaaccctgaaaaaagtcagaggtgtgaagtgcacacataaccctgggccacaaactcggtcccggacgccacaggacaatcgctcaccaggaccacacatcctggccggaagatgggcgggtaccgcggctcccgatgcttccggctcctctaggaagaggctctgggtggtggcctcacgcgccccctccggggagggagccgccgcggggtttgagggcgcagtaggctcccgtcctagcgggtcgcagctccttacaagattttgaaatgttggtggattaatcttctagaagggtgctaggtctccccgtttcccccgccaccaactttagagttgtggtgtacaagcgctatcttttctgatgttatatcccataggaatattttcagtgacataatcaagtttaagcattaagaactagggccctggaataaaatgtgcgttaaaatcctggttctaccacttactatgtgatctttagcaagatagttaacttcactacagctcaattttctcatctataaaatgtgaaaaataatagttacaaaatgagataggacatactagcacactacctgtaaaaaactgtgggctcaacattaccttaaaaaacaatccaaatattgtgttacttagatcccgtcaggacatttttaaagtcattgaaaataaatgctaagctatttcttataaagcctcttagtggga

SEQ ID NO: 375220 - DNA, 746 bp, Homo sapiens
ctcacagccttacagggtccaggtgtctcctggtagcagaaatgcctaacgttctgatgagctacctcccggttgctggagttcttccatatgaagtagcccatattcttggccccaagtgtagtcctctgctttaactgtcaggcgacttttttattccctttgagatttaatagtcaaggctgcagctgttatgggctgtaacatttcacgtaaagtcttcttttgcaggttggggtatatggaagtctgctttaaggaggctgtccttgagcaagtttcttttgggtcactcctaaggcaaaataaatcattactaactcgcagaaatgaaaaggttgctaagaacttttttttttaagattaaagacgtctagttatcttgaaattcattgattcaaaccaccaattcaaaaggaaaatgaacaattcgggtgaattttatcatgtgcgacagaaagcacaaactaggtaagacagacatacaatttataatatgatttgaaaatttcagatacgaggatgaaatcacttttgtcagacccagataaaatacggcggggatggcatgaaggagaggaggttcatgcttacatgtttgagataagaactgtttccaaggactttctaaacaccgcataagaaaccatttcatttcctccatgcatctcctgctttgacaaggtttatcagtagacattctttatagcactgctgtaattcagacacgatgttctggaaagaac

SEQ ID NO: 375221 - DNA, 2058 bp, Homo sapiens
tcaagtagctaatcaatctgattcatcctctccctgcaattctagtcttattcaataattccttctgcttaggtaggtcctcattcacccatgtacttatcaagcacccaccatgtgacagatgccaagtgaggtgaaagtgctgggatgagcacctctgtggatctcacaatgaccatccatcttttgcatccttcttggtttttcctttacccaagtcctgcacttcactctttacccgtgcttcagaaaagcggaagttggttaattaattccatttgtctaacacggatgagagtgacagcagacaaggggaaaggcagggaaattcccttagactgttcttacatgcactctcacacttaatagtcaaagccaccctatgaaatagacactacgttattagcctgagttacataaacgagtaaacagaggcttggagaagttaaaaataaattgccctcagtcctaactggagagtggtggagtcagaatttgaatccaggtttaaagaattctagtgccggcactctgcacctatttctctttggacactcatttcccctaaggatcagagaagctcaaagtaggccacttttcgtctccgtaagtccgcaaggtcctgcgagatcacagtgagcagggcaccagcaaatacagtctgcgaccgcgagacgtaaagggaagaacgctcctcggcacccctccccagtctatcctaaagtcaagaacgtccgagcccgcctttctccgggggcgggctgcaataaaacagcaaaatcctccattccccatcagcggtcgattgggggctctttcgaagcggcagctctgtaggaccgctcttctaccccaagatccctcggcttcggccccctaggtgccagggtctgcgggaccccacgctcaaagccgccggccggggtcgacaactgcagagagggtcgggataggaaattgcgggtagcggcagatgcgggtccccaggcatcccggaggttcccacaggtctgcagtgggcctactttgcgaaaagggcccggctgcgccgagcctcgttcaaatcagatgccagacagtgtttcttgggatccatccaaataggtcccttatttctctttgtgggagccctgggcctccttccaggccggaacccaagtgcttaggcagccgggaaaggccggtcccctttttcagttctctcgcgacctctagccacttccggttgctaacggttcccaaacagcccccgaaaacgctacgtgagctgggccctgggccagaggcagaaaacggacggaagaaaaggtctggccggagatgggtctcactctgtcacccagactggagtgcagtgagtggtgcgatcatagcttactgcagcctgaaactcctgggctcaagtgatcttctcgcctcagcctcctgagtagctggagctacaggaatgagcatagatgaacaatgttgcatcacgcttgacatcaccggggcttctttccagtgtggatttgctcatgtaaaatgaggtgtgagctctgcctgaaagcttttccatatgcatcacatttgcagggcttttctccagtgtgggttctttggtgtctcaaaagatgtgagctgttactgaaagctttcccacacacatcacactcatagggcttctctctaccgtggattcgctggtgtccaacaagagctgaactgtatctgaaggcctttccacgcttgtcacattcatatagtttctttccactgtggattttctggtgacagaagaggcccaagcactagctaaagcttttccctcactcactacactgctatggcttctcttcagtatgaactctgatgttgtctcagatatgaactcagagaggatttcccacaatcattacactggtatggtttcttttccgtgtgagttctctggtgtcaaataacatctgagctgtgatgaaagactttcccacactcactacattggaaaggtttctcctgtgtgggtccttcaatgctgaataagatatgaactgtaataaaagactttttcacact

SEQ ID NO: 375222 - DNA, 2469 bp, Homo sapiens
tcaagtagctaatcaatctgattcatcctctccctgcaattctagtcttattcaataattccttctgcttaggtaggtcctcattcacccatgtacttatcaagcacccaccatgtgacagatgccaagtgaggtgaaagtgctgggatgagcacctctgtggatctcacaatgaccatccatcttttgcatccttcttggtttttcctttacccaagtcctgcacttcactctttacccgtgcttcagaaaagcggaagttggttaattaattccatttgtctaacacggatgagagtgacagcagacaaggggaaaggcagggaaattcccttagactgttcttacatgcactctcacacttaatagtcaaagccaccctatgaaatagacactacgttattagcctgagttacataaacgagtaaacagaggcttggagaagttaaaaataaattgccctcagtcctaactggagagtggtggagtcagaatttgaatccaggtttaaagaattctagtgccggcactctgcacctatttctctttggacactcatttcccctaaggatcagagaagctcaaagtaggccacttttcgtctccgtaagtccgcaaggtcctgcgagatcacagtgagcagggcaccagcaaatacagtctgcgaccgcgagacgtaaagggaagaacgctcctcggcacccctccccagtctatcctaaagtcaagaacgtccgagcccgcctttctccgggggcgggctgcaataaaacagcaaaatcctccattccccatcagcggtcgattgggggctctttcgaagcggcagctctgtaggaccgctcttctaccccaagatccctcggcttcggccccctaggtgccagggtctgcgggaccccacgctcaaagccgccggccggggtcgacaactgcagagagggtcgggataggaaattgcgggtagcggcagatgcgggtccccaggcatcccggaggttcccacaggtctgcagtgggcctactttgcgaaaagggcccggctgcgccgagcctcgttcaaatcagatgccagacagtgtttcttgggatccatccaaataggtcccttatttctctttgtgggagccctgggcctccttccaggccggaacccaagtgcttaggcagccgggaaaggccggtcccctttttcagttctctcgcgacctctagccacttccggttgctaacggttcccaaacagcccccgaaaacgctacgtgagctgggccctgggccagaggcagaaaacggacggaagaaaaggtctggccggttcatcaagctctctctccagatcctccagtaccgtcactgcctcctctccagtctctggatggtgtgcacgcacccatgcttgcaggtctttaggaagaatgctcaggaactgttctagcaccagcaggtctaaaatctgctccttggtgtggcattctggcctcagccactgacggcagagctcccacagctgggagatgggtctcactctgtcacccagactggagtgcagtgagtggtgcgatcatagcttactgcagcctgaaactcctgggctcaagtgatcttctcgcctcagcctcctgagtagctggagctacaggtgtgagctacccagcatggctcatttgagatttctgagtagagaagtaacatgattaaacttgggtattgagattattattttggctgctatgttaacagtagacttgaatgtgaaggggttgggcaagggcagaagcagggagacaggttggaaagttggagtgggaagggcctttttaagaataacacaaacccctaaagacataaaactgaaaaggccatggaggaaaagataaatgaaactggccttgtaaaattgaaatatttgaatgaaaaaagtaaaaataaaatataaactaaaagtaaaatatgccacacatctaaaagacacagctgattttcctgatatacaaagaccttttatcttaccaaaaaataaaaatatgaacaagccaatagaaaaatagacaaagtacttaacctgcatgcatttattgtcaggcctctgacaatatgatactaagccatcatagcccctgtgaccgccacgtatacatccagatgacctggagcaactgaagaaccacaaaagatggcattccaccattgagatttgttcctgccccaccccaactaatcaatcgaccttgtgacattccccctgcccccgacagtgagtctcatgatctccccacccagcaccttggcaccttgtgacccccgcccctgcccacaagagataaccacctttaactgtaattttccactacctacccaaatcctataaaactgccccacccctatctccctttgctgactctctttttggactcagcccacttgcacccaagtgaaataaacagccttgttgctcacacaaagcct

SEQ ID NO: 375223 - DNA, 283 bp, Homo sapiens
tgttggtgaaattccagcctcccttcatttccttttgttctttttctttctttaaccattttcaaaaacacagacctttttacatttttgttgtaaaacaatgaaacaaccaataagtgtacaatatagaaagtaaaaacatgttgtttcaaatgttaaaattgacttatgaagcatatatacacaaaagaatataagtgcatatatatgtatgtaggtatatatatacatgtgtgtatgtatattatgaagtagtataataaaactaaacataccctgcaac

SEQ ID NO: 375224 - DNA, 808 bp, Homo sapiens
  misc_feature (18)..(18): n is a, c, g, or t
  misc_feature (26)..(26): n is a, c, g, or t
ttgggttttactaagttnataggcangtgattggtgggtaagagtccatgggggtgcccagtcccaggagaggggacaatgaagggacaggcctggagttactaggacaggcctttgtgctgagtagcaatgtatacaccatttgggctatcagaggtacccctgggcaggagcctctacatccccttccccctcctctctccatgactcttgacatcctagcttcttctaaggggggagggaaaggggggagatttttatatatatatacatatatatatatcaagttttaaattattgatagttcatctggattaccaaaatcactctgcagccctgcccgaggctagtaggctgcaaccctggtccccacccctaacctcctgctccccctcaagccaactatgcagcccacaagaaggccctgcgggcccccccattgcccagcactgtctcatagaaggctctggtggtacctctgggccccaggagcatcagccccttgatcatctggggtttgtcatcaccatattttctccctgctgttcccaccatgcccttctgccatcttctgggagaaggaaaccaaaggatctaaaactggggtttgggggaaggtttcagcctctccccactccccttgccccacaccctttactccccagcccagagagacgctgcttttaccaggaaagactattgaaagatgttttattttatttttctctgacctttccatccttgaaaaaatggggaaaaaagaagaaaaaagacaaaatcgaccataaaagaccaaaaaaaaaaaaaa

SEQ ID NO: 375225 - DNA, 4139 bp, Homo sapiens
cgcgtcgtgaggcgcgcgcccgcccgccgcctgccgcggatcgcgtggtctgcttggctcgccgcgcctctcccccgtccgtccatattgctgcagcccccgagccgggaagcccgggccgccccgggggcgggggggagggagggacgggactagaagcctgccgggctcggggtgggggcgtcttgcgaggaacgggcggggggggacgcacgcctaggaggcctggactgcagagtggggggccttcctccccccccgccccgctagtgggcctcggatttacggcggctgcatctaactgggagggggccgcacctcgcgtgaaccccgacccttctctgcagggactggggcccagcgccccggaggaaggcgtcgcgggcgctctgctagccaagtgaacccgtggactaagaacgcattgccgccggtcctgaccaccgtgaacggacagtcccccccagaacactctgctccagccaaggtggtgagggcagctgttcctaaacagcgcaaaggcagcaaggttggtgactttggagatgcaatcaattggcccacacctggagagatagcccacaagagtgttcagccacagtcccacaagcctcagcctacccgtaaactgccacccaagaaggacatgaaggaacaggagaaaggagaagggagtgatagtaaggagagtccaaaaaccaaatcagatgaatcaggggaggaaaagaatggagatgaggattgccagcgaggcgggcagaagaagaaaggaaacaaacacaagtgggttccattacaaatagacatgaagcctgaagtgcccagagagaaactggcttcacgccccactcgcccaccggagcctagacacatacctgccaatcgcggagagatcaaagggtctgagtctgccacctacgtgcccgtggccccccccaccccagcctggcaaccagagatcaaaccggagcctgcctggcacgaccaggatgagacatcgagtgtgaagagtgatggggctggtggggcgcgggcttccttccgtggccgtggacgggggcgtggtcgcggccggggacgcggccggggtggcactcgaacccattttgactaccagtttggctaccgaaagtttgatggtgtggaggggcctcgtacgcccaagtacatgaacaacatcacctactactttgacaatgtcagcagcaccgagctttacagtgtggatcaggaactgctcaaagactacatcaagcgccagattgaatactacttcagcgtggacaatttagagcgagacttcttcctgcgaaggaaaatggatgctgatggtttcctacccatcacccttattgcttccttccaccgagtgcaggcccttaccactgacatttcactcatctttgcggccctaaaggacagcaaggtggtggagatcgttgatgagaaagttcgtaggagggaggaaccagaaaagtggcctcttcccccaatagtggattattcacagactgatttctcccagcttctcaactgccctgaatttgttccccgtcagcactaccaaaaggagacagagtcggcacctggctctcctcgtgcagtcaccccagtgccaaccaaaacagaggaggtcagcaacctaaagacactacccaagggcctgtctgccagcctgcctgacctggattctgagaactggattgaagtgaagaagaggcctcggccatccccagcacggcccaagaagtcagaggagtccagattttcccacctgacctctctgcctcagcagctgccttcccagcagctgatgtccaaggatcaggatgagcaagaggaactggattttctgtttgacgaggagatggagcagatggatgggcggaagaacaccttcactgcctggtctgatgaggaatctgactatgagattgatgacagggatgtcaacaagatcctcattgtcacccagacaccacattacatgcgccggcacccagggggggaccgcacaggcaaccacacctcgcgtgccaagatgagcgccgaactggccaaggtcattaatgatggcctcttctactatgagcaggacctgtgggctgaaaagtttgaacctgagtattcccagatcaagcaagaagtcgagaacttcaaaaaggtcaatatgatcagccgggagcagtttgacacactgacccctgagccccctgtggatcccaaccaggaagttcctcctgggccacctcggttccagcaagttcctacggatgccctggccaacaagttgtttggtgctcctgagccctccaccatcgcccgctctctaccaaccactgtcccagagtcaccaaactaccgcaacaccaggacccctcgcactccccggacaccacagctcaaagactcaagccagacatcacggttttacccagtggtgaaagaaggacggacactggatgccaagatgcctcgaaaaagaaagacaagacacagttcaaacccacccttggagagccatgtgggctgggtgatggattcccgtgagcacaggccccgtactgcttccatcagctccagcccctcagaagggacgcctacagttggcagctatggctgtacccctcagtcattgcccaagttccagcatccttcccatgaactgctcaaggaaaatggcttcacacaacacgtctaccataagtatcgtaggcgctgccttaatgagcggaaacgcttgggcattggccagtctcaggagatgaacacactcttccgcttctggtccttcttcctccgagatcacttcaacaaaaagatgtatgaggagttcaagcagctggctctggaggacgccaaagaaggctacagatatggtttggagtgcctttttcgatactacagttatggcctggaaaagaagttccggctggacatattcaaggattttcaggaggaaacggtgaaggactatgaagctggccaactgtatgggctggagaagttctgggccttcttgaaatattccaaagccaaaaatttggacattgaccccaaactgcaagaatacctcggcaaattccgacgtcttgaagacttccgagtagatccccccatgggtgaggagggcaaccacaagcgacactcagtggtagcaggaggtggcggcggtgagggcaggaagcggtgcccctcccagtcttccagcaggcctgctgccatgatcagccaaccccctacaccacccaccggccagcctgtccgggaagatgccaaatggacaagccagcactcgaacacacagactttgggaaagtgaaaagctccttagccctggggcttgaggggggaaaggggtagggtgggtaagagtccatgggggtgcccagtcccaggagaggggacaatgaagggacaggcctggagttactaggacaggcctttgtgctgagtagcaatgtatacaccatttgggctatcagaggtacccctgggcaggagcctctacatccccttccccctcctctctccatgactcttgacatcctagcttcttctaaggggggagggaaaggggggagatttttatatatatatacatatatatatatcaagttttaaattattgatagttcatctggattaccaaaatcactctgcagccctgcccgaggctagtaggctgcaaccctggtccccacccctaacctcctgctccccctcaagccaactatgcagcccacaagaaggccctgcgggcccccccattgcccagcactgtctcatagaaggctctggtggtacctctgggccccaggagcatcagccccttgatcatctggggtttgtcatcaccatattttctccctgctgttcccaccatgcccttctgccatcttctgggagaaggaaaccaaaggatctaaaactggggtttgggggaaggtttcagcctctccccactccccttgccccacaccctttactccccagcccagagagacgctgcttttaccaggaaagactattgaaagatgttttattttatttttctctgacctttccatccttgaaaaaatggggaaaaaagaagaaaaaagacaaaatcgaccataaaagaccaaaaaaaaaaaaaa

SEQ ID NO: 375226 - DNA, 415 bp, Homo sapiens
  misc_feature (104)..(104): n is a, c, g, or t
gagttgggggctggggggaatccttgccagttggtgaagccctgtggcaggaaggtatatgtggacataggagtatacctgaatctctttcttcagccactganctgcttgggttgggctgtgaatgataatggaatggctggagtctgctgttcccaccatgcccttctgccatcttctgggagaaggaaaccaaaggatctaaaactggggtttgggggaaggtttcagcctctccccactccccttgccccacaccctttactccccagcccagagagacgctgcttttaccaggaaagactattgaaagatgttttattttatttttctctgacctttccatccttgaaaaaatggggaaaaaagaagaaaaaagacaaaatcgaccataaaagaccaaaaaaaaaaaaaa

SEQ ID NO: 375227 - DNA, 376 bp, Homo sapiens
tggcaacctggagagctcccgggccagagccaggaggcagctgtgcgatctggatgtacctaaaccctccagggccacatagtgaccccaggccctggtcactccatgcttgtggagggtgcttttgtcaaagaggcctcctttccctcacccagagctggatttccaagaggctcccatacctagctgccctggcagactcccagggaggaaaaacagcgtggccttggcagctgccccgaggaaggagcccacaggtgacagggagaagccattgccattccctgtcctggcccccttcagcaaccctggaggcctaattgaaccctgaggagctctactgagatttcagcatctgggtgtcctattctgaccc
